United States Patent Application Publication US 2014/0057251 A1 - sequence listing, part 15

SEQ ID NO: 17861 - DNA, 8963 bp, Cannabis sativa
  modified_base (51)..(64): a, c, t, g, unknown or other
  modified_base (8236)..(8239): a, c, t, g, unknown or other
gcgtaaactgggtatacgaccattccatagttctacaggtgtcttagggannnnnnnnnnnnnnacaacatttaaaatgtcatttgccgtctgtattgcatatcccctaaagacaagaaaaaccaagcttctggggccttagacaaggctttgacaacatccaaaactgaacgatggagtctctcaagagtcattactagattagccaaggcatcaagggatgctcaaacaccagagagttctgcagagacatatgttgaagcagttggaataggcacttttgcaggaaattcattcgaagtaaacacaagagtttgaggcttggatttcttggatgatgaggcttcaacatcatcaggaattggagcaggtgccttgtaagaagcaacagttgaaggagccaccaaatcttctttctctgtcttgacatcacttctctgcatactcaaaattttgtaaataacttgaggaaaaggaagattcatatttttcttcttaccttcccaaaaactaatgatttgatcatagataattgtggccaaatcaatatcaagcccaattccaaccttgtataagaaagatgccatatcaaaggagatggttgcagtgtgagaagtcagtttccaatttgtagtagcaaacttgtgaagcacgacatacatgaaagtgagattggtgaccgagataacaaaattttgaggccacaccatctattgacccacaatctcagaaagaacctcatccttgtcaagaggttcactgtcctttcatctggaatagaaagagaaggaagatgcaaagcctttgctacatcttgtggagaaaaagagaatcgatgacctctcacaaacagtttacaaaacatgatagagttagaatcaacaatttcattattgagatttgcatagaactctttaaaaatcctattcacataactagaaaaattaaccaaagaacctaccaattttctctcttgaacaatgttaagaacaccatatggacgatgatcactaaaaaaataatttctttcaacaagaaattttctttgtgcataaataaccatgtcacgagcattatcattgtagaaaatagagacgaatgagttttaaagtgtacacctttaatccttggagacgaaataggtgtagtgactggtttcttgcctttaccctttgatgacaacggtgaagaaactagtgcaggggcagatacctcttctggaacagggacaatatcatctttagagttagattcatcagattctaatgcaaagtgaacatggtcaggaaacgattcattagactcatcagtcttggactcagattcttcaacctcgggtctagattcagaagaagatggagatggatgagcctttaatttcttatttgcaacagatggagaagaagacggagatgaagatgtgcccaaaattaattttctttttggggccaactcatttttctttgatcgacttggcttgataggcaatttgagaagcccagcagtagcaccagcagtctttggcgaagatgaaccagatttagcttttaccctagcaaccaccgagggttcaattgaaaaagaactaacttttttgactcaagatggcaccaccacttcagatggtggtgcatcgactccaaggtcagaagtaatgttgggaaacaccattggatgctcattggagagagaaaaaactttctttctagccttggtcttggtggtgcgaccaatagatgttgacggagctgttgcaggtggtggcaatgtagaaactgaagtcagaggagattgtggtggtcagactttagatgcagcaggggccttggatatcctcttcgagtcttcaccatttttctctttgaaaagaaaattgaaactcaaacacactcacacacgattttatgatagaaacacaatgaagaagagaataagaaatcatgtgggaaaaaagaagtaggagaaaaatatatataaggcaagacttatgatttttgaaataaagcaaccataaagtagtttcctttttttctatttgaactaaaaaaataaaccgaaaacccaagcacacaactcacacgatcagccaaggttaccattttttttaaaaaatgatttgtaactaaaaaaaggaaaatttttatttttatttatttattgttttttttcttaaaaacaataaagaaacaacaaaaataaggtccattaaaccctacatgatcagcccaaagaaacttcccctttttatatataaaaaaatcaagttaaaaaaaggcaacaaagacaactaaatgatgacaaatatcaaagatatcataaaaagaaacgttgacaaaaataataccttgatgactaagaatattttaaaacaaataaataaaataccaattttcaccaatgctacaattaattcaacacttctttaaaaatccttgattttttcattaatgataaacgagaatgccataaccccccaaaaaataaaacctatgatcaatgtgatttatcttaaaaaaagacataagacaagccatataaaaatagacgttagtgtatgatagaaaacacatgtgatttttgaaaaaatagaaggaatttttgagagaaaaaagaacaattcaatcacaaacacatattctttaagaaattcaattaacatgtaagagtctgacacacatttttttttattaaaataaacagtgtagtagttttcttgcaatgtttcaagcataagtgtttgatagtgtatgcaaggaaatattgcccatttgacaagaaagtctttttctgaatgtaaagattgtaacccatgaagaccttgtcacactacacccgtggtagcccttttctatggtagcatatcctcttcatatgtttgaattacaaagtaccaacttactcaaaagatagttttcacacactgatgcatgtaactctattcttacataggagcttaaaacaatgctatacaaaggatgctcaaacattaaccattgattgattgtcttgaatatgtctaggaggaattgattattttactctcaagaaaatacctctaaaaactcaaaaacacaagtcaatttatctttcaaaaacaaaaaaacaaaattttcaaaaagattgctagatttcttaaactagaaataaacacatttgatcacgcaacaaaaataaacttttgacaattaaagggaacacaccccaaagattttcggagaaaattaaagcgaaccgaatcaagagtcttagtgaaaatgtcagcaatttgtttatgtgtttcaatgtattctaggacaagaactttattttcaactaattctcttatgaaatgatgacgaatgtcaatatgtttagttcgtgaatgttgcacaggttttttttttgaaatattggttgcattagtattatcacaaaagatagtttaagtgtcaagatcaaactcataatccatcatcatttgcttcatccataaaagttgagcacaaaaacttccaacatcaatgtactcggtctcaacagttgagagagatattgaattttgtttcttgctgtgccatgaaactaaattgtttcccaagtagaaacaacctccacttgtacttttcctatcatcagtattacctgcccaatcagcattactaaaatataaaagattagcattagtttcctttgaatgccaaagaccataatcaatagtcccatgaacataacaaatgattcttttaatagttgttacatgagactccattggattttcttagtacctggcacacacaccaacactataactcaagtcaggtctactagaagtaagataaaaaagactaccaatcatgctcatatacagtgtaggatcaactttgacaccattctcatctttgggtaacttcacagtcgttcccattggagttttggcaatctttcaacttttaactctaaactttttcaccaaattcatagcatatttactttgagaaacaaatataccatcatctaactgcttgacttgtaaacccaaaaaatagttcaactctcccaccatactcatctcaaattcttctttcatccgttttcacaaaaacttgcacctcattgttagaagtagaaccaaaaacaatatcatctacatagatttgagcaatgattatgttagatttattatttttgataaataaagttttatctagtcctcccctcttgtaaccatgagaaactaaaaactgagttagtctctcataccaagcccgtggggcttgtttcaaaccataaagagctttctccaatttgtaaacatgattaggtgcatgaagatcctcaaatcccttcgattgttcaacatagacttcctcattcaagattccattgagaattgattatttaacatccatttggaataacctaaaaccaattaaacaagcaatagacaataataatctaattgattcaagtctaacaacaggtgcaaggtttcatcaaagtctattgcttccacttgtgtatacccttgtgccacaagtcttgctttattctgaacaaccgtgccaaactcatcagttttgttcttgtaaataaattttgtaccaataatattgatataaaatggtctaagaacaagaatccacactttgtttctaaaaaattgctttaactcttcctacataactttaatccaaaattcatcagttaaagcttctttcacatttttaggttcaatcaaagttaaaaaaaaaacaaacaaattgagcaacactactaaaccttcttcttgttaccatgccatcttttagatttccaagatctaaatctgctggatgattcaatttaactctgcttgagggctctttttagacttcatctgagatgatatttggaaacttctttatagtcttcttagtatctgtttcttcagattcatgatcagttggaacagacacctcagttgttgcaataggagagccgctaacagtgttgttttcttgatttttagcaggagcatcaataaacgtatcaattttttcttcaaaggaaaaaataaaaaaaatccctttccagatttcataagatgttttggaagtacctggacgaagaaaaactcaattaatgatacaacaagcagtgttaattgcctcaacccacaatcgtttggtaagtttcttgctatttaacatcactctagccatttcttgaagggtgcaatttttcctttcagcttctccattctgttgaggagttctgggtgctgaaaactcatgagaaatacatgcagacttataaaaatcatcatgcacagagttttcaaattctttaccatgatcacttcttatgcacacaatctttccaatattgcaatccttttcaactttcaatttcaaacaaagagttttaaaagcattagaggtatctaatttttctctcaagaaatctacccaagtaaatctagaaaaatcatccacacaaacaaagatatacctttttccatttaaactctcaatttgaattggacccatacgatccatatgaagcaattctaaaacttttgaagtgtttacattagaaacactttaattatgtgtggttttaattgctttaagttatcaagacttgcacttaccattagattctttactagtttaggtaaaccacgaacaataccttcatgtgacaactttttcaaaattttaaaattaatatgaccaagtttagcatgccacacatcagtattgttattcacaaaagattgacacataattgaagacaacatggtatagcaattgtcattagatctaaaaccttcgagcacattctcaccatttttgttcaaaataaaataattgtctttatcaaagttaatagtgtaaccttgatcacatatttgacttatgctaagcaagttagctttaagtccttccacaagaagcacctttttgatcttaggtaaccctttaaagttaagagtacctattctgagaacattaccttcaactccatttccaaaggttacggatccacaatgcatgtctttttatgtctgtaagaatagacctatcacctgtcatatgtctcgagcacccactatcaaaatactaaaaatgtgaagcacctcctccatcatattcaaaactaaaaccagtaaagcatttattctttttgacccaagtattctgaactttttccctttttactctctttgatatttttaaaatatttgaatctctcaataaattcatttttagcaaagttctttagagtaaaatacttaggtcgaatatgacatttcctgccacaaaaatgataggtaggaatgaatttttcaagcttactattatttttacctgctagctgtaaccgatctgtttacactacagagccagttgatgcaataactttctaagaagttggaacagacatactagcaggtagaattctatcgaaaacaaaaaccattttctttgaaatttgagactttgacgctcgaagtcccacatgattcctttgacctaaattcggtatctcctcaaaaatagatgaaccaggattaagcattcttacatttttctcaattgcatttaaatcttttgacaacttactaatttcatcattttttgaaattatttctttttcaaaattttcatttaatttagaaagttgtttgatttcaaatgataattctttattcttgcttaccaaggttcaattttcaaaacaaaattttaaccaagaataatacatcttcttgtaagattctcttaaagattcatcactatctaaattttcttcatctttggagatattattcaaacacacaaaatttttacctttggatacaaaattcgacataatagaagttaaagcaacattaccttcctcatcttcactactccgagtcattatcactcaaagaagctatcataccttttttattcctcttcaaggtatttgcacattctgactggatatgaccaaatctctcacactccctgcactgaatatttttcctgttagattgaaaaggtttaagagaagaagaaataccttttagagtcttaacattagaattcttatttctaattttgtttatgtatttctaaaaattctttgcaagcaaagccatgtcagtatcatcatcttcatcatccgatgcttcctttttagtacttttgaaagcaatagtctttactttttccttgaaggtactcggtttttcctttgaacgaatcatttggttcaattcaaaggtacatagagaccccatcaattcttctacttttatagtactgaagtcttttgcctcttccatagctgtgagtttaacattaaacctgtcatgaagtacttgtactatttttctcactaaaacagaatcatcaagtttctcaccaagggaaaaatattcattaaaaatatcagataacctttcatagaattcagatagtgttttagattcagtcattcttagattatcaaacctagtttgtaacatgataaatctagaccttttaatatctatcaaactgagtttgaaggatagcatgcatctttagtaaaaatacaagtacaaaaaagtttgatgaaacattctccaacaccattaaagatagcatgaagagctttactgttataactagataacttttcttcttctaaattccataaaagttcagattttacctttgtgctaccatctttattttcctctgacggaggagaccatccagacaaaattgctttccatgctttttcatcttgtgctttaatgaaggctctcatcctcactttctagtaggggtagtttgtgtcattgagtagcgaaggacgagataccgaactttcttctgtaaagaaagacatttctcacaagaaacaaaataaatggaaattaaaaaacaagatctcactaagagtttagtgaactgctctaataccaattgaaattctatttttaataattaccaagtgaaattatcaaacaatttaaataatgtggaactgtagtaaaagtgtttgaacagaatttatctctgttccatcaaacacagaatctgaaagaacagaaatatacgacagaaagtaaaaatacagaaaataaaatgacacacaatattttatacatggtatcaacaactctttcgaattgctcctagtccacggggccacgcccagagaataaaatttattagatgaatctcaagtgattacaaaaccaaattgacttatacaaataaagactccctctttnnnnttgccgcaactgttgtaatctattattctaatcaaatttctgaagtgctgaaaccttgaactcccttcaaatcgtagcatttgcacacttcatctcgaagagtgactcacatgcaatcttcctcccgaagagtgtctaacttgcaatcttcctcccaaaaggtgactcacttgcaatcttcctctcgaagattgactaacttacaatcttcctcccaaagagtgactcacttacactttttctcctgaaaagtgagtcacgaacaagacttctcccgaagcttaatgaataatatccaaggtgttcaaccggcacaatttcaacaagaaataatacataataacacaataataaaacactaagaacttgttggactcaagttcttcacacaacaaagacaatactctctaactttgaaagtaatttaagaaatgatacaccaagatgagctaagtctaaccaataccagcaacttaagggtgtatttatacaatttagaaaccctctaggtcgtggtccaacaaccaagaaataattaggtcaataaatgaaaatctttcaaaataggaaagtcaaaatctgtttaaacacacagtcagtctgttcaaataggtacaatgaacctggacagtttttcagcaaagttttcataaacaaataaggaaactttgactacaataacacacatagctgcacacgatttctgttcggttttatgccctaa

SEQ ID NO: 17862 - DNA, 7156 bp, Cannabis sativa
  modified_base (27)..(41): a, c, t, g, unknown or other
gggattgcacagcttacccggtatttnnnnnnnnnnnnnnngggactactgactgtcacataactctaagtaactaggaaactgtgacagatatttaggaaagaaggtaacttgtaaatttgtaacattgagaaaaaaggtagataaggttttgtaagcccagtataataacatacttatgtattaattttttttttaaaaaaatagaactagtggtacagagtaaaaactagatgtaaaatgcatatctaataatgcaagaactatctggcattgtaaagtgatgaattaggctaattgtaattgaccaagttactctaagtcattgggtaactatttcaggtgagctcttttttacaattttgtctcccaattcacaaagtataaatttctaacgtagaaggtacatctaatcacactaacttgacccttataaagcggagaaataggataattctaagtaacaggataactgtagcggataaagttttgtaagcggatagttatgacatacatatatattgatttttttatttgttttttttaaatgacctaaatctttaggtaattatctcatgtaagttcattttcacaagtttgtacacctatttgaaaagtgtaacttcgtcacatagaaggcacatccaaccacgctaccttgacccgtgtaaagtaaagaaattcgataattctaagtaactgggtaactgtggtaggtatgtttaggaaaaaaaaaagtaacctataaaattataacattggggagtagggtggataaggttttgtaagcccagagttatgacctagttatgtattcaatttattttattttttactttttttttttgtaaaaaaaaattgaagtagtggaatagtgtaaaaaccagacatagaatgtataaccaataacacgaggttgtttggcactgtgaagtaatgaattggattaactgtaattgaccatattactctaagtcactgagtaactatcttaggtgaacttacaagtccatcaccaattcacaaagtgtaacttcccctagtagaaggcacatataatcacactaccttggcccttgtaaaattattttaaaaaaaatcaatacataagtatgtcataaatctgagcatacaaaactgtatcccctctattcctcaaagttacaactttacgggttaccttctttcctaaatatagttgccacggttacacagttatataaaattacccatttcttctcttgccttcagcacgaggaagttacactttgtgaataggtgtacgaccttgtaaagtgaacttacctgagatagttacgcggtcagctagagtaacctaatgaattattgttaacccaattcatctcatcataatcctatacagtcttagcgttattggatttgcattctacgtcaggttttaacactgttctgctatgtcaatttttttgaaaaaaaatataaatacataagtatatcataactctgggattaaaaagcagtatccaccctattctttaatgttacaacttcacgggctactttttttttcgtaaatatacctgccacagttacccgattacttagaattaccccattgcttcgctttacaagggctaagataacgtgattggatgtgcctttttcgtgaggaagttccattttgtgaagtgggggatgggcgtgtaaagttgagctcttctgatataattactcgatgaattaaagtaacctggtcaattacagctgacctaattcatcactttacaatgtcagacagtccttgtattattggatagggatattgtcagcaaaactacctaaacttgatattttttaacacttaaccacaaaaattaaaattttgacagcaaaacctagtgaacccccattctgttttgttgttgacacttttgtcaaaaatctcagttaagtgccacagtggactgtccacgtgtacacgtaaaaaaaatttagtgaaccacataatattaattttaaaaatataattataaatatttaaaaatttaaaaaataaaaaaaaaaaaattattttgaaataatttttttctacttttttttcttttctttcttttttctttcttcttctttctttcttaaactttctgaaaaccctagatatctttctctctttcagctctttctctctctcgtctctttgtggtggacctcgccgcctaggatctcgctagagccgaacccaggcaatcgccaaagctccctctttctcttgagccattgccctctttctctctcaatattctcttctcttcctctctgaagctctctctttctctcactctcgatcttgagccatctgcccttgctgaagctccacgtctcttctcactttctctctcgatcttccctctctttctctctctcgatttgtcctctctttctctctctcgatcctctccctcccagaccctctctttttctctctcatctcttctctctctttgtggtggacttcatcggagtcaaagtaccacagctccaattgagccatctctagaacccattgagccaatcaaagctcggttttgtttccctctagttgaaaattttcaaattctaatctcatttaggaaaagagagactaggtaggcagaatgaaagagaagcaattagggtttcaacaccctttttacattattttttaaaaaaaaattaaaaattataaaaaatgagtatattaaatatctcattttgttatgttttctaggtgttaattagatccttcgataaatataatatatatttgttaaatttttatttcttacgtccattatggttttttattttttattttttatttttatggaagtatataattaggtttattctaaaagattacaagaaacaattttactttaaaaaaattacaaaaatatattaatggatatatatatagcagtgattatctatagactatatagagattataataaatactacttacaatcataaaatcttcttgatgaatatatgtttttcaatttgcaacttatacgtaattgattgaagaaggcacatcattatgattgtatctatgatatattaaatgtggttatataataaaaagtattgactttttttatttgtgttatattaaatgataatatattagaaaaagtattgttctttaacataaagttcctatataatataaaatatgtttttattttaaattaaatgtagttatatagcgtaaaatatttttttaatattttattttaaatttaaactcattagacatatttaaaaatatatatttctattattattttttttacccaatctacatatctaaaaaaaaatttttcttattattttatttttaaacaatataatagaatcaatgtttctaatattgttttctttttaagtgtttatctttatatatatacagtcaagtcaggcttccatttaactgctaccttagatgaacaacaagaagcctcgacttcagatttgaatagtaaatggtggaaatctttttggcacttgaaactcccatctaagataaaaaaatttgcatgacaatgccatcccaatttctaccactttacatcgcaggaaagttattgactcggccgcatgttccatgtgctctaacgcttgggaatccataggccacatgctttattcacttgcccacatgccaaatcgacatggaaaaactcgggtttctcaatagatttcaggaaagcacaagtcatgcaagatggtgattttagttttcacctctccactgtacactcacaacatgattttgagcttattgtttgcaccatgtgggcgatatggtcgcatcgaaataaagtgctacatggaggagtgtttaaagaagggaagattacaacaagatttgcccaagactacctaggaaagtatcatgcttctacaagacaagcccttacaacccctgctgtaactagtgtttcacctactgctgtacacaccagtaaaaaactagcaagcaaggacattccatggcagccccctgatgcatcaggcttgaagctcaatgttgatgcagccatcaatgctacctcaaaaactttgggagtaggtgccattgtacaagatcataatggccttgtcgttgctgccatctcaaagcctgtccaagggtgcttccgttccgatgaaatggaagttaaagcctgtccaagggtgcttcggttccgatgaaatggaagttaaagcactatttcatagtctcaattgggtactccagcagcagctacaaatcacacatattgagacggatgcgctaagagtttttaatgctttaattcatacatctacagatttatcgtgtttttcagatttaatcatagatgttcgttgtcttttgtccttttttcctgaagctactatttctcatgtgatgagaaatgctaatcatgctgctcatggtttagcaaagcatgctttagagttggaccaagacatttgttgggtaggaaaaatttcctatcctattttcactattgttataaatgactgttaatttataataataatagtgaaactttctcaaaaaaaaaaaaagattcaatattgtaatgccgttattttttgtaatatcgaaaaaatatttttatgttttcaaaaaaaaaaaaaaagtgcatgatatttataaaaaaaataaaaaagattataaaatcaaaagtattatggttaaattaaaattataattaagactaaattttaaataatattatattttgttatataaatatcacttaaattaaatatttttaataaaatttatgttgtttattgaataacataaaaaaaaaaaaaaactagttatacaaataaaaatgagataagttcacaactaccattttttattacacattaattaaatataattttaattttaatcaaaccaccgaatataacctcacataatgaaaatatgacctataaaattgattattttattttatttttttgataacctataaaattgattataaattaaagagtaatataaaaaggtaaaaattaaaataaaaaaaaataaaaatgaatataaattagtgtagttttctcattaaaatatacataattaaaataaaaactaagaatataactacgtaatattagcctagtatatatataaactagaatatattgtttaataatttttcatttatgttatttattttttggattaatcttaaattaaaagattgaattgttttattaaattttcttattatcattattaatcatagcggacccaaattgcctaattcgacagtttattaaattatatggagatatatatttatagatatagatataggtcttgactaaaaattagcattaattaaaaataaatatataagataaaaaatcatttgacttttaaatgcactagcaattaaatcatagtttagttaatttaatttgtttcctcatgtaaaacataaattgctgcaacttattataatgtggacgagaagttaaagtacccctaaagaattgaagcttatccaagtactttttctagagttatttgtatgagaacgactcatgataaatattaattattatcaatattaattaaactatgccaacaaaatttaaaaaataatataaatatatatatatatatatatatccatgcatgcatttatttgaaattaagtgtatagctagctaggtaggcaagaaaaccccagagtaattaattgcatcaaaaaaattaataattagttttgactagcttaattatattatttttttaacctaacctagttcgattttatttctatagtttgatcatgagttatatgaagtaagaacacgtagtacaactacaatctatatatatacttgtataaaacaaaacctagctacgtatatgtaaatatatgtacaccacaatctttttttatttgtcatttttgaaagggatatatcacacacacatatatatatacataaatgtaataataatatggtaatataagaaaggtactgagtatgcgttggtctaataattaatgttgaatatatataaatttatatatatatttatatatatataatagagatgctatatgtatcttgtatgatgaatgagtagatttgatataagaaaaattgaatgtgaagttttattgagtagctaatagttatattagctaccttaatttagtgataattttttagttacaataaaaaaaaattgtgaataaatgtaatttttagttacaacattaataaaaaattacttgtaactagtacatagtatttagatagaagttgtcactaatttagtttagtcacaacatatattaatgtgattaaaaatatatttagtcacaataaattgtgatttttgtaactaatgtttttagccacagatcttttaatcacaacataataatttgatgatctataattagtcataactattttatatatttttggtcataattaagttttgttgtgtctgaaagtaaaattttttatagtaagggtaagtctatagtacactcttctaaaagttgtttcggtagactttctatcttttttcagcattaatcgggcatgcaaattttttagtctattttttttttatgataatatacattgcagctatataattaagatcacttgtaaatctttagaaaatttcgaatacaatagtttacagtgccgtaaataaggtttaaatattttattacacgtgcgattattttttttcttataagtgtggtaaacaactatttaaactttatttttggtattataaaatattcataattttttaaaaatttacatgtaatcctaaataggtacaatgtacacgatcgtgaaaaaaaaaaggctaaatttttgtggatactaaaatagatagagagtctaccaaaacaccccgttatgagttgtacttagggatgcacatgggacggggaattagcgaggagtactccccctatccccatctccattaaggattttaatcttcattcccgcttatgggacggggattcccctaatgggggcgggaacggggtggggaatctcttaataaaaaataggctaatcaagattttttccccccgaattttgacattaccgaatcatgtcccctgaactt

SEQ ID NO: 17863 - DNA, 8793 bp, Cannabis sativa
aaaatctctgcaaaaccctaaaactcagtggaagaagaagacgacgatgacagaggaggaagatggccctccaaataaggagctttacgcactccttcacatatcaccggaagcttccgatgaagaaattcgaaaagcttaccgtcaatgggcccaaatctatcaccctgacaagtaccaagctccccatgtatctatctatctaactattaatactttcttcttcttctccattatcatcatttgattgctttctttggttttcctgttttgattatttcatgggtttcagatgaaggacattgctactgagaatttccaacgtatatgtgaagcttatgagattttatgcgatgagaataagaggcaaatttatgatatttatggtatggaaggactcacctctggtttggagcttggtcccaatcttaataaagcacaagagattaaagaagagcttgaacgattgaaacgaaggaaagaagaagagaaaacctctgcacatttaagaccttctggtacaattcatgctagtatgtctttgccgcactttctccacggtgatgggttcatgagagggtatgccaaagtcttcttcttttcctctcttttgtctttgttttttgttatgtttgtttattgatttgaatttgtccaaaaaaaaaaaaacaatgtcagcatggctatgaggagtgatgttcaatctcagatatcaaagaagaatactcttgcaattgctggaaatttggaagttaatggtaatgctggtggtggagctgccacggctgtgtttagacatcagctttcttcagtttcttccattgagttcttggcttcagctggattacatgcacttgttggagttcactctactcggtatactcaaatgctcttttcgctaagcttgaattgatataatatatcttacagtggattgactcaattgttggtattctcagtcatttatctttgcattcaactgctacaattgcattcgctatgtctttgagagatggttcgttgaatctcactaatacttggacacgccaactctctgaaactgcatctggaaatgtatgtattgctgttttattttctatttctggctgagtcaaaattatgttgcatacatacacataaagctactgacctacactatgcttactcatgtcattatgctatctcgtacagttgtattctaatgaattgatctggccactaatcttttttactttttatttatttattgcctgctatttaacagatacaacttggtttaggcccggaatcatctattacggtaggatggcaaaagaaagcaaaaacaatgtcagcctctggagaagtaaaggtagttgtttgggtcctcttttacgtttattccccaataaaagaatctggtagaacttctacaatgaaagcaagtaatttgaactctccatattggtgggattattccaaagcacaaaattatagtgtggcaccgaactaggacagtatactagtttcattttgttgaaattctgtgcattctttgtgtgaattattatttggtaatttttttagcaattgattacttgtaaaatatgtatgaactcctctttctcttattatgcttaaagttaaaacacgaaattcttttttttattaattgggactcatcaattctctttataaaaccatatggatgtattgatttcatatctctcactttcattccactatcacagttgggcaccagttctttcggggcatcagcacattacaatcatcgattctcatccaagtctcatggccgtatcggaggcaaagttgggaggtatttgcaaagtagattgtattactattttagtgtagatgctttatgctgacaaattgtatttgttattccataaatcctttgtttttattggctactttgctttcttctttttattttcagataatattcattagtaactgatattggtatcttacttggtcttgtggtgtgtgtaccttcatgtcctgtgctatcctcttctgactttttaatgttgttgctgcagcaccaatcttgaacttgaagttggcgggggaaggaagatatctagttttagcactgtccgcatgatgtattcaataggaattcaggtattgaaaacagaaaatgtgttcaattagctttgccttgaaagtgatacttcagcctttcggtttcatgtgctctgatatatcaaaaaatctaatctttcattatttttttgtttgcagggaattttctggagatttgaactgcaccggggtggtcaaaagttaattgttcctgtaagcacaatcctactcctcttgctatgaacatgtgtattgatataaagtcaaatatataaaaatttattgttgatataaagttatttagcagtcacctttcctaactttccttggttttagttatttattacaaagttgattgttttaatatatttgtcagatactttttattatactacggtgtgtttgttgctattaatgctggacctcctttacttgcagattttactaacgaggcatttaaatccagtgtttgcaactggagctctcgttgtccctacatcattatactttatactcaaggtttatacaataccgtactcatgtttttttaactaatctatcaacccgtttaagtatttgtcctatatatttttcttctctttttttttttttgttattcaaggccatgtaacttgaactttgtctcttgaagctttatacaatctttggatataatgcttttcttactggcagtaaaccatttggcttaatcgcataataattttcataatccgttttttgggctttaatcaaacttttaagtgaaacactatactagttaacatgtaatcttttgtttctctacaaagattttcaggcaccatttcttgttattgtgtcttgtgaaactaactgccaggattatttttttatatgatattttaattggattaagaagtttgaaatcgctgtactctttgttgcttgcagaaatttgttttcaaaccttattacctgaagagagaaaaacagaaagccttggagaatatggaaaaaacttccgaaaaggtatgttgacatgagcggagatttatagaggcttgctttctttgtgctggtttttatgtaaacatataattttatatttcttatatggaagtattgaagaatttaagtccctattatgtatacaggtaaaagagtcaagagcagcagctgagaaagctcagcagttacttcaaaatgtagccaacaggaaaaaagctaggcaattagagagagatggactggtgatcaccaaagcactctatggaagttctaaagctttgaagaaaattaatgaacctgcagaaggaaacgaggacgaatcagcttcacaaatcatagatgtcaccttacctcttaattttctggtcaatgattctggccagctcaaggtatgcatactctttcgacattcatagtatttgaaatcatgaacacttacttgtagtttagtttcgaaagcctctttgaaatttgatctgatcgtcgtcattatctgatggtgcagctccacgaaggtgtaaagaagtcgggtatcatgggtttttgtgatccttgtcctggagaagccaagcaattgtatgtggaatacacttgtggtcatgggagatatgaggtagagtgtaaatttaagttgtattgtgatgaatgtgttgtattggcttttaacccatagtggttgtttgttgtttcaggtggtggttgatgattttggggagttgatactacctcaagaagttcacagagtttaaatatacagtacaaattattgtcactttaaatttacaaaccacctcttccaattttgtattgtttttttatatatatgcctttgagtttgaggtgacccaataactaatcaatcatttattttcttttttatacattacatttacattcattccaagtcggttggtgtatctctttcttctccctttttttcttctgttgttgctcaaagtgaaataaaggtcattgctttatagtttattttcacaatgctactaattttacttgattttttctattttgatttactagcaaagcaagttttttttttttttaataatggaattttattaatgacaactaattgaaataatagtctccaatccaattggaacacctcttcgtttggttaaagacacgattaggattagaactaaaaaaatgagttaaataatcaactgtctaattctcaaattgcttgacaaaaaaattaaaataaaatcagataacatcacaattaactataaagacaattatattctatttcatttattgctcacaagacaacagtagaaattattgcatcaagttcattcaatctcgtagcttgagcgttcaattattgtgtaaggtatataattacactactagcaacttctcagtcgcaaagaacttgttatttccaaccattgataacgatttgatggcgaactattgaagacaaataagaaccaacaacgaaataaaacaaaacaaaattatatcacacaaacaagatgaaaacacttaaaccatgtcacatagacaagacgaaaacactcaaatctatgtcacagagacaagaataaaatattcaaaaccatatcacagagacaaaactaatggcagtagcaaaaattgaattgcagaagcaaaatacaatctcgaccaagcccacctaagcctaaaaaaagttggcgagtctggcaaaaaaaagataatctcttatagctatagatttaagaacactagcaaagcaagttagatagatagatggtttgatgataaatttgtttttttattaagtaatgattgagactatctacttaaccttgacactacattgagtgtattacttcttctaaatatactaattttacagagagatagtttggtatgaaatgagggaaaatgatgagaaataaatgagaatacaatacagccaagaagaaaaaataaaacaaatggggtttgtgtcaatgaatgaattggtgtttactctaaactattgataatgatgataaatacataagaatgagtcactatgagaaaacatgtttgacaatgagttcaccatttgatggctcaaaccatgcctccatcactactgcatcacaacattcacttgagcttgatgatgatgatgatccttctattccaactgccacaggtttcgccaaaagctttactccttgcttccaatatctctcctctgaaatttttcatttcaaaaaattagttcagtaatcttaggtactagtttgaacaaaagtgtgtcagcagcaactgttagtataataccaggaatcaaattttacctggaccggtggacaagacgatggagttctccaaatccatcacccagtctatccatagagcaaatccatggcacatcccaggctcatcaaattcaacctggtcaaaacatcaaccacaagactcagctttcaatagccactgttgaaattctatattccaattcactacattacacaagattactaccatttacaatattagatttcaaggggaaattgtagataccttgatctgtccagaacatgggcttattggtttcgagaaatcaaactccattattgtaaaaacactactgagtttctgttaaagacagcatcatcattaatctatctaaaagtaaaggtacatttcaatacaagagaatatgaatgaaaaatgagaccttatattttccagactgccaaacaaaacaaggcagacaaggaccctcttgcggggaaggtaattcaccgcacgctcctaaagtggtatttgcaactgaatgatcgaaaccttcaatcttatctaagcagcgacggctactccaaagatcctgcaagcaaggtcgtatatgacatagttttagttctgtttacaagaatcattggcaaggtctcatagggatggcaaaaccaaaacttacagggagagacatggcacaagccttcaaaacccctttacaaggcattatcaatgcgtcttcagagaggacagagttgagcattgtcctttccttccttgtatcagccaaaaaccaagaaaaatgacttcaagagcaatactaatgagagaaaatgacacaatgaaattagagataactgttaattaccaaaatcgcaagttatgccatggaagcatgccctcagttccggtatagaaaggttctccaatcaacaagtcaacctacaatcaacattgcagaatcaacatcttcttccttgctaaacatacagtctaaattatgaaaaagaagacctttttgtggtttgtatcgagcatactcgagactgattgcttcttttcaagaacttgcactcggtccatagagaagccattcgcatcagcaacagcttgcaaatattgagcacccttggcccgcagacctgggaacaatgatattatgttcgatgtgtttgaaagttttgcggcgaggattgttaagaaaacactatcatctgcaacgacacatagtggatcaattcttccctttaactgaaaagaaagcaaggtgtcaatattcagaaaacaagggataacaaacttaaggcttgttgtcgattgaaattcggtgatcatgagtgagatagagaaataaacatagagagcttactgcatttcttatggctgtcaacatgattctcctccaaacatcattgccatagattgcaattctttcaggcgaaagtaagagctgagaatctacacccttgatgccatgcatcttaatttcagtttgtgattgtttataaagattataagagatgctagtttcatcatggacagcttgcaaatgaacctcttcatcattggaaacgggaatgccttggcccggaacaaaccagacacactgtttccagtggtcacaccatccttcatcacctgctgaaccataacaaaaaacaaggaaaagttgtgttacccttgaaagtaacatcaatcattattaaaacaaatcaaacttcttaaagaaaactacaagttttttaaacagtttaaaggacactcatgaagcatttcaccatggacaacatttccaaaaatacaaacttttcaaaagaaaaaaaaaggccaattttttttgtttaaatatcagaaaacactatgctgctacactattgccttaaatagttcaactttcttccgagattttgttaggcactaggattagaaaggtgtgctagcatatacaagtaaataagtttttgtttgggaaagtagtattgagtgagaaattactttatataggtaagtaagggaagaattgggttatgcaatgaattgagtaaaactctttgcatcaaaagggcctaagagctcccatagtttgtaattctggttctctatagttttactactgttctattgtttttctgctactattgctgcagttggtgctatttgctactgtttgtgtgtgtgtgttttgctactggtttggttgatcgaaacagtgtcatcagattttctaaagcattactgcaaaaagtagatgaaatggttccattcactagtgaaaaaaagtccatagctcacttttgttattttgcaaagtaatccatctcggggcagtagaatagaatatcgtcccttcacgatcaagctgaagtacccacctgaatatggaaggaatcacagaactaaagttaatataacaatgttcagaagtgaatgcaaagacaagaaaaatgttaatgttaaaataattaccatgaaactacagcatgaatttgaccatcattagttgcttttatactcacttgagtttctccatgactgtctggccttttccaaaagtcaatttcaaaaattttgaagggttcggacagctggatggatttaaatcgagtaggaaataaaccatttgtatgattccaataacattattgaagatcaaatgatcatatagttagttaccagttttatttctttctctattgcatcacaatgataagcatattgctgtggctttacacctaaaatagtatcaacaccagttggaacaaggcgaacgccatcagatgcttttacctcattgttatgtaaatcatgaagcctccacaagaatgagctttctaccaactgaggtggaaagtgaaaaaaaaatcaagaacacaatcaaacatgaaagccttgaaataatgataactaacagaatcactgtaacacaaaagaggtcagaaatttacatcaagcaacataactgaaataactgtttcaaagttgtggaagttagttcagttagttagacatttgccacatcagtagccgtatctggttaattgggattggtttcagtcagctattttcggttggaatatcagttttagaagttacaaccttaatcttcttctttctgctatactttgtaaattcagttcttggagagaactctgtctcagttttgtaagaagttttcaatctctgttgttgtgtaactgaacttgtatattgaagattgttttataggttgttccctcgtggattaagctggagattcaccatctcttagttgaaccgcgtaatttgtgttttctttactttgctatctcgttttctctcattttttatttagattagatactgtgtttatcgttgtgttcttgtttgtgtggtttgaaattgaatcaacacaaaagtcttcaatcgaaataaaaataacataacacaaatcaagtagcatcttatatctttagttaacaagttttgtca

SEQ ID NO: 17864 - DNA, 5724 bp, Cannabis sativa
  modified_base (1100)..(1109): a, c, t, g, unknown or other
ttgaaaaagacataattaaaaaaataaaggaaaaaaaaagccaccgctcccttgaaaagaaggaaaaaaaaacaaaaaagagaagtaatgacagttcattctattgttggactgcagattcgccaatcatggttacacaatctaggatatctccctaagacaaatgaagatatctttaaccaaactagctagagttcacatactttgtacaacttttagtctttccaaaacatcaaactataatgttatgcaatgaaaaaataaataaataaataaacaattcattaagaatttatggaagaaataaaaaacttaaaagtttgataatgatatgtcaattccaatgagagaatatggtatcccaatcaagttcgtacacctagagaccaacttataaatggactcagcaagcaataaccttgcatttcatcctttgcagcctgcccatcggttctgttcatgaaagcaacaaaaccacaatttctttggcgcctcctctcctcttctgttctaggccacattatctttacactagcaataggtccaaatcttccaaatgttcgcaagagaaaattttcatcaacctagactcatcaaaaaccataaaaaattataatcataaattgaatgttttctaataaaataaatatgcaacggatcacgaataaatcctaccaggggcatatagctaggaatgtaagtaagtggggcaaatagaaaggaaaaagaaaaaaaaaagacggggcatatatatagttaaaactattaatataagtaaaagtatactatattaactttaaatgtttatgaaaaataactgcagttggggcagcagcccacactcattcaagtgtggcaatgcccctgaatccaactgaagaaaaaataacctgcggtgagagatttccaacatatagatttgtagtctgtggatctccatcatcaaatgatccagccaatttgccacttggatcaaactcatcaggcagctcatcaaagcgactagatagctggaaaacaaaaaatcagctaaagggacttacaaatgaataggacctgaaagaaaaattcaataagattctttttttaaaaaaaaaaannnnnnnnnnagaagaagaaagaaagaaagaaatccaaactacatattttgattagtatatatcagatttgtgcttaaggaagtagacataaataagcactgaagaagtggcttccctgcttttataaatcaagatcaacttaccggaaatattgtaaaactaaaatatttatgtatatatatacataatgcatagaagtagaaagtcataaaacctaaattctatattgattgttctaagttcaaattcagcaactccacaaaaagataaaatcttttaaaaattctttctaaaagtccttcctggaaaacactcacagcagaattatcattatgacgccattgatcacgatcttgatttcgcctctccctcaactcttgctcatgcttcagttcctccataaaatgatctatgtttcgagacttccctttttctctctcccttggcttctcctcctccttctacaatgtgtaactgagcatattaagaacagaaaccatccaatatttcaaaatagtagtactatgactatgatacttactttcttctcagattcttttcccttggatgccataggaggtggtatgaaagatggaacatacctgcagaagagaaatgatcgccaaactttcttgttactgaaactcttccaatcagtaagtgaaaaagacaataatgtgaaaaagagaactagatcattaaactatagttcaatctaagtttgtccctttgagatgcctaacttggtacttctagtgttgccttgtaatctaatgaagacctttatgggaagccagacattcagtagactagcaccaggcataattcttctaaaatgtagatgtcatgtccatcagttttctaaaggaaacaaaaaaaaaatcctattaagagggagtaacaaattattgacacttttacccttctcaaattttccgtgaattgggaatatagttcttcaacttgtctcaaattagcatgcatacccctaaaaatgtgacgtccgtgcccaaacttaacacctgaactgaatcagtaatctatgtacattcaatgacacaattgcaagtatctatatttatacatatatcaagggacactttgccaattcacaacaaagtttgggcaacaatgtcaataactatcgctggggagtatattgtgtttacaccataaatcattctctaaaaccctcagtataagcattcaaaagtgcattcctatacaaatccaaactttgaattatcatttacaaaaacaatacatacgaagaaattaacaatgtatcttaattagagagccattctatcctatcttaaatcatcaagaaaatccaaaattaaatttctttttgatatccaactttgatcagtttgtgtcaaattcaattgatctccttcggctgtaatttttcttttcttactttattacaatagtaactatttcttgcccaaagacaaaacacatctttctgctacattctgtatgagataaaatgtaaataatagcaaggtaagaacacagcaatacttgacttcccacgtaataccgtacaatattttgatgcataacaaagcaagaagaaaatatcaagtgtatgatactctgatcctttaagatatggtaataaataaataaaaaatgaattttttagaaaacaaattactgtaattcacatatgttaaacccaataaatctcagagatacacgaagataaagatgattcaaagattgaattttaaagaaaatgtatgcacattcttcaacaatcttgccataattcatgttagaaacaaactcaataccaacacacgtacctaatatttcatgtgtgtctgcaaatatgtatatttcgtatgtgtgcgtgtgtgtgcatatatatatattaatatatataataattaaagaaccatgacacatcaccataatttattgaaaaaaggttcaaaattttcagatggattgtatgaataaaataattgaatcaccaaatccaactcttctacccgcacataaatttagttaaataataattaaaaaatatctacaaactaatgtagttcttcagtatctagatttaacttgtttgctttacgaacagcataaaaatgatgataaacaaaataagttgttgagaaatgatagcaataaaataagattgctcactaatctttgaatccactatacactttccaacatctaaatctttgttgcgtctgacatatacaaccacaatacaaagctccctacctatgatgtcttatcaaaataattttgcaacttggttaaatcagaatacatttctttacctacttcccttctttggaccagataccccatctttggacttttcacctgccatccgggaatgaataaaaaggtccatacttttattaatgtgttccggtcataaaataaaaatatctactaatccatagtgtgaagcataacaagtagaaaatgaaatcaagtgtaccatctttgcaacaaaagaaagcattagagctactttcttacactgaccttcattatcagcctttactttgtcattaggattgatcaatcctccacgaacaaaagctttcgacccaggtgtggtgtccccttgaaacgactccacaaactccgcatacaatcgagctgtttcatcctcagccctctacaacagagaagaacctttcatttttatttagacaaaaacattattaggaaaccaatagaatcaagaaaagaagaaccaaccccaccttcttctttgcttcttcctcctccctatgcttttgaaaaggtgtctttttccgtgtaatggaaaaagaactcatctcagcatcaagatctgtaagtggtgcaaaaaatgagtcgacaatagtgatatacaaattatggagaaagaatacacatatttgcactccataaatcataatcaaagctcaaaattgattccatccataaaaactacataataaattgtgccccagttcaaaccacatatgatcatagctaatcaaataagctgcccaagtgataaacaattaagctctttctggtgtctacaacaatgaaaaggaatactccaccgtccaaactaatgagccaaatacacacacctacataaatcttatcttacctatataataaatgcttatctaacaaaatttcttgtggcttaacacaataatttataaattctgttagttttcacataaacctgtcaaatactaacaacaatgctgaagagatgcaaatgaataaaccataattgttcacaacttctgtaaagaggttattagttggtacctattcaatgaagcattgtcaattttggttcatcattattccaggtaacttattttttaggtagttaaaaataattacaattcaaattgcctggaaacacttcatttggagagaagtttctcaatgtcaacatacagttcataaacaccgagatatagaattatcccaaacttaaacatagtactgaaataaaatatatgtaggaacaaataccatacaaataggattcacatgaaagaaacagaattttttataatgaactaaaatcagaaaattgtggaagcttctttggccgtggcccttacgtttcaaatggaaaaatatttgagaacaacatttcggattagacaaaatatcgtatgattattaacacttatggatattataacattccaaacgactataatatacacaatttctaaatcttagaactaaacattataaagtaattatgacaaacctgactaatatacaatagaagaaaaaaggaaaagataattggataatagctatatcattcactgtagaatggcgatgtacactttgtgagagaaaaacctcaaaacacaaccagacaaagtttccatcgtctctttgtatttaattatcaatagcaacctcaaaaccgtaagtacagtacctgctgtgagtgaagtaactgttacccggccagtgattgaaacggaattcctactctccgatgtccgatctccgatcagtagtgaacgaggttgattaaatttctagggtatcgatgatgagtcagtgagcgaacagaagaaagccaaaaaggccgatagagaggagaaattgagtaacagagagagaacgaagaagttgtgctatgactttggaagaatgttttgtaattgggctgggcttctcatataggcctaacttttcttttcacaaatatagagaaataataaaaaattacaaaaatatagttgtaattttatttacataaaatacagtaaatttttatgtatttttatgtcgtactttgttaattttttgttaattgtatattatttttttgttattgttttgatgttgttttaatattattttctattacttttatgcagtttttcttattattttggtattatttttatagaataccgtaaaaatataaaaaaaaaaatcttttgaacgtaaaaatataaaaaaaataatatattatgtaattatctctttttttaagtgtagcgaatgattttaacaagtaaaaattacataaaatatgaatttttaaaaatactttacttaaatatggcacatttaaatttagctacatttcaaggttgtaatgtaaaattacttt

SEQ ID NO: 17865 - DNA, 8043 bp, Cannabis sativa
ctcaaatgcttgaaggctagcaactataaatacccatcaagggttccaaattgtaaccaacatccaaaagccaaaagtttcaaactatcaacaagagcttactactttacatacaattctctcttctttctaagccaaactagtttcatatactaaatcaacaactactcatcaacatcactacttcactacattaccacaacaaaccattaaccacatacctacctattctaaacaaaaccaatacaaatttattctcaatccttcaattgtagagaaacctctactgtgcacttgagttctgccatttctaaatcagtgacaccctcgttagcctcttctgaatagtaatctgaattaatatcttcattttcattagcgataattaccacatttatctatttttgttagcagcgatgtcttgaggaccatttatcatcgcaacgaaaacagaggcccttatctcgcttttattgaatccattgtcggtgtatttttgtgtttcggcggctggtttttggtatgtgtctcatatgcactgaggtaaaggaagtatgaaatggtggtgtcgtagtgcggctgaaaccagaaacttttggtctgtagtgggtggatgcgttcgactcttcctcaatgtcttggacgattccattgcctcatcaatatttcttggtcgttgcacctgaagttttgcgcggatagtgggacgaaggccattaatgaaagtactaagttgtaagctgtattttaggtgagacattatccagaggagctaggagtcgaataaattgcctcttgaacttgagtaatgtactctctttctttatcgccacaaattgatcatataaagaaccaacctgtgtatctcggaaatgcctcaacaccaatcgtttcatctcctcccaactcaagattgcccgctttttattctcaaactgataccaaaggagtgcgtcacttgaaaaagagataaacgctgcctcgacctttttttcctcgctgtaatggcagcaagcaaaaaatcactttgcttgcgtaatccacttgtcgggattttccccttcaaaagttgcattttgagttttgggagtcgctgatcgtttcgatgatgggggttgtaataattctgttccattggggcatccattattatgggatttctactacaattgaacacgcaggaagcaccacgactctcgtcctcaaacgaatctcgagtgtcatatcggcggaaggcttctcccacatgttcttggacgcttcttgattgcccataatcatttcttggttgttcttggacctttcttgattgttcttgagcctccaaaatgagctgtagctgttgttgcaattgttcgtgaagctggcgactcatttcacttaccgagtcattaataatcgtcttgagggaatctgtgatagtttccgtgaccaattccagaactgattcctgaaccgattgcatcgttgacttcaaagccacctcttcaagtgtggacttcgattgactcttctccactagtttcttcgacattgtccacgctcaccgcaccaaattgatacaatttcttagattagaaatccgctatcaagtattagaagacccataatgaaattcctcaaagaattgctgtttatttatgaataatgatcaaattacacttagctttcgagaggctagtctctccaagtacacaacctttcgagagggctgctctctccgaaagaattctctcaatacttaattatctaccccttatctgagttctaatctcctatttatagatactaagcctgccacatgagcagctttaattaaactcaagtgatcaattcgaaaagacaactcaacctttccttaaaacaatttaaataaaactcaactaaaagacataagcctggcctttaggccctctctttctatggtaaacaaatttgaccaggggcgtatcaacatatgaaaaacctcgtcaaactcagtcaccactgtagcaaactgctctgcaatctcaggtggtgtcgttgctgcaactgttgcttaatttagctcaactaaaattctagctccttcatggctttgggttattaaagactttcccagcaaaagatccccattgaaagtcacttactgatccctcaattggagtttcattacttgtgtattccaatttgtatgggtcatgcccaatttcgacagccattgaatgcccaatatgacattagaacttcctaatgccaaacgcaaaaaatcttcgacaatggtgagttgctgaagttgcaatactacccgacaacacattccctcaaccttgaccgaatctcccgaacccattgtgaccccataagcttcagttttggaatcgagaactcctaattttcaaaccagcttagtagaaatgaagttgtgagtcactcttattagagtcaccacaagttgttcttgaataaaccccctgatttttatggtttttggagcagataatccagtcactgagtggagggaaacctctacagactcattgacttcaaccaagtctaaaacagcatcttcaaccaagtctaaagcagcatcgtcatcttcattttttgtagaatccccatcttgaacatttaagacattaatctctttgctcttatgcatatgtccacgataccacttgctatcacatttaaagcacattcctttgtccttcttggcttggtgttccgattcagtcaatcttttgtactcaccgacttgctttcttgaactactctcgtactattccaataattaccatagcttgtgttggtatgatgcccttgctgggatggagttccagcaacatgatataatgtagttcccttaaatttggactcaatactaagggcttacttcatagccagctccaaggaattcggccttcagaacctaacctcatcccatattgtcttcttcaacccgttggagaagctactgatcacaatctcattaaggacgttgtccaatggcgccaaatactcattgaatttcttgaagtattctttaacaatgctttcttgtttaacgccgagaaattggtcatacaaatttccttcgtgggtgctatgaaaacgcctcaagattaacagcttcatctcttcccaatggttcataggacgcctcttattttccatttgataccgcagcaatgcatcaccctcaaacgaaatcacagccgcctccaacttctctccattggtcagtttttgcagagagaaatactgcaaaggtttcctcgggccagacggagattggccctcgagtgcaaaggcagaagggagctctgttctgccttcaagatccatccatcaggttttctccataaaaaatcggcatacctagtctccgtagacgaaaatctctccgctggtcataagcatgaccgaattgttcagctgtaaacgcaccaaaagcaggatttgttgttgcacttggcacaacaggggactcgtgactgacctgctatctttcttgggtgttgctgaaaaagaagcgatgttcttggacatttcttcttgattcttgagcagtagctcgaatcttaaaatgctatttcttccttcagatcagccacatctctgctgatttccgtgttcgctgccattttctcttggccgcattccatcacctcttcaccagagtccgacctcgttgtcatcttctcgccacccgccatcttctttgatctgtcagctctgataccaatttggtaggcaatagatgaaaagctttctttattgatatcaaaaacatagaaagatacaatcttgcccaattattcgagttacttggaaactcccaaaccagagataaatctctaatctatacaagttattccccttcacttaactctaaatctactatttatatccccccataaaaggtgacctggacttattagttaattagtccagtcagccaaaaacgaaataatagtcagccacttaagaactaactaagactaattgacatgtggcaaagctcttctcctacagtacctataccgaataggaggtctaacagagtgtaaaagaattaactgtaccccacagcttctaggaatgactagttattaatctttatgttcaaaagaattgtcaatgtgataaatttaaatgttaatatgaacaatatacatgtgtatgcatcctgatatttcagtagtaatttttgtcgccattgtgtttgcatcctgatattggtggatgcattcatgtttagtcatcttcattcacataccaaccaaaaaaaggaaagaaagtaaaaaaaacagtttttaagttaattaagcatattcttattggaatatttatatattaatgaaaaaaatctaattatgtttcctggttatggtagttttcttgtttatttaaaatgtccacacaagaaaattgtaccatttcccttatccataagacatgtcttgtgcagtgtctttacgagtcttttgaagaagaagctggtttcctaaagtttgctacgtcaataacttcaaacgatattgatgaaatacagaagttccttgatgctgctgttgatggctggtattcatttacttgttgatggttgttgtgataacaattttaaaatctcatgctgctttagttttgtatgattgatgtttatgcctaaatttttttagaatttatttatttatgctatttactttcttggtttgcttatttattcagtttatatttgtagtaaaactactctgattataatagtagtgagtcattatggtttgcagttgcgagggtctaattatcaaaacaatgaataaagatgctacatatgagccatccaggcggtctcttaactggctcaaattgaagaaagattatttagataggttagtgtcctaaattagtgtttttccttagttgctgctgcttaagcattatgaaatatgattctgtttacttattggatgttgcagtattggggattcactggatttggtacccatagccgctttccatggacgtggaaaacgtacaggtgactatatccttgcaactatctctagttgatgcatccataattcttaatcttgcatctaataagtttagatatcttttgttttgtaccctgtgatgtgcccttgctttcaagtttctaatgctttaagggtcttcatacagtttatgagcctttaaagttttttttcattgtcgtagttttcagtacaactgtacaaatcactgactttcatattgcgtctattaaggtgtctatggtgcctttctcattgcttgttatgacactagtaatgaagagttccagagcatttgtaaaattggtgagtgaaattattgtctgaaacttccaaatgtcttgacctcacattggtaatttcgcctgaaatttacttgataatggttaggcactggattttctgaagcaatgcttgaagagcgctctgctagtctccgttctaaagttatagaaagaccaaaggtctgcatttttatttgtttaattttatctattatcccaatgatgtcaatatagatgagtatgcatgtggttttcttgtttaacttgctgattctagcattccctataattgcagtcatattatcgatatgcggagagcattaatccagatgtttggtttgaaccttttgaggtaaatagcgacctactttagtttaagcatctagtcgtgtgcttcttcttgtgtaaattcaatttgtgcatttaaatccctatcctcctttttcctttcctatgctgtaaaaaacataactgactgcagattctgcagctcaatgtggtttatgattttctgaatttgattggagtgtgagcagtgttaagaaatctctcaatcacgaccttttctaagataattacatatgctttgtactgcagctggagtatgctacaaacaaaatgagcaaattgtactccttttgtttagaaagtggttttattttcaaagatccattttttgataaattaattgggcctaatgagcttaccttaggtgatcatgaatatttgcccctcaacctctgttttaatgtaaagaatattccagtattaaatataagtaataggaacctgaacaacagaactattattagctactagttttcatatttttattgttgcttgcttttaggtctgggaggttaaagctgcagacttgactattagccctgtccatcgtgctgctattggcatcgtagattctgataaggttcaacaagtccttatttaagttcagaattccttacaaaaaaaaagttcagagttgtattattttccatctttgctatacatgtttcatctaagctcaatacgtttcttacataacaattttttttttcaattgttataaagggcatttcacttcgattcccacgacttatccgcattcgagaggacaagaagccagaggaggcctcatcatctgagcaggtgaagagtcacttatctcgtgatttacttatttattgagttaaaaagtgactgaccaattattccaacttcattcagtgtttagcttagtcagactcatgagattttaaccttaaacagagaatttagttaactcttaggctatgtttggaagttaaattttggtgaggaaagaaaaaaagtaaggaaaatgtggaaaataaaaaaaaataattaatttttcatgtttggtatgaaaattttcgttgaatgaagttatttttcatacaatttctttctatactaaatatgagattttttttttatatatatttttttactttcttttccctacatttttcatacattctttccccccaactaaaatccaacttccaaacatagagttacgttactcttaaaatttgtcaagtccagcttgataatagcaggcatgcaatttgctgatcattaatattatggaaataactggagatgaaagagaaagaacaattttgaattgttggcttgaaactgtgattttcaagagttgaatcgttatgccatcttaatagagtcttacctgaattttaggttgctgaaatgtacaactctcaaagtcacaatcagtccaacaatcaagatgagaatgaagatgattgagtgacagttgccttccttaactcatttatggggggatttttgtgcgtgtaaagaccggcagagctgtaatgcctattcatagcgataccagtcaacatgttggaacccctcttttcttcaataaaaaaacaagcaagaaatgaagatgacatccctgtatttggaatttttcacttgtaaattggtaacgtatgctaagaggctcaaatcgaaaatgattcacacagtgaaactgcatttatccattagatttgtactaaaggacattaacaaaatgactaaaattttgatctacttgcccaatttgatttttttttttttatttctttgcttttcagtatcaaaagtacattccatatttatgtataaataaaagggtaaatagcggtataagtacttaatatttatttttagaagcataactacttaatatttgtaacagaacatttggaagtaattgaaattacatgtttcttagaatttgagttttatatgcgccttgtttaagacaataacaaagtcttactgacgaagttagagaaaaattacagttttataaacattgggtacttatggcgttaaaaataaatattagatttatgacatttataagtttaaaattttgggtgcttatgtcgctatttatcctaaataaaataggaatttttaaataaattgtcattttacacttttttatgttggttaagtttcagtttttatttttaccaattttttcaaaccaatacacgattatcattttacatgttttcttctattgtttccaatcaatcactaactatacactacttgtttctctacaagttattcactctttaaccctctctcggtattactctcattcttccctttttattttgttttctttttcctccattcttcttattatagtctttgtctttattctttttgtctttgtctttttttttttt

SEQ ID NO: 17866 - DNA, 6774 bp, Cannabis sativa
aaacttttttgccgcaaataaccctattatatattgtcaattgttatatgagtttaccggtaggatcctgagttaaaataggtcatagaaaaaataaaaattgagcttttattataagaataaatagtaattttttttattaagcccctaaaatgagtggatcttagggctttgctcgtcttagtctaaagtcgatccccaagcctatcataaagggagactattagaaaagcctccaagcatgaatgggacaatattatctatcaaaatatacttatggttatggttagagtgttataatattttatatttagtaattaattaatcaattgattaattttatttgatttgataaatcaaataaattatttcataaaatattttaatattatcttttttaaaagaaaactatacaattctaaggcacaaaatatgaaaaatttccaccaagcacttgactcatctgaaacaagagctcgttttgctaaacaatgaacaatgttcttaaacctttttacaatgagacaaggatatactattaaaaaatttatagacataaaaaatgtcattaagcttattacaaaactcattgaaacaagtatctttactatttactgcaagaaccaattgcaagcaataaaaaaaaagcagtgacagtcttataccccaactgcatgcaaagagagagtccatgaagcaatgctttggccttagggacatgaggctcaaccgttcccacactcaaaaacgcactagagaagaggacatgaccattaggattggacgtaacaaccccattcccatttcgcattctttatcacgaagcccatcattcacaaacaaattgacctcgcctaaagtcaggtctggttcggtagttaattgagttgtgtgttaaaatttgagtttcgtatattaatttatttggttcaactattgccattctaatacaatttattttttatttttgttttgtgatgtttcatgtaatgttttagtgttaggggctggaactctagctctcttggttggattcaattaggctcatacatgtggtatccaaatttatgtattttttttttcatattcgctagttcaagtgactgctattaataataaaaatgtgtattttaataagttaggtttgttgtttgagggcgtcataattttattatctaaattttgaggaacaatcttgtctcatgtggctagcgataaatattcaatagcccatatttgaaaaaacatgttcttcaaatagataatgagcaatatattttatttatatatattttgattaacaatttttaattttatatgtttcgattgcaaagaatcaagacatgaaaaattgaagagtaatgaaataaaaaacaccatttaaataatgaaagtggataatgtataattcacctcagtgaaagaattaagagatcaaaaattgaagagtaatgaaataaataacatcatttaaagaatgaaagtggataatgtattatttagctcagtcaaacggataataaaaacacaaaagtggtccagctccaagcctatatgtaaatgtatcattaacaaaaactgataatggtctgatcatgcatttcaattttttgataccaaaattcaagtaagaaaaaaaaaatcaaatagttggtgtaacaaattatcatttaaaggttatttttatgcaaagctggagatgtattaaaggttattttttcaatagaatgttggaccactcccctaaaagttcaccaattatattgtgactacttcataatgcttttaaacattatggttattgtctattgatatgggttatttttttatttttatttttttgaaagggagttatatattgatatagttgaatactgtttttaattacacccagtgtttggtaacagaccaggcaaaaaagtacctatttgagacacattttggagacccaagctaaatcaaatcaggcaaataaattaaggctctctaaagaccagtcaactgagtaattaatgtatctttttaaagaagataaattattgacagtttgttctcacaaaaaagaaattattgatagtttgtgattaaattcgtcggcttaaagttaaaataagacaatttgagcaaaaaaaaaaagaaaaatatcgtctctttcaaaaaaataataataatacattcataatatcattgttttaccttaaaaataatcttccatcgatgcgctgtaaactcaccaatagtattttgccatttgcgttagcctaattcagttttgtggtattaatttttgatgggatttgcttattcttttcctatcaaataagatcgatcatggacaattggacatggatggtgagttttatattaataataccaatatgaaaagcttacctcctttgtaaaactaaacaagtgacatatataggattgggtaaatatttaatatttgtaaaattataattttttttattttaaatttattaaaagaatatttaaaagtatataactaatacttaggtatttctatttaaatctaataatctaaaatctagatcttagagtatctccaatagtatcattttttaagaatgctaaaaatatacacacgttagaatgctaaaaatattctaatttttagttataataattttttaacttcaattttatttaaaaaaaaaaaaaaagaatatgctactacatagcatccatgcaaccacctaaaataacatcttttttctcttcaataatataatatcttaatattttacgtataatatatttacctcagcaagtaccctctaaattcttatcattagagatactcttatatattctatatttaaaataataacaaaacctgtaattttacaaatattaagtagtcgtaccactaaaaataaacattaactttatatcacttataaatttttttaaaaaaatcatttatactactatttaccgttactcattcttattcatatgatctaagaggaactttaattattattcgttagatttagagggatcaaagaaaatatttgatagccaaaagttagatgatgtagtgattcaaaagtcaaaaatcatcaaaccactgaagatcacgcatttattttgaaaaatgtacagcacgtacgtattttgttttgattttgtctcaaactaattatgatggtacgcattgtttgcataatgtgttatgatggattggagtggtgaccataagagaaaatgtttaaattatatatatttttttttgtttttaaatttttgtaaatcataaaaataaatgtgcattgataattaattttgatttttctttaatttcaaaaataaaaaatgtgattggtaattttttttattattattcttattatttaagtgaggatcttaaaagcaaagtgagattagttagataaagtgatgaaataaaaataaaaaataaaataaaataaatattgataaaaataaaatgaatatgtgatagtttagtggattcacgtttttcttaagaggtctcaagttcgaactcctctttcctcaatataaaaaatataataaaataaaatgaatattgataaaaataatatgaatatgtagtgatggtagttttatactttttgtaagaggtctcaagcctctcctcaatataaaaaaatatatatatatattgataaaaagagatataaattgaatttttttagtaaattatttaagaaaatttgaaagtaacttatttataattttcaaaattttattgaaaacaaaatcgttttacaaacatatgaggagcccatggtctagcaaaacatgctttagagttggatcgagatgtttgttggttaggggaaataccctattctattttcactacggttgtaaatgaatgttgatttataatagaagtgatcttttctcaaaaaaaaaaaaaaattctcccacacaaataagaggtgatagaagttggtgtgaatatatttgtaaagggaattaatttgttgtaatttattttggtgagtaatatatttgactgatttaccaaaaaagaaagaggtgacatatatattttatttaataagagttgtaatttttttattttatatattattaaaaattaaaagagagaataaagaaaaataaattaattatattataagcaactaaacaaatgaatctttattcaataacaagaataatttaggagaatatttaaaatcaataataatttagaagcataatttttcaaggaaaaaataccaatttatttttttaataacatatactaatcactttaaataataataataagaagaagaagaaattacaataaatcttacaataatttactgtaaaaattatttaaatatttaccattttaaaatattataaatgtataaagcgacatcgttttgtagtacaatatataacccaattgagagtacaataccattgtgtgcaagtttcaaaaaaaaaaaaaaaaagaaacaagttgtgtgaccgttggggtggggcccgttgaagttacaaggtaaccgttaaacattcaaaaaaatttaaggtaaaaaacttccacaaacaatgttgtgtgctttttaggccatttctcttataatcccaaaatctcaaacaaaaattcacagagaacagagaagaagacccaactcatcaatgggctgcgtttcgtcgaagctcttcaaaaaagagcttaatcgagatatcatactcaacaatggcggcgactacatgaaccatgtagtttctcttacatcaaccacttatggggttctcaatctcgacaatgggaagcaaatggttaaagactctgttgctgttacaacagagactaataagaaagttgagaggtcatcaccgattcgagaaaacaagccagaggttattaatgcttgggagcttatgaaggatttagaagaaggaatgcccatttcgaatcaagtaaagaagagtccgaaaactcgtgctgttcttcttcgtgggttggctgatatggatgcgaagagtccaatgaagttcttgaatcagattggttcgccgagaaagtcgaagagtgttggagcagcagtaggaggagggaataaagagaataataacaaaaagggttttggcactggttatgtgggtcggtctgattttagtcccaaaggggtacttaaagtgaggaattcttgtgagaaatcttgtaaagcagtgttgagtttgagttttcaggcaaaagggtctccgaaaagggaaagctttagtcctctttttgatccagatttagtagcttcttatgagaaagagttgaatgttgaaggagagcaaatcaagagaatggtttctccatcgcctaataaagctcggagaaagataatgactttggagaagaatggtaatactactaatctaatacaatctttcactaagaattgtccacctgggggagaaaactctgtggtggtttacaccacaacacttaggggaattaggaaaacttttgaggattgcaacaaagttagatccataatcgagtcttacctcgtccatgtgattgagcgcgacatatcgatggattcgggttttaaggaagaacttaggaagctaatggggacaacacaagtgaaagttccattggtttttgtcaaagggcgattgataggaggagctgaagaggtgatgaagttggaggaagaaggaaagttgggtgctttgtttgatggtatacctcaaattgctttagggggaagttgtgaaggttgtgctggatttagatttgttatgtgtatggcttgtaatgggagttgtaaggttttggatgagaagcagaaggtgcagcagaggaagattgtgatggtgagatgtggtgagtgtaatgagaatggtttggtccattgtcccatttgttgttaacatcttgatttggcttggaatattggttttggcaaatggggtttctaaagtgggttttaggcctctttctttctgttttagtattatgatttacacgtttggtaacatttgttgatgttgggaatgttacttgtagtattgattatttgatttgtaatatatctcttcttccatgtattttggaagaattatatatgaaaatgaattttctatcgaaaaaaaaaaaaaaaacaagtacaagaaaagagactacctttttctccttctcaaaaacccttaaattaaacccctaaatatttctctgttctcaaatcccaatcttcatcctcatcctctttgttttccatttcttatttatatattatacatttcactcctagtagaagaaactgaatctaaatctaactgccttgaattttgtacatgttgcagtagctatcatagcaatctgttgcatttctctgttatggatgcttaaatagttatgctctaatttctaatgcaagtaaacaatttgagtttttggatgtgaatttcaagacccaaataagcaattctgattattacgtaattgcttctcattgtgatctccattcttattcaataattagctttgtgaccttattcatttgtaactactgcctatgacgataagaaaatccctaaaacacatagcagaaagtagaagttgaaaaggggaaatttgaaagacattttcaacaacagctggttaaaggaattacaattttgtcctatattttggttagaagcttatacagtttgaaaggctttttgattagttgagtttggtgtttatgattgttggttcttaattgatcatattatggtagtattggctattgtgct

SEQ ID NO: 17867 - DNA, 1760 bp, Cannabis sativa
cctagtagatctaccatgcaagtatagtgctccacagaaggatcaacatcataatgcgttttcatggctgcaaataattgttgaccttgttctacaagaccaacatggctgcacgctgttagcaccccaataaaagtgacatgatttggttttatctcagattctaacatgtcatgaaataactggatcgcttcatggccgcgaccatgtatagcaagtccaacaatcattgaactgtaagaaaatacgtttctttccttcatttgttcaaaaaccttgaatgcttcatcaatgcttccacacttagagtacatatccacaagtgcggatccaacaacaacgttttcatgtggtccaaatcctgatctttcggcaacatctcgaacccacttagcatagtttgacgcacctaattgtgcacaagccgaaatgacaccaataagagtgactacatctgtctctacttcttcagtttgcattcgtttaaaaacttctaaggcctctcttggtcgagcattttgggcataaccagtaaccatggccgtccaggacactttatccttaacaggcaactcaacaaacaagtctcgcgctgattccatgtccccactcttcgaatacgctacaatcaactctgtccaagaaatcacatctttgtcaggcatttcatcaaacaccttgcgcccagattccaaaagcccacactttgtatacatatcaatcatagtattgcccacatacaaatctgaaccatacccaccaaccaaaatcgtctgtgcatgcatctgtgtacctaaatctacgtcaagagtagcactacaagccttgaaaaacacagagaacgtaaaggacaaaggcctagtaccatctcttctcatacaattatacaaactaacagactctgaaagcgtcccttgaagaatgaatccccgaatcatagcattccataaaaacggattcgggcatctaacctggtggaagatgagtcgaggataagtgtccattggaacacaaaattttgtcagcattcgaataagcttagaaagaacaaagcagcattggtcaaggccttggcaaagcaggtgggcgtggacctgtttgacgtgtttgacacttgtgcagccatcgagagcgaggatgagtttggattgcagaagcttctgttgtttttgaagctgagatggagataaggggggccataagagttgttgagtctctcgttgaggtttccattggaggaaaaggtcaattggagtagagagagtggagaatctacgagacagagtaggcattgccacaaaactaaataaatttttgaagtgttgtaattagaatttagaaaataaattatatggaaagatatagaataggaagagaataataaacatagtttgaatacagagagaaagcataggaaaataaaaatagacagcagtaatttttgaatgaaacagctcaatgaattcattggctagatattgtatttatacacatgtgtgaaccgtacaacaataatgacctaataatatttatacaatcacagagcaatcattacaatcatttcaagggaatattctaataataattggttacaatatgggaccacacgattctgttatgccagctcacagcaacttgagcaatatggtaaatttcatttcttcacaacccatctcaaacttgagggtgtttcaaccacaccaagtttgtctatcaagaaatgaaatctggattgggttaaacttttggtgagacaatct

SEQ ID NO: 17868 - DNA, 6314 bp, Cannabis sativa
  modified_base (52)..(52): a, c, t, g, unknown or other
  modified_base (6240)..(6271): a, c, t, g, unknown or other
aggttttctaaactttatatgtttttatttttcattgttttagaattcatantaggatgttaatcaaacatacttgttagtaaatctagatcttggtaagattaattccaacactagatccctattgtggggagaccttcagcaaaaaagggtggacagtttaactgaattcttggtacaaggtcagggattcataaacctagaagatgcttatgcccaagtgtatggagtacttcctgcaccttccaccgaagcaacaagtgcccaacctttgtagatggtaactccttccatttatcatccacttacaactcttactactctcacagtgtatggaccaagtacttccgtacaactagctatacaggctagttgtacgtgtatagagctacacaaatcggatacagtgccgctcctagacaaacgaaccaaaaagtggaaacttcgtaatccaatgtgacctgcccaaggaataagaggagttcaaagggaccaaattagagtgagtctgcgaagaagggtaaaatcaagaattaagatacacagaatacacaagtctcattgatactcgagagaatgtgtacaaggcaacatctaacatggtgcattataggaagcctccgccaatgttcaagggcaaaaaatataggcaagacccaaacaaaaggtgcgagtatcatggtgatattggtcacacaaccaatgagtgcgactacttaaaagatgaaatagaagggttggtacggaatgggcatttgagaattgggtaagaattcttgtcatttacccaggacaagcggtcacacatgggcaactattcgttctcgagcagcaaggagccataaaccctcctcagggagtgggaaacccacaacttcctggaatacaagctcctaatgcacaagtccttctgggaacacaaactgctccaacaacaatagtggtagtggctcccaatcccaaaaatccgtatcctctcggaattgcattaccagccctagacaatcatgtagcaactatttcaggtggaccacatattgctagaagcacctaaaatgcacaaaagcggtacctgaacgaattaaatcaaggtgaggcttgtcattttgtgcaatcacttgctcaaggcccaagattaatgaacttgcctatgaccttcactgaagatgatgcacgacatgtgcatttcccgcataattagtcattggttattgaggctccaatagccaacaaaagagtttcccaaatcttggtggataatggaagctctatgaacatcatcttcaaaggagccttccacgccattggtctagtagaaagccaacttgttaccctgtccaattcagttgtaaggtttcaatggagacatgttgttccccatgggaaagatacaactcccaatgaatataatcggagaagtctttggaagtaatgcagtctcctcttttaaatacagcaccttcgtggtagttgattgttctactacttataacgccatcttgggaagaccatttctaatggatttcggagtagtgacatcaatccagcatctatgcttaaaattccagtgataccaaaagcataagaattatcagaggagaccaaagaagtgcacgaagttgctatagcctctcaactagaattgtgcttatggttagggaaggaaataactctgacgccaaaatatcttctcagggcacattgggggtagtcccagaagatgagcttaacccttaaatcggtgtggaacgtgccatagagccaattgaggaagtagaggaagtctgtcttaatgatcaagatcccactaaggtcatctaagtatggaagaacttgcccccagcagtaaaagaacagattgtttccacaattaaagcaaatagtgatgtgttagcctggagtcatgttgatatgactggtataagttccaaggttattttctatgcactaaacataaatcccaatgttgaaccagtttggcgaaagcggagaccattagaccaagcaaggttggagatggtaagaacagaggtggataaactgacaaacatcgactttctcagggaagccttgtaccccgtatggcttgccaacctagtgttggtcccgaagcctaacaggacatggaggatgtgtatagacttcacatgtttgaataaagcttgtcccaaagattgtttcccacttacttccattgatcaaatggttgatgccactttgggatttatattgttaacctttatggacacgtactttggctataatcaaacaaaaatgcatgtggttaactaagaacatactagtttccaaattaacaaaggaatctattgctacaaggtcatgccattctgtttgaagaatgtcggagccatatatcagcgaatggtaaataagatgttcaagaatgtcattggtaaaaacatggaggtatacattgacgacatgttggtgaagtcgaagacatctgaaagccattatcaagatctagaaaaggcctttgccatcatccgggagtatgaaatgaaatcaaacccaaagaagtgtactttcagagtctcttcatggaagtttttaggattcatagttagctctcgaggaattgaagcaaactcgaagaaaatcaaagcctttgtagatatgtcttcaactaagaaacgtaaagatgttcaaaaattgacaggaagaatagcaacatttagtacattcgtctctaaatccacagacaagtgcataccattgttcaatatacttcgaggaaataacaagtttgagtggacaacagaatgtgagatagccttccagcaactaaaaaaacatttagtgaaggccccaatactgtccaagccagttgacggagagttgttgtttctgtacctggcagtgtctgatcatgccttaagcgccacactcgtgggagaagaaggaaaggtacaacttccagtatattacatatgcaagagactgctaggcgcggagtccagatattcaatgcttgaaaagctttcctattgcttactagttgcttctcgaaagttaagaccataattccaggcccacgccataagggtactaatcaaccaccctctccatcaagtgttacaaaagcaagagtcatcggggagactcctaaaatgggcaatggaattgagttcgttagacatacaataccaatctagagttttaattaaatgtcaggcttggtagacttcatagtagaatgcactgggataaatgatgaccttgaaactttgaccccagaaagagaagtttggaggatatacgttgatggagcatcaaacgagaaaggtgacagtgccaaaattgtactgatatcccccaacacctccaggtctagagtgcacttcgttttgaatatgaagcctccaataatgaagttgagcacgaagccatgattgctggtttattgttagcaaaagaagttagtgcttagtacatcgaactctaagtgactctcatcttgtggtcaatcaagtgtctggagagtaccagaaaaaagggagaagatggccaattacgtaacttaaactcgagaactgttgcaacattttaaacattactctgtaaggaaatccccaggaataagaatacttttgctggtatgttggcaaagttagcaacagatccaaaaatagaaaaatacggacttgacccattacacatttgatagctccaagcacggaaggaatgggggtctccgccattaaccatttaacccctagatggcaccaatactctagtacatggaaatgggtatactcttggaggatagagctgcttcaaggaaagttcagtactaagcgcccagatatgtaatcatggacggaaggttatacagaagagggttatcaatgtcgtaccttcgatgcatagccagaatagagataagcgttgttatgcatgaaatccatgaagggttttatagagatcacacatctggacccagcctgtctgaaaagatcattcgtcaaggttacttttggcctaccatgaagaaggattgcattgaatatgtccgtaagtgtgaacatttccaatgttattcaaaagttttaagagctccacccacagagataaccctcatgagtagttcttggccttttgcagtctaatgaatagatttagtgggattgctccatattggcaagggaggagtcaaattcaccattgtcgttgttgactagtttacaaagtgggtggaagccgagcctatgaatatgataacttcgaagaaggccctagacttcgttatcaaaaatatagtgtgcagatatggacttccacacaaaatagtgtctgataatagaaaatagtttgatagtgaccaattcacctatttttgtgccaagcacggaataatcaaaagcttttctactgtggccagacctcaagcaaatggacaagtggaagtcgtcaataaaatcatgaagactactttaaaaaaagaagcttcaagcttgtaaagcacactggccaaaggaactccccagggttctttgggcctacagaacaactgagagaacttctatgggccttactccatattccatgacttatggatgcgaagctgtgatcccagtcgaatccactatatctacgtataggagggatacctatgacccaacccaaaaccatgctttactctaagaatctttagatttaatcgaggagctctgggaacaatcacaggtgcaactccagatgtatcaaaacaaaatcgctaggaatttcaactctaaagttaagagtagaaaattcaggatcgatgatcttgttttgagaagagttttccctgcttctcaggaacccggagtgagagtcttatgtccaaattaggaaagtccgtatgaaataactaataaaattggtgatggaacttatcatatgaagagactagattgaacaagaattctcagagcctagaatgctgaccacctgcgcagatactatctgtaaactagaggtggtcactttttacatttttaccttgcctttttattaattttcatgtatgtcttagggcaggaatagtttgaataaaaagaagatatttcatttcataattggtcttttaatgttttatcatataacaagtgatcagaagtctcaactactaatcacttggtgctagcatgtatgttattgtacaaatattcatattctctttcctccactagaaaacaaccaagtaaaatgctcaaatataagagtaggaagtattgcctaaaaccgaaacctcaagaaaccagaagtaatccactgtcttattgtatttgaagattatttaacacttaatcaaatgtgaaaaaaaagaaagtattataaatctggagcctcaagaaagcagaagtaagtcattgccttagtacatttataattaattgtagtccattaaaatagttaatccaggttaatttacaataaaggtccgtgcgtaatggttaactcaggttaacaatgtcataacattcaggttacttaaatcaattgattcaggtcaattaaagagttatgtttgaaaaaaccctgaaaataagtgatgggtaatattcttagacaattaattagttcaggttaactaattactccaagttttaaataaaaccttctgcaaaagcatttttttcacaaaaagcatttaagtctaagtacttaatcgaaaaaactaaaggttcaggcctttggaaccagaacttgacaaggttggaagtgttaaaaacttagcaatatctacgatatgaaatgcaaatatctaatgagttaataaaaggtaccaagtactgaaaaagccctatgccaagggtataaaatgtctctgctcattcaaaaaggggaatccttgttccccaaataaaaagaaaggttcagaacaattatggttgagtagtgccctccagtgctaaagcatcttgagtttggccctctaggattgcagactcgactggaacaggaacctcaaaggctggaggagcagggttatccatattttcacctacagggttggtggtttcgagattgaccatccttaatccttaaggttcacttctgacttgtccaccttctctagcgccaatagctaaggcaaaagttcctcactgtcttcagcatccaagagatctaacatggctttgttatgctcccagagggtatatactgagtgaacaaaagcttgctccaaagctttgacatgttgagcctcctgtgttgggttttatgccctannnnnnnnnnnnnnnnnnnnnnnnnnnnnnnnttattaatatagatcagagataacatttaatgttgcatggttc

SEQ ID NO: 17869 - DNA, 1867 bp, Cannabis sativa
aaatctgtttactttttataattataatacgtagaatagaaaaccatgtaagttttcgttcttctccaattctacgaatctatctcatgaatttaaaaatagtgtcgtgtcttgcaagttttgagatatataggatatatctctaaaaatatccaactcgtgacctctggtcagcatatgcgaactgttgtgcattggacgctggtcggatggtgtcattcaccttgcacggagtactcttttattcggaaagtaacacttgtctagcaagcctaattcacttggagtagtgtatgaggcttggagccttcattaagcgtatcattctgccagtctggatgatctgttagggaagcttattcaccttacgaaaagagcgatgctagaacaagttattttccttccgcaaacttactggtcaaacactctctatgatcagatggctctttatccgtgcaacatactatttggacatgatctctttctccacgaaagggaatatagtatatccgtgaattcgcctattactaattatttttgccacttatcaatttattatacgcaacattatcaaagaaaaattgggatgacaattttatttctttatataatacaccaacatttttcaaaatttgctcataattaaacaaaaatgaaagaaagcttaagaaacaatataaatttaatacttaaacaattccgtaattattttgatcaaggccgaataggtttgactttgaaacagcacagcacaccaccaatgtactatttgccttaaaccgtaagttgagcacgagtcattgcaaaagagaaaaagaagaaaaaaaaaacatattgtagtttgtgattttgtttttctcgataagatatatactgtattaggggatttgtttatttatataattaatttaatttaaattaaaaagaaaaagtgggaaaacagtgttaaattaacaaacagccatagtgcacttatttgggcatctgtctcacgtggaagggttacaacagtagaaattgcctagtgtgccggcaccccatcgctgtccacgaccaacaattttaccagaaaaaagacgagtggttggctgacgcgtattaacttccaaaaaataaaaaataaaataaaatttattttttctctcttcttagctgacatggcggtcatctaaccccacatgcctgcctcatttcaggccaggtctacgtgttgtggaccccactttgtccccttctgtcactacaactcccccaccagacataatttctctatctttctttctctccctcccacgactctcactaaattcaattccaagtttaccttttgctctcggtccaacttatcttacgtggctcctgaacgtttactttttttttttttttaaattcttctttctcttatcttcccactataaatactacccctcatcccagtactactccacaacctcagcaaactcaacacacaatcttctcttctttatcgttcctcatccgattccttttctaatttttttagactaaaaactttgtcataaattattgtatctgaaaaaaaaatggctgtggactcggctctatcttctcctttaggccctccggtctgtgaaaaagacgcaaaagccctccaattcattgaggaaatgacacgaaacgccgatgccgtacaggaaaaggtgttgagcgaaatcttggctagaaatgcccatactgagtacctgaaaaggttcaaactcggtggcgcaaccgatcgtgaaacttacaaatctgaacttccggtaatcacttatgaggatcttcagcctgaaattcaacgaattgctaatggagatcgctctcctatcttgtccgctcaccccattac

SEQ ID NO: 17870 - DNA, 3008 bp, Cannabis sativa
ttttgttgattaatgaagattttctttcttgataaaaaaaaaacaagatttaatttgtcatataaaaagtaatttataacttttgccaaatataaactcaaaaatagtatttcttcacatggttctttaatttagtgagattgacacgtgtctcatctaaaataccgaacttaactaccatttcaaattatttcaaattctctgtttcattatcttctattatcttcttctttcttcttcttcttctttcttctgagaataatcaacaatggcgaatgtaacccaagacgaaaacttgacactgacccagatagaagaaaccacaaaggaactgtctttacacctcaaaaagtcaattcaaaacgttgacctcaagtttcaacagctcaatcattctattcatcatcatcttcatcactccatagtttctgaattcttgacactcaagaaagatcaaatgcttcatcagcaagagtttgataaaatggagtctttgaaattcaagattttgaaggatctcagtcttaacagatcaatgttcttccttgtgaagagggaaatgcagaggttgaagaaagaagaggaaaatcttaaccagaagctgatccaaactttggggaatgaagattttcaggttgtggaatcgcgagatgatgatcttgaaggggtcaagaaaagggaagatgatgctgttagttttgatgaagagttgaagaacagttgtttgattaattgtctcaaagaagaagaagaggatgttcagactagtgttgaaatcgttaagaatgatgcaatttcgaggtcattctcaatgaaatttaaattaattaagtactattatcaacagcctatgttcaactggattagagatggaaaagatgagagattcgaggaggaggtttcggtttgttcaaaggagattaaagtgagaaataagtacgaactcgagttcaagattcatgagtttttggaggcaaggcgagaggcgatgaagaaagctcgagtagaagggaagttttcctacattgagtgggctgatcatgctatgagtagcaatagattcaccgagattataatttcgattcaagagaaagttgaggagatttcgaggcggctttgtgtgcaaatatgtgaactcatgtttgcttcagcagaaaatttgaaacagtttaggcagtggcataacttcaaacaaattttcatgttactaatgattctgcaggagcccggggagaccgtttacttggggagaatggcttctgtgttagaagctgctcaacacattcttatgaggactaaacagtacaagttttgtgaagaatcagaagggttgagcagtgaaattggtggaatatttgacttgtttctaagggaagttttgtgttttgaatccattctaacttacccgattttttctcctgtgtttgatgatgacacaatgctagtaaatgttgagaaaagtcttgatgagtgtctgaaacaagaatttggatacaatggtagaaaagatggtggctctttagtaacatcaatgatcattcttgtgaatagggagattgaaaggttgatgaaagcaaaagaaaaactgaacaagaggcttagtgctttgacatctaattgtactgaagatggtagttcttcacacattcaatcccaagggtcaacaagggtaagagctgatgttaaagaggaagaaaaagatttgggctctttagattcgcaagtggtgcgattgcaggaattgacaagtgagagagctgatgttacagaggaagaaaaggactcgagcgagttggaattcagctcttcaaatacagattcacagatgttgcaagtgcaagaaacgacaagtgaaggggctggtgttacagaggaagaaaaggatttgatcacgttggtattcagctcttcgagtaaagattcgcaagtggtgcaagtgcaagaatcgacaagtgaaagagctgatgttaaggatgatggtaacacttcaagtgaaaattcacaggctgcacaaccagaagaattgattatcgaaagagctaatagttttaaggatgaacataaagtgctcaagaaagaaaaagatcatgatgtttgtcctaaaatcattaagagtaaaaaatattcaagctcattgtccaggaagctcaaactgatcaaacactattatctagcaagaaatactaagttcaactggttgaggaatggaaaagatgacaaattcgagatagaaagtgctactgattcggaggagtttcgagtgaggaacatgtcggaaatggaaaagaagattgcggttttgattgaggaaaggcaaaaggcgatcgagtatgctcaaaaagaagggaagaggagttacctgaagtggtttgaacttcatagtaggactaatcacaaaagagtcaataagattacactaaggaaaggtcaatggatttatcaaaatgccatgtaccttcatgacaagcttattcatcaaatgtgtgagctgattttcacctttgaaatttgtggacaggtaagaaaatggaatgacttaaaacacatattactattactattgctactgcaagagcaggatgagactggtttcttctgccactttgtaattcttgcaacagaacgtgctcagacacttgtcgaaatcaaaatgcagcagcacggaattcgcagtgtggaattagaaggaatgagtagtagaattgatgagtttatggatttgtttctaagggaatttttgtgtttggagtcaatgtttggttaccctattctctattcaactcatgttaacagtaaactagatgcaattaagattggtgttgaggaatgtatgaaacaaatgaatgagattcagaacaaagtgactgaattcatgtctttagcaatagaattgggagaaaatgtggtgtagacaaaaacttagctcattggtattattctcatgttaatgtagttgtaatgttagatataataagataccattcattaaagccaatatgatcaatcat

SEQ ID NO: 17871 - DNA, 15710 bp, Cannabis sativa
attcatcatcacaaataaggaccgatttgtcaaatgcatcactagagcttacaatattagtagagtgttattgttgatttttgaactgtaacttcctacactcaaacttggtgtgacctgttttcttataatagttgcaaatgatgctcccagaatcttgtgtttgatcatcaggtccttgtgaattacctcctttgtattcacttatagtacagttttttccctgtgcaaaatcattatgactcaccaagccactattaagaggagttgaagaggtattttttgtgcgaagaacatgactaagcacatcttgtaaagaggagacatcagaactagagagaacttgtgactttgtagagttaaatcctgatgagattcctgcaagaaaactcataatagccatatgctctcgctggcgctattgaactttcacattaggactaaatggaaataacacattaagttcttcatatgtttttttcaaatgtcatgaagtaactcataagagacttatcttgtttctctgcatggtaaaaggctttgaaaacatcatatatgcgagatatgttgtctttgctagaatacaaaaactccaagtaatctattagttttttaaccaattcacaatgattaatcaaactaattacctcattatcgatagaattttgaattcgaaagaacaagtgagcatcctcacagagccatattttccttgaatcatctttttctttgggaggatcgtcagtcaagtgatcatctttgtcaatactccttagatacagtcaaattgtcttactctattccaaataattcgaaccaatcaatttatggtccgtaattttagacatcacgagaaccacatcgataacaaccactgattttgaatcaaattttatctttgtcataatctcaaaagcaagaaaaagtgaaagagaaaaggataaagcaaacaccaaagaatgaacacccaaacatgaagaaggcaaaagtatcacaccacaaaatgacaacaatcgctagagaccgatacaaggaggtcgggaaaaggttgggatcttgacagacagtgaccgtcaccagaaaagaggttagacgcaccctcatgcggcggcacgtgggcagcagagttaagcggcacgtggggcccacgtgcgatgatactaactgtcaaactttggggttttacagatcggtggctgggtaatccgtgtatgtgggcgatgagaaagaactcgcactctaactagggtttctgaaaaaggaaccctaaactcaaaccctaatcttactttttaatgaactctaattttgaattttaaattttgaatcacaattctaagtatggctctaataccatgtagtgaatggtgaatcaaattgtatattgtatttcatagaatattgtatatttatatacaaagctaggagactaacaacaaaataaaataaactgtatattgtattccatagaatcaaattgtatattgtattccatagaatagtgtatattttaattacatgactaacaacaaaataaaataaattattgttattttatgcctttgttatgcccatattttgagcaataatatggtgttgacacgtgtaaagaaaccagctcgtgttataaagcaattaatgtattcaataaatacgcctcaaaaaatacatacggtagaaatattcaaactcaccctttgaaagacaaggacaggctatgaataataactatcgattgatcaaattggtgagatgaacgatcaacttagaaggttcatcttgagatatacagaatacacaacagaacgacaatgcttaaaaatagtagataatgaattatttacaaagcttgcaaatcattgactcacatactctcgagtatgctaagagactaaagatcacattcctagcatgattcatctcagaattgtcataccgtgatggtgtcttgtgtttactttgcccaacacttctggaaggatgcgagaagtattatttaaagtatacttaggtgctaccaatcctaagagattatttgtattacaaaattttttaaaaaaaaatattttgcataagagtttttccctaataacaaattcaattaatatactatcataaaaatttaaaatagttaaattaattaaaattaatctcaaaattgaaaagaacattataaaaactgaattttgtaggatcctgaactaatattggatctggattgagcatatcatcgtcggagttgtgggatccaaaaaaataattgtcccgctaaaccaatggctttgtcaaaatatatatatactttttttgaaaataaactgcgagaatatattaaagctaaataagttagacctcgtggtcattacaaattaagttaatcagtatagaagacagatctaccatatcagtgacattaccggcaaaggcctatttggccacattatgggccccaaagttacaaagtctagaaataaatgaaaaattacaactagtgaaaatatttgagagcattttacattgaattacgtagttaccaataccccaaatggaagtagtttccttgagcatgtggatcagagtctcaaagtcgctctctatcatcacaaataaatgcttcctatgggtcactgattcttgggctaataaacaggtcgcagcttctccaatgagaggattagagaagttgaggatgttgctagccacccacaaaactgactcctaatgatatcttgccaaggccaccacacacattaagttgctaccaaccttaacatcacagttgattttgatctaatcgtctggcggggggaccaaacagaagacatagaaatcactggcataggaaacaaacaagagacaaaatttgcgtaacaaatagaaatataatcaatataatgcttaattttacatatataattattagtatgaatcttatcgtttcgggttttccatatcgtgtccactacaattgaagcatacaaaaacaactcttgaacctccactcgtttttctttcaagctccatagaaaattagcccaatcccttattcgggcgccaaactctggtacaacccccagggggaggacctccaaaggtgaaaaacaaagttacagtagaggaaaatatgttccatcgtttcttctccctccccgtaaaaagggaaagacacatcttcaatctgcattcttttagctagagttgacctgataggtaaggcattagagagaatactccaccaaaggactttgtggtgtttcaatatcctagaatttcatagtttattccaaagagcgggagccacagtggtaggggaggctcttgacaaggcctgagcaagacaagcagatttcatagaaaagcgactgtccttagtccagatccacttatcggtgcctcgacccctgggccttccccctttgaggatattattggttgtctcctggtcaaaaagatagttgagtttggaaatatcccaattctcattatcagtaagaagatccgctactctctcccaaccctctggtcatccatttttggggtgaggatgaaagtcttcaccatgaatcacccacggctcattccaaatgtctgtatctttcccatccgatgtgagcttacaggctcctttcttaagaatttctatagctttcacaacattcttccagaaccacgaatctaaattcttgtatgaacacttcaggaaaggtctaccttttaggtacttgacacttaaaaccttgcaacataaagaattatccttattcaggagagcccaaccccatttagccaaaaaagcctgattcatttccaaggtcctctggaagccaagtccacccctagacttgaggaggcacaactgatcccaggccttaagataaatatcatggtttccctgctcacggacccaccaaaaatctctaatcatgccatatattttagttgtcagcttcttgaacaactttgtcatttgcatggtataaactggtaaagaaagtcccaccgatttaatcaaagtagcatgaccagctttagataaggatttaaacttccacccatgtagcttagagaccaagttatccatgatgaaattgaaatctgcatctttcttacgactttgaaataacaggagacccaggtagttaatgatacctacaaccgggttgagcccgagatcctacttaataccacgcttcatcccatcactggtattcttgctgaagaagatggatgttttgtctttattaatacgttggcccaaccaattgcagaattgctccaaatactaccaaaatcccttagcattctccctcgtggccctattaccaaaataaggtcatctacaaagaacagatgggatagtcgcgggccattctggcccaacttgattcctttaatgctagccttgttcgggcattttatagtagacgcaaaagaatttctgtcgcctagataaaaaagttcggggaaaggagatccccttgtctaataccgcactctgggttcagtctactcaccttaccttcattgaggtaaatattgaaggttgttgtagaaatgcactgacggacccactcacaaaacttggctggagccttgaaactacaaagcacatggtcagtaaatttccagttgagcttatcatatgctttaaccagatcaattttgatagcaaagaagtcttcttttctttttttaatattacaggagtggataatttcttgcgctaacacattgttatcttgtatattcctccctcggacaaaggcaacttggataggacaaataattttttgtagaacctgtctaattttgtttgcaatgattttagagatcacctcatagatcacattgcaaagggaaataggtctgaactgtgacactcttttttagttaggaaccttcggaattagaaccacgtttgtttcattgattcctttatgcatagcccccctcctgaaaaaatcaactagtgcctcacagaaattcttccccacggagctctagtaatgcttgtagaacaaagcaaacataacatccaaacccgaagctttaaagcttcccatagtgaaaagagcttatctaatttcctcataccctaggatcgagataaaatcagcctgctccataggggttaaatggtcaaagatcaagggacttggattctctagagggtcctgaatgggattagaggagttatcctaaggaactccttaaattccctaccaatatccttcctactcgttatccaagtcccttctctatttaggattcgctccactaagttctgcccattacgaatcataaccgctataaaaaagaacttagagcatttatcaccttctttaatccaagagacccgagatctctgcggccattaaagagatctcctccttaagacctcattaagagttttcctcacctccacttcacttgcccaacttctcgagccaattggcatcttttgaatattcctaagttggagttccaactggcctatgtaggtgtccagcttgtcaaactgttctctattccatttgctcaacgccaaccgagtggctctaatcttcttgcaaacatgagctgtagcccatgcataagacaatgaattccaagcatgctcaaccactaaggagcttcaggggtatctagtccactaggcctcaaaacggaactgcttctgagagtgaattttaggactctcagtattaataaatagtggactatggtttgaattacaagtttgtagtgattggatcaccgctttagggaaaatgtgtaaccaatcctcattgaccaaagctttatcaagggctgactttatatggtgatgaccttctctatggttatcccaagtcaagttgtaacctttgattggcatgtcgatcaacgtgttgcctttaattagctctaaaatgaaaggaagaaactggtctttccccattgaaccaacccgctcagagttgctcaaaacaaaattcacatctcccaaaattaacctgggtccactaaccttattgccgatacccataaactctgaccagaattgcttcttctcatggaaataggggggaccatacacacaagacaataaccaaggatagtgcttagggtccaaataaacaaagcccaaaatatggtttttagagacataaatgctcttaaaacaaaaacctgatttccatgctaacataatccccccggcactaccaatagaaggaacaacagtattaaaataaaagtgtaagttcttaagagaacgtaccaaacaggtagcatccactttcagctcggtaatgaaaataaagtcaggagagcacgactggatcagggctttcaattctagaactgtagaggtctgcgccaaccctctgcagtttcacgcaacgcctctcatggctcatgtggaggagggacaccatcctcctccacaagggtcacattgtcaagtgttagatagtggtgtacgttgatcggtttggtcaggttatagcatatttttactaacctaataaaaatatcgggttggaaatgtttaattgtaacctgtccaattaaaaattagaaaaagttcaacctgtccaatgatttcgtcggtttggtcgggttaactcgtccaaaccgttctttactttttttttttataaatattattgttaatttctagttcaaataattagatttaaaaaaataaaaatatagtatttatatttcaagctaaaaaatgctatagtttaaattaattttaagaactttaatacaagataaatataattgagtaaacataaaataattgaataaaatattaataaaaaaaatatggtatagattttaaatttcaacttcaatatccaaatgcaatgaaaattattaactataaaggttaatttttaaattaaacactaaaatgtccaaacttaaaatacaaaatagtttaactaataaatataatttatgtaatatattatatacactttttttaaaaaaatatataaaccagtttaattcggttgattcgggttaattggacagtttagaataatttataaaccaccaaatatattcattgggcggtttgaattttcattgtatcatttcgagttgtattttttgtcggtttattcggtttggtttgggcggtttatttgagttgggtagtttataaattttgttgaacacccctagtgtcagacgtatcgtagatcccttatcctcgatcaccagatcctccttggaagggatagtaatttccatcaagcgaaccttggccttccacgtcgtaagtatagctggctgcccctaagagaccggtttgccaacttgatgggagcaagcagtatccacattgtggcacttaattctttccacttcatcactagtcaaatgttcctccgacgtaacagaagtaacccgaataacattagcgttaccctcatcacccaccgggcccactccatgcgagaaatctctaaccacacacttcgcccttctaagaaggaggttcagtttttccccaacgatgaattttcaaaattcaattttctcttcttaacaggcgtcgtacattcattaaattcagacgatgcttgggcttcaatatcaaccaaaggggttttcgtttgttgttgctcgatgtttccaaagcctcgagttctttgatgtatctctcttgagcctggaaaaaaatggataaagcttttttctcatcaagttggccagaaaaaattagataaagcttttttctcatcaaaacgtatatattggtcaagcatatatcaatccttcaatataagcatccaacaagcttctttataaagttgttgtctccctatcgaccaaatgacaactcgtcattaagggaaatacatctatgtacaattttaatgtaccgaccagatacaatcttatatgataacttgtcttgctacatgttacaatttttattacacgtcatacaagctaaaatttgggacaacaatcatattgtgcaattgttgatcttaaaatataagggtagcaattaaatcattcaatacgtcttaaacatctcatagttatccaaagttatcatatactatccaatttgaatgagatcaacagtaatcaagatcattcagatctatttataatgcaaaacttttcttaaatttattatgcatgtttttctttgacaaagagtcataacatttcatttgaatgttatttattaatgcatgtgttattttattgttcactgttataattcatgtaatacaaccgtcaatatatatattaacaatataagactttccaccacgataatcacgactttaaaatttgtatagtataactgtttcatacattatcgtttaaaacaagattataaattattaaattaatttaaaacttaaattaataataaattatgtctttacaatggtagcaattcgatcgtttatagaacgtttgaagcacatcataattatctaaagttgtcatagactatcaaatttggatgagatcgactgtaaatcgagatcgtttagatatttttttagtgtgaaattttttatctatttatagcatattttttttatttgaaaaaatttattatgcaattttttagatattattattattggatgtgttaattttattattcactattatgttttatgtaatacaaccatcaatatatattaacaaataaaaatttaagactttccaccataataattacaaactttacaatttttacagtatttatattaataaatattaaaaatatttaaattattgtttaaaaaaataaaaaaaaatcaaattattaaattaatttaaaaactcaaattaaaaaataatcgtgttttttgaaagaattgaactcatgtcattgtacttgatataagataactttaccctttacaccataattatattatcggttgtattgattattattataggattaaataagagaaaataacattgtatacccattttacttattttaatttttatctttatttttatattctataagatatacttacttttatagatgatgtccctattatatcccttaggttaatataaattatgtgctagacttaagtaaatagtgaaagtatattaagcaactcacttacaaaaataggtacattttaataaaatataatataagggtattttttatttatgaatacaaaaaaaaaatattccttaatttattccatcaaataacttgaatattttatacttttctagatacaattattgttttaagtagaaaataaaattaattaaaaataaatatataaattctaaattaaaaaagtaattaattaacaattataaataatcataaggtaaattagtagaataattataacaagagttaggtgtagagtttgattagttagagctaattaataatatttaaaattatttattcaaaaaaaaaatatttaaaaaataaaaaaaaatattaattatgtttaagctttcaaaaatatttgtgtcatttaattaaatcaatgctataaattactatacgtatcaaaagataaaaactacaacctattgtatcagctcccctcaattatatctttcaaaataaatgtactaccattcaaatgacatttgttatgcaactttacatgatgattgcatagtatttgagccatcatacaaactttctgatggtttccaaggacatacttggccaaacatgttccaagttatttgtctctatgccttcattagtttcagattattcgtttctataataacatttgtacaacgagatgcagagaatgtgttgtttcttaatgttctttctcaagattctatattttctcaaatgaggtaatcttattgggaacgtttagaaattatgtctgtttctccaagttttagagtcaaaacaggttctcaatccattttcacatttcaaaattggtttggtcattagcttgggaatgctgcaaagacataaatattggaagttggtactattctaagaaagtttttgagctaagcagggcatagaccaaaccacctatactatttacattccaagatttacacaaaattgaagatacaaagctatatagcctatcacctatacgatacacaaatgaaatgcttcaccttgtcaaaagacaatcttcaaataacgtcccagcagatttcctcgattgtacacgtacttgacaaaaatgctggagtaacacaacacacaacaaaagattatgagatgacaacaatactaaaccagataagaaaacatggttaaactgataatgctaagattttcttaattcctctaacaattggcaggaacaacattttttgaataaaaatcttattataccgggtcctccttggtgtatctgaaatctcttaaggattattcattgtttgtatattattgtatttacacagatacctaactctgattgtgctatattagaacacattaagatttgacacctaaagaaagtagaaagggtaaggggtcttttagcaggtactagttctgatgtaaaactcaggcttaaattaattcagtaacatataccataaattattatgaaaatatgaaccataacattatagtcgattctattttgtcatgataaaagtttcaacaaaccttaataagcagtaaagcagagattttagttaatcttttctgttcttggatggtttgatcccaacactcggtgttgatgacgaggaggaatgtcttttagatggaagtggtttggctgaagtctcagacttttttgaaggaataagagctgagtaaagaatagcatcaacagcttcacgctgctttttcctttttgcaattagatctgaagggccggcttgatttgaatctcttcctctatcatttaaatccctctccttgtggctgattgcagcagagggaattgaaccttcctgattcccccggcttgcatcactgccagaaaatgttttgtgtcttttaggcacttgtgctttcaaaactttatctccgccatcttgttcagggtggtccacattttcccttgaatcttctagtttagtttttctctttcccttgtgagagttctctaatctaaatttcttttcacttctctcttttcctttaaactcatcatttgcaacatgctcccctgttgttgtgaacttcttatcctcggaagatttgttgttacaaattgcagctagagaggatgaatccttcaccgatgcattaagtccctctctaccactccttttatttattcccatttcatctcgagtagctgaaaaatcttttccgcgcccattatctctgctcttagctcccttgtatatatcatcagttctcattttaccctctctctttgaactcttactttttttcacatgctgtccagcattatcagcctcattatattttagctctgtcaaagggttatcatagctctctgaagcactatttttttgtagaggtcctttaaacatattccgataggggactttaactgttctgactagatttctcttactggcatccttgatgagagcggcccagtttttgtttgtcttcaatgtccttgcattaccaataatccaaagtgaaaatttggctcttgtcaaagcaacattcatgcgtcttacatcagcaacaaatccaatattgcttgagttaatcccaggcccagtagagtttgtctcagctgctcttacggtggaaagtattagtatgtcaacctcccgtccttggaaaccatcaacagtattaaattctatctcatctatgatagaagatccaaaaacatttgaaaaccgagaacgcaagaatgacagttgacacttgtatggagtgataatcccaattcttccagcaaaatattcagatgcatacctacgtacattggaaaaaataaagtaacaatcaaaaatatgcatcaatctctcttgttggtgttaataaaaaaaatataaaaaaccaatgaggcctttaatgagccatttgttaatgaaaaatgttcaaggtaaaggacacatctttaatgagccatttgcgaagtgtaggttttagcatgaatagtcgcacatggtaagaccaatactcataaggtgatgcaaatgagatgatacattacacgtgatctataaacaaaatgtaaaatgttggcattatcaaaaatgtaaaatgtaatgcaaaatattgtagtgagcaaggtatcaggttctgaggcattttcccttagtcccacgaggcgtatgcctcaagggaaggcatacccttcaacaataagaaaaaaattcataaaatatcataaaactcatgacaaacaacacatgataccatataaaattcatgaaaattaataaatgtcttaaaatcataaactaaattcataaaaggttcaaaattcaattgaaaaatagtgaaagttctaaatgtatggagtgatgaggactaaggagggagggatttggctgagaaggagagagatgatagatcaatatcagagggttagggttttcaggggtatattttcaaatcttttctaataaaaacctaataagaaaagacccagactaaagttcaatagagtcatgtaaaagtatgagagtagctgtttgaaaagctttaaaaaatagcccaaatcagcccacaaaagaagagccctcacacacacacacacaaaaaaaaggcccattgttgaggcgtacgcctcaatacgcatcacctcagagcatgtgcctcgagtctgcctcatcagtgtgaggtgtatgccccaacgacagcagttgaggcgtacgcctcgaccgattttaaaactatggtagtgagtgaagtttatgttaaataattatttagagttattttaaatttttatgttagttgcctacataaggctttcttattagttgattcttttacttttgactttgcaattgaataaaaccctaatttttctacatctctttattttttattaattattcttttaaaataattattgagagaatttcttaagttttcctaggcgtacaatcagtgtttgtacagcatctgtacagttcgacagtctagttttcggtattgatttctttgagttttttcttgattcgcataacagttttgggtattgattttcgcagtacaattttgaattttcatcagttctctatttggaaatttttgcaatttgtttatttctgcaatggctaccaataaagatgattcccttcaagcaatcagtgtgagattggatggaaagaattattcgtactgaaattatgttataaaaaatttttgaaaggaaaaaagatgtggggttatatttctggaacaaagaggaaaccagcaaatgttaatgcaaatctgttagaaaattgggaagtagacaattcgaaaatctcacctagatagataactctatcacaatctcttggtaccaagttagcaaagtacgagacagcaaaagaagttaggaaccattttgcgagactgtatacacggtctaattttgcaaagtagtttcagttggaaactgatattagagttatctaacagaaagatataagcattcaagatttctattctgcaatgacagatcttttggatcaattggcactcaccgaatcagaaaagctacgtgcttttacaccgtatattgctcgtagagaggaacaacgattagtacaatttttaatgggtcttcctagtgattttgagagacttcgtggttccatattgcatcgctctctgcttccttcggttgatttagtagtcagtgaactgttagcagataatatacgtctcaagacttagtcagtgaaaggcattctttcaaccctcaattcttctgttttggcagtccctcctactacatcgtttccttcacaagagaacaaacctcacacaaaggttggtattagagagtgtagcttttacaaacaaaaaggtcattggaaagctcaatgtcctaagcttacaaatcgtgctctacaacaatagagataccagtccaaaactcctcgtatggataaccaaccacagtttaacaatcaaattcgacctccacaatttagtactgctacaactgttcctccatctggctcttacaatttttttgctttgttagaacaatttcaaaagctccttgcgactcaatataatgtcatatatgtctcttctttggtaggccaaccacccactaacacgtccggtatgtcaccttctacatggattttggaccctggtgcttcacaccatatgtctctacattatgcatcctttatttctttgagtcctacatcatctgtgcctgaatgctgatggtactcccataacattagctggcattggttttgttgtcaattcatatttgtcgcttcttaatgtttatcatattccaaatctttcattgaatctttgttggtcaattgtgtgattctagttactttgtatctttttcttctacttcttgtcatgtgcagaatccacaatctcagaagctgattgggatcgactgcaagcggggggatttacatgttttggatgaactaagattaccagtatttgcagctcctagtgttgatctgtcttttagtttttatatatggcactctcgccttggtcatgtttcaaagtctcgtttaaagattttaacttctaaaagaaccttcagaaattggcaacctcatgatatttctaattgtagtgaatataaacttgcaaaattttctgctttgcctttcaatagaattgcatcttgttcagttgcactgttgatttagtacactttgatttgtggggacctctccggttgttacaaatggggttctcaatactatgtttcttttattgatgatcatacttgtttttattaaatttttcttatgaaatatcgttttgacttttatagtatttatgatcgttttcgagcttatataagaactcaacatagtgttgttattaaatgttttagatataatcaaggtggtgagtatacttcaaccaaatttgtcgattcacttgctctagatggcattgtgtatcaaacttcttgtattgatacacctgaacaaaatagtgtggctgaaaaaaaaaaaaagggcatttttcatctatgtacaactaaacttattatattacaatatatgtgcaaaaaaatatatttacataatttaatacaaaatatataaggtacataattaatgtattgtgtccattaatagaattaattatagaacttaccatatatatatatttatattcaaaagaaataaacatcttcctatattaattgcataaaatttatactactattcaaaattcaaattaattgaccctaactatttaattatttgattatattaaattgatttttgtatttttaaggaattcttaaaccacttaataataaatataattgtttattatttttcacatgttattttataaaaaattatacacataaatttataaagtatgtacgtttaataaacaatatcaatatatgttttttttaataattatgttgtgtatattttttaaaaaatatacatcctttaaaaaattaaaatataaacaattttataatataataaccttactataacatgttaataaaattaaacacttctaaaataaaaatatacaaataaaactacatatgcatattataaacaatatcaatgtatgtttattatttataaatgttatttatttcaat

SEQ ID NO: 17872 - DNA, 2712 bp, Cannabis sativa
  modified_base (27)..(28): a, c, t, g, unknown or other
  modified_base (56)..(57): a, c, t, g, unknown or other
ttacaatataaaaaatagtgttcaaanntaaaaaatagtgttcaaacagtctattnnacacgcgtataaaataaaatagtcgcacactctttttgacgtgtttaattctttcaaactttttaaaattttataaaatatcttaaataactataacgtaacccttaaaaaaaattgactaaaaatttaatttaaataccaaaataaataagagtgcatcgatatatctttttttaaaaaaaaatatcaaaacaaatatctgtatctattttaaaaaaattattatttagacacatggatctctttttactcatttgggaatcaagatctccatttaaaaagttgtgtgtgtcatactgtgttaaaccaatctaagtttgacacgttaactaatttttcatttattaaaaaattaatcactatatactttttttatcttaaaatgctcaaattaattgatgtgtcataatgatatttatttaatacagtatgaaacacaatcttttaacaaaaaatcttgattcctcgttttagaattccattttttactttttattttatgtctccactctctaaactattattatagtcggtccataattaattaggcaatataatatataattatatataatatgtatattaagtagaatggaatttggcaattatttcacttagttataaatgatttgaatatacattgacaacaataataatttgaaatttgcattatggaatgataaattttgttgtgaagaagtaataattgtgacacattgacattgtaaataattttacgcaatatttgaaaatgatacatatatgattcttatttataaaattaaacatatgaataattaatatgagatctattaatttaagtgtatttcaagtgtaactgaaagattataataagatattttaattaatacttctctaaataataataataataataataataattgaaaaagaaataatcataaattgcactttcaactctcatcaaaatctcgtacacacaaatcttaggaataagaaaattataaaacaaagcaagaaacattaattcatcaaagcattaataatatttccatatataatcaagcaacaaaaaacactctttaaactcaaaattattaagatgatgatccaagaagactatgatgatgatgatgatgagttggagttggacaacattatatataattggtatatatgattctattttcccaagaacacatgagtaagaactgtttttgtctccaaagaagccttcagcaacctcaaaccctatccatacatgatcagcaaaacaattaataataatatataacaaaaataataattaaataaaaaatatacaatcattacacaatatatataaatatatttactaaaatcaattttaattataataaaaattacttattgctcaaaataaaggtaatacttaaataaaaattattgttgatttactcatttaattttaattagtcacaaaacttaataaaatacatatacatctaataattccaacaaattataatttttctgaaaaactattacttttttaatcaaaaatttttcaacaataacataaacttagtaacaatttttttagtcacaaaaaaaaaaaaatagtagtgatttttttataaattaaacatacacacctcattaataccaagggaaacagtcttctcctcaagggcaccaacctccttaacattaaaagtgttaagtaaagcaatgcttgagatagtagacattggcttcacttcaagatcgtccataatcatataagtaaccactcctttcacaataccaacttgatgatgatcattattaaccccagatgataatgaagatgatgaagatgatgataagccaacattattattattattagggggtaatggtggtggcacataagtcaacatcttattgatgaaacttttacaattagggcaaatggcttttgagtcatcagatacatatttacgacaagaggagtatgtattaaaaggactgctattacattggtaacctgtaccacaagaaaagatttgttttacattattggtaggtgtagcactactactactactattagtagtagtagtattagtattggtcaataagagaagtggtaaaaggacaaatgaagatgatgatgacttgggtttgagaagggtatccttattgacattagattgtatgtaagtttcacttagattttctaagctttgatagagtttacctaaggtaccaaccataccattggtagataaaagccttatgatggtaccaattggcatagataaaagagagaatagaaaatcagtgaaatcctttccagcttcagcaaataaaacccttttctcctttgtattgatcagcaactttagtgtgataatatttggagaactagtagaacttgccatattttttttatatataagaactttgtgaaccctatatctcaaatttgtgaacttttggtgaatataggttgtgagtatacatacatatatatatataaatttatttattgaaaattttgacatttgtaattaaaccaacagcacattattttaatattactgtattttgtcaagtcaagcattgactatgtatgcttgacttgattggaagtatgtgaatggttatttctactttctacatataattaaatcgtatacagattgagtt

SEQ ID NO: 17873 - DNA, 7315 bp, Cannabis sativa
  modified_base (4167)..(4179): a, c, t, g, unknown or other
tatatatatatatatatatatattagtaaattaaatttaattggcaatatgcattccatgtgccgttgtgactacctatcaaaagttttccttgtcggcctctttaaacgataaccggccaccagtttatatctagggcagggctttgaaatcgtcctgaactttcattattattaatcactatgttctattggtcactaatatatgtatatatatactaatagatttgtaaaagaaaaagaatgataagggtataatgcagataattaggtaaagaaaatgactagttaattagatgttgatagagaggcagaagttgcggcgaagtaacagatttcattgaatatgattaatcttatatgtgtatatttattcaaaagaaaaaaaaaatcttatatgtgtatatgataataagattattgtttgttaaaggattagttaatatggtattttataagtttgtggttttggtttataatctgttcatatttgtttgtagaatttaatggttggtaaagtttgtgaattccaaaaattaattataggatttgttaattatatttctataaatatatatatatatatattaggttaatataacctctataatatatatatacttatttctattaatttttatttttattatatattttaagttgtataatagttttttttttatattatccaataataatattattgtaataaaaagaatttaatctaagtgttattaaagaaattataataatattttaaaaaaatgattaattataattttaatttaatcttaatacttacaatttataatacttttcattttttagaaatattatgtatttttttttttaaaaaaaaaagatattcatcaccatatattctttaagaaacatatatatatattttttttctattttattgtttaagaagaaactaataatagaaagatatattttttttaatatgtagattgactaaaaaaaataataacagaaagatattttttttaacatgtacaatagattttaagttaaattgtaattaaaaaaaatactttatattatataatcatatttagtataagataaaaaaataacaaagatatgtatgtattaagcttaaattagaattgtaatatttttttagcaaaaataatattttatgttatatagccatatttaatataactaactattagtactatgagggaaaactcgatcctcaaggtcacgtacaagggaaaacccaccacgtgaggagagaacacctcaatatgaatattgaggcgaataagaaagtatgagtaacttttaaagttatcaattatgtctccccgagttgtaaagtactgagcaattacaatgatagagatttgcgagatcaataaatcaaagacgccctgatctgcacaatcaaataaatataaaagcacctaatctcagggaaagattgaatagaaatgctcagcgagcgaatgaacaaacaaatcaacccactgatctccatccagcaaaggataatttagttggaggatcggtttaggaaatatcaggatggcgagtatggaaagcttccaggttatgactaagatgaagacccataaccttttcaccctgatatcctaaactcgcaattttcgaaaggattcaagaaccctcatgtcgcacaatacaatgaaattacaaatttagttgcacatttgaataactttaatataataatgcgaacaagtaatgtttcttataacttgtgttgcatatttttccccacatcactcataggggaagtgagtagttggtttgataagttcacaagttattccatgatctcgtgggaataattgtctaaagaattcaaaaagcaatttcaagttgcgagggatagaagaccaaaagcttcatccttgacaaacatcaaaaaacagcctggagaatccttgaaagcaattctaagtcactttggcacaataacagcaaagtttaaaaattggaatgatagcatcagttgacaacacaccaggttgggataactactgatttgtctactgttggaggcgagctatgggattatttgcaaggacgcccagtcaaatcaataaatgaatttaataaaagggctcttatctatgtcaaaaaggaggaaactctgttcgaaataaaagtattaaaatatagctcggggaataaacccaactcaagcaatgccgaagcaaacattgaaaacacgagcaaaagccacgaactacatgggaaagaaaagatgagtctaaggactcatccaaaagacaaaaagaaacataaaaagtatgagaagtgtgtctcgattcataccgtgtataccaagttgaacgaaacatgagaaaatatatttcttgcaaatgagaatggggtcacgtttcacaaaccagaacctatgaggaaattgtcaaaagtctctaatattatttataagcaacctaagaagagaagtaatcatttcaaaattcaaattctttgaattccctcaaaaagtatacgttgtgtactcattacaagtagagtaactgttagcaagcgcagatattgagctatgatttgaggcataactgtcaattagtattaaatgagccagaattgaagagactcaaagtcagagtcatgtcggttcgccattcgatggctaggacacacgtcacccatctggacaagactccaagctgagtaaagtccacatgcaaccaataaggtcccgcgcagaattaggggaaaatattatccaatttttttcaccttgacgtggtaataggatcaaatgacatgtgtcccatatttctgatacctaggcgaaggaaaatatccttagcagcctatgaaggactatccagcatctgtaatagtcagctatctagcaacgttgtggagaagagatgtccgaccagttatgagcatgtttgtgtcgagcgacttacaagagatagcgacttcaaagactaatctcgttgtgtgtagacacgaagaaaatccctataattgtgggattgagtcagagagaaaagggccaaacatgttctagtttcctatttcatatattgtaattatagaatcattgtaatatcttattttgtgcatcgtaagcaaaacggaaccatccctcatgcattaagtccctataaatagtgacctatcctcactatgaaggggatcgcaaaatatactctagagagaaaagagagatctaagagaaaaaattactcagagatcaattgtaagagctttcaggaggaggaacactttgttccttctcttaagtcaatacaatacaaggggagtatgctattaccatacttacggaggccgaacctctttaaaatttggtgttcactttacagtttttattctcttttaattacattacttaatcgctttattatttgactcactgttgttggctagaagcaaggtcaacaactatggaacaatagcaaaggcagtgtgaattttttactaacctagcttttcttgcccaatctgaacaaaataagaaaaaataggaacatatgaaatatgtttcaacccaaggaacaaaatccttagctaggaggtgccatgaattagtaagttcaaatataattgtagttaagttatattaaattgtataatctctaatgtttaattcataaattagaggagaacccggattacattgagacatggagggaagtccataccaaaaagaataagcaatttgttaatgaatatgaaaaacaagattaagtaagtttttgtaatttaatctttataatttctcaatattagtgtcatattgttctacttttttgatttaatataggagcagttggacgcagctcgagcaactcattctcaaacaaactctgattctggttcatcatctaattacgtcagcttcttcgaagatacatttggtcaaaggtgggatcacgttcgtgtaattggccgcagattgaagggtacaacttcaactagtcatgtccaatccacccaatcataggcaccttcacaagatttagtaaatgacattagtgtgatgtttaatctctttttataacaaatcgacccatcaaatatggaccctgcaaagttagcaatatttaatatgcttaagagtaagtactccactccagcgcctcaaccgtctcagactcacatnnnnnnnnnnnnncttgcacattctcaacattcaacgacaaagcctgacatgcatacatcttcgacatcatagtcttagtatccaccacagccactctcgcagcctttgccataaccatcgcaccctccacccccttaccgttacatgtatggaccaccgtacacacatccatacatgtatagaggaatttcacagtagcatccttctgctttctttctgggttcgactgatatgggtggatcatcacagcaaccttccccatcacaccaggctcagccaacctactcatattaatgaatgatgggggcaccgacatcacagccgttacaaccaccacatacatctcagccgctatagtcacttcatacatcacaaccgctataactactttagacatcacagccgctacaaccacctcaaacatcacagcgtcagcagccgaatcattcagagttcgatgagaacgagagatctaatgactttttatctcagttatagaaccaaaagactactattatatttttttgtaagaactactattataatatttttttttattttctttaagttgtcttaattactaatgtttgttagaactattaaattttattatgttattgcgatactatgttaattaaaaaatttatatttgatattaattattatttttaattttatttgttattataattatttttttaataaattaaaaatcaatattttaaataatataaaaaataatttcatcaatttaaaaacaattaggggcgacattgtcgcccttaaaagtcaaatacaataattttgagggcaactttatgggtattaggaatagaaattcgtgtattacttttatgggtgacataatgtcactcctactttcaagccattgttttgtcacccttaatagcacttttaggcacgaattattagggggacatgtcacctctaaaagttattggagtcacccctaataagtatacttgttgtagtgatctcataaattcaaggatcatgtagagaacatggcacttaatctcctcatgtaatttgtacaaatgaaattattattaatgaaactcttattttgatattttctcatatttatgcgcattttaattttacatttgagaaaattttagagaacctaaataaacataaagtttagggtttattcgctgaagtatattgccacataaagtacattgttatatagtaaatatattgtaatacatagaagataatactcatcgatataattcttatgtttattatataatgaggaacgttgagtttgaatattttagtccaaatactgatcaactgggagactattagaatatttttatttatggaataaaataaaaacaattaattttgagataaatgaatattttatattcattgaatctggacaaaattaattatgcaatattttatatatggtgagattttgatattttttacccgaatttgattttttaattcattgtcaaaatattctgataattaatgtgtcgtagacactgatggagtatatcacttataaatataaattcttcggtcccgagcacttcactcattctgtgcaaacaacaaaatttcatctgaagagagttgagagagcaaaaaaagcccaaattcatatagaagctatcgaagggattgaatcttaaacattaatgactataagtattttaatcctttcatcgcatatactatttcgatattctataattatttcgtattaatatcgtttatagataatttattttcatattatattatagtctaacagtgtattatcatattaaaatttcatataaacattggaaaccatccataaaaaacgtgatcacactagctagacaatatatggccaacaaatacttaaaaaagaaactaagataataaaagacaacagaaagtggtataatgggatttgtccactacatacctacgactactatggtggacgcgtttatgtcattttttatgtaataccatcaccgcactacaccatatatatttttatattatatacaaatattcctttaaaaaaatgatatatattacgtaattggttctcataattcgatcattggctgctccctgaaattgtatttttcgattaacaaggttttaatttgcaggtattttaataatttaattataaacgtgcacacccagaaaagtataattgatttaatacacgatatatttatacgcatgtacgtataatatgttataaatttataattagcttgtataaattgttcttgttttactcatcatgaataaaattatacaaataatatgatgaaactagctagacaacttttgaataatctttatccttattatataattagaagaagtaatatattgtttttataattttaaagttttattgttttgaaagacatttatttcttatatgtttattataaagcggactctatctagactgatttatcgtattcattgggttgtcacacataagaggcaagttgctagtatttgcatccataatttagatgaatatgtatatatatagtacaattaaaatgattaccaaataatatctgtctataaagtactagatgttacatatctcgattgaatctggaacagtatattaattgcaagacaaaactctccactatatacactcttagccatcgacgaataccaatctaaaaaaggtaagatgttgcatggaataatttgttgtggctggccttgctatatgtaagggtacaatatgattctcttcaatattcgtgaaagaaactgaagctaagtatttatacaatgctatataagttgataattaacaacttagtgtacagttgtaactaacactacaacatattagatattagctagcggcggagggatcagccgctaataaatccttttttttgctggtgaaagttattttagttgttccgctaataattagccgctattaatgattattaatagcggaactaattattagtttaaaatctctaaaaaacataaataagcatcatatggtggacacaacaacaatagatcatcaaagactcttaaaacagactcaattaacacttatcctatctggtactatacaactatatgatctaacaagattaaccgaaaa

SEQ ID NO: 17874 - DNA, 11405 bp, Cannabis sativa
tcctaatgcgtggtattgaacacaatacttaattagtagtcgtgccagaatttctcagaccaccgcactaactattaaatttcagaacattattgtgcgtttgtcgcttataatagcacactcttactcagtctccctaacaattacatacaaaaaccatgaaaagtgacttttcagtctcagctattagaaactctttcggcgctctgagaggatgaaaaaagatataccaaaattatgaacacacaaatacacactcttgtcccctaataccccgcctgtatataaaaaactcacgtgcctataaagttatgtaaccttatttaagatttaattgataccccacattaatttacgacatagcttttttttttctcttactatactaaatgcactggtttacttctctttaacacacacaatattacttgagaattgcattggtttgtattcgtagatagtgtcctttgtgcccataatttattttcacgcttcataattttagagtaatggatataattaaatgcatgcaggtcctacaaatccattagaagacatagcacatgaagacactcactactcagaaacagtgtccgccatcctccaaaaccagcccagctgcctatgggcagagtcatcgtcatcaggctacgtcacgtactcaacccaatcagctttctccaagtggacaaacctcaacgatcaccactccatcttccacgtgtcatcctcctcttcatcatcagaatcaacctcacaatggctcctaaagtatatccttttcagtgtacccctcctccacaccaagtaccgcgacgaaaactctcccaagggcagcgctggtgtcggagtcgacaccgcgacccgggcattccggaataaaggcgggacaccacaagacgagctcagcgccaaccatgtcatggcagagcgtcggcgccgagagaagctcaacgagaggttcatcatattaaggtcgttggtacctttcgtaaccaagatggacaaggcctctattttaggagataccatcgagtacgtaaaacagttgagaaaaaaggttcaagatctcgagacacgtaaccatttgatggagcttgatcaacggtcattaatgatgccagttgtcccgcaaaggacgtgtagtactggatccttgaaagaccaaaggagcgggttgactattgttgatcgggtacggattgaaccacccggatctgaaaagaggaaaatgaggattgtggaaggaagccatggcgtcgtagctaaacccaagtcagtggagtcttcagcttctccaccgctatcgcctcggtccgagacaacggtgcaagtttcgattatagagaatgacgggttgttggagctccaatgtccttatagagaaggattgttacttgaactcatgcaaatgttgaaagagcttcggattgagaccacaacggttaattcttcattaagtaatggattctttgccattgaattaagagccaaggtacaactttcggaccaataacccactttagtatatataataagattttctttttttgataattaattgaattgtaattaatttaaatttcaggttaaggaaaatgtgcatggaaggaaggcaagcatagtagaggtgaagagagcaataaatcaaattataccgcatcgtgataattgagttataattaatatgctagcatttagatttataaaataaaatatagtgtgatcgattgagataattatatatgtaggatatacaacattgtttcgtttctttgtggttgagactgtggcacctcgacccagccctatgataaattctaacatgatggtgtatgtatttgtcattgacattaattcaacatatagagttctaacaaatgtatgatcagacatgttctcgtgcctattatataactaatgtggatagtaacaattttttaatgaacatatgccttgttgtgctgtctaacattgatataaagcatcttatactattagtcaactgcggtttttttatatagttattaaattaaaatataggacaatatgacacattattattaatttgtaccctttagcatttttttttttttatataattttacaaaaaaattatagggtcaacttcaaacatttatatatatggatgactgatgagctaaaaattaataagacatgatttgagataatattttaagagggaagaaacttatcgtttaagttaaataaggtctaatgtttggtcttaactagacttttataggaaatctaatttgacctactttctttaaatgcattttcaaatgtaaaaagatcaaaaaatgttattatgttggcttctttcataaaagacgtatggtggttttagagacatagttgaaaactttgaaacagagagtaaagaaaactgagagaatatgaaagcctcaggaccaagaaaatgcagcttggttaaactgaggaggaaactctttatttatacaccagattttacaagacaaagaattcttttaaaaacagaattagttacaagaaagtaacagaaataacagtctaaactaaccaaaactaacacgtgcattattggttatcatcccccctcaaacgaaaggtatacaaatcactttgagttttcctttaagataatgaaatctttccttaggtagagactttgtgagaatatcagcaacctgatcaacactcagaacatgtctaacagagaattgctcacggacaaaatacaaatcaatctctatatgtttgcatctagcatggaaaattgggttggctgcaagagctgctgcaccttgattatcaacccagataattggaatatctggtgatgtaatgtgcaactcagaaagcaaggaacatagccattttatttcaactgcaacattggccactgccctgaactcagactcagtggaagatcaagcaactacttgctgctttttggctgactaagatatcaaatttggtccaagaaatgctgcataaccacccgtagagcgcctgtcatcaagggaactcgcccagtcagcatcggagtaaacttgcagagagagccgagatgctggtttaagaaataacccctcattaattgtgcctttcaagtacctgagtaaacgtttacatgcttcccagtgcacactagttggagaatgaataaattgtgacaatttgttgataatgaacgccacatccggcctggtaaaagtcaagtattgtaaagtgcctgaggtacttctgtataatgtttgatcttcaaaagctataccttcttatagagagagtttataggcagtactggtagaattggaacacggtttagctccatctagatgaacttttacaagcaaatctgagatgtattttctttgagacaaatagattccttctttggttctgtacacttcaacaccaaggaaataatgaatggcaccaagatcttttagttcaaagcattgatttagatcagaaattaacttggtgattagagtagtattgggtccagtaatgagtatatcgtccacatatactaaaaatattatcaagcttttaccagaaccgtaaacaaacaaggatgaatctgctcgtgatgttgtgaatccccaggcaataagagtagtctttagcttgtcattccaagcccgaggggcttgtttaaggccatagatgactttgtgtaaatgacaaacatggtcaggtttagttgggtcttcaaagccttttggttgcaccatgtagactatttcttctagtataccatttagaaaggcattagatatatccaattgtttggcttcccactgaaatgaaacagcaagggttagcaccattcgaactgtgactggctttactacggagctaaaagtttcaccatagtcgagccctggtgcttgtagataacccctggccactagtctagatttgtacctgtcaacactgccatctgaattcaatttaattcgatgaacccacttattatcaataaggtgcatatgggattgataaggtactagagtccaagtaccattcttcttgagagcagtaacttccttgttcatagcagcattccaagctggatcctgaagagcagatttgagagacttaggctcacagggtaataaagattcaggaagtttgtgctatgtggccatgtatgccttgggtttaaaaatgtcatgttgggatcttgttgtcatagcatgtgttcttggtggtgcagcagatggagtaggcaaggactgtatagattcaggggaaactgaggatgaattagtaggcatattggcatcagttgaagatgacagatgttgatgttgatgtgtggatgagctactggaagaagttgcagagtgcaaaggagcagcataggatggaagaaagtcatttgctcattgacaacaacaggttgagtattagtttgaggaaaaaactgtgcagactgagtataaaattgagcagtagggaaggattcattggaatgtacctgtgttgtgttgctggtgttgaaggcaagaaactgagattcattgaaaaccacatttcgagcaatgaaaattctaccatctttattttcacagatatatcctttatgctgtggagagtatccaagaaagatgaattcttgagatctgaattccatcttatgatgagagtaaggccttaagtgagggaaacaagagcatcttaatggcttttgaattctgtaatcaggttgttgcttgaacagacattcaaatgggctaatattgccaattacagaagttggcattctgttaatagagtacacagggcattggaattcatgccaccaataagacatgtcaagaccagagtgagctagcaaggttaaaccagtttcagtaacatgtcgatgtttcctttctactcttccattttgctcatgtgtatgtgggaaagacaactaaaacttgatgccttgatcactgagaaatctttcaaatggtctatattctcctccttcatctacttgtacaacctttattggtaagttaaattgcttttccactaaacttttgaaccgaaggcctgagatttaagtgttaatggacaaatccaagaaaaatgactgtagtcatcaagaaagacgatgtagcatttatagttatctttggacacaacatgggagggaccctaaagatcagtgtgaactggttctaggggctgagatgctctactggttgacaaagaaaaaggaagtcgatgacttttgcctaattgacaggatttgcaaaaatgtaaatttttgagagtgtgtgcaatgttggagttggttaatattctgctgagaacatcagaggctggatgtcccaacttacaatgccacatgtttatctcattatgcaaacaagtgttatagacagaagaagatgaacaaaaagcatttttattgatatagaattcatgacaagaggaaattgcagtaacagtaggtttacaagaatcaagagtattacaattacaggtaaatgaacttggaatagaagtgacaagattgcagtgtagtgagctattggacagtttggagtgaccatctcctaacaggtataaatcattcttgagaattcctttgagaaggacagcccccgagtgtttgtccttgacaaaacaacaagatttgtgaaattcaagaaagacatcattatctttagttaatttggagacagtaaccaaatttttggtaatggaagggacatgtaaaacagattgaagttttaagggagtacaattaaatgaaggaagagtggttttaccaatatgagagataagtaacttcttacaatctccaacagcaaccgattcttgaccattgtaaggtgtagcaatgtccaaagattccatagcaaaggctacatgatttgttgcaccagtatcaacataccatccaatgtcatctccaaagtcagggagagtttgagtctgatgatcaagaatagggctttgttctgtgagatgaacatgaggctgaggtgaatgatgctttggggtaacccagtttttgtcaaacctgtagtgacaggtagttgcagtatgaccaaatatacctacttttataagtaggttacccaatataccctcactctctacttaagtctaacatattacattaacttaaggagtctaatgaaaaaatcatctataaaagtgagtatatcttaaagaatatgaaaatgaaccgaaaaattaaaataagtgggtatacaatgtaatttcctctaaaaatatcaccattagagatactctaagcggccagggccagccctaggcataggcagataagattaggcctacgcctagggcccattcattttaagggcccaaataaaaaaatatcttttaaaaatatatttttattaataatttttaaaaatattatttataataagagtcccaaaaaaaattttttacctatgacccatttcatgtaagcggcatcttctcaaacaaaatttcatttgatggtgaaccttcatgcgaatttccccttggtgagatcactgcaactttataaccaactttgtggttgcaaggctttatagcaggccatgatacaatattacttatcttttgactacacaataaatttttaggtaagcacttggttgaggaataaaaatatagaaataaaatttaaaatacacaaaaattaataaaaaaaattattaaatttaatctcatcatgcgttgaaatggtctttgcttttatttcaaaatggaatagtcaatccatcaaaataggtaaaaagtcattcattagaatgacattcaatagaatgacattcaaatactttaatatgcaaccaaacaaaaaaaaatagaataaagattgtttcctttgtattccatttcattttatcacctccgacctttcaattattgttctgagaaaatcacaatcataaacttcacaaacgattgtgagggagagagctttcctgtctctcctaacccctcataatctacaacagaaaggagtagtttgtgttgctaatgcaattaaacctgtcttccgtcactcttttatcaatttgttatattattacattaacaatacaaatgactgttttaattccaaaaatttatgataaatgtgaggtcactgtttctagggaaaacagaatagcagtgccatgcaatgcctacatactttttgacaaaaagagcataaaataattgtgaggattctttacaagtcatattgaattggaaccacaattgacaatacctcatttaaaacttggtacgttagtccggtaaagttctccattcccaagcctgagtgagtaggatgaagccccaaagcacaaaacatacgagttaaatgcaggtaatgagatctgcataacaaacaagttctgacgaagccattgcttgattcgaaaatcccatctcacaattatgaaatgtgtatatgcattctcattcctctgttggtttgttgaacgctaatcccttgatcacatgtcgacattggaacctaaagaataagccgaagatctttgtaaaagctacagaaattgaagctgatttttgttttttttaactgaacatgaataaaagagctaactagtggaaaattaaaccatcagtagttataagttctgcatgagttagcaaagttgtaagcctctcataagatctaaaactaaaaaacatagattaggaaaatgagcagcaaatcagaccatcttgtgctagaaacagttgatttagaaaagacattctttaaaatgttagaagcctctcttaatccctaccagattaattcatttgcagtggactcagtagagctctcagtgtgaagctcaagatgattagcatccatttgtttacaagcttgggttctacacttacaccgcactatgaacggcacaacctgaaaaaaaaataatggacttgtaacaatgctatatggaagcataaattggatggaatacataacccatttgtgatttgcttctttgtatgacgactgggggaaatgtcattgatattatgaataaaagtgcatattgcaagtaaatggaatgggttatgtcctttctttaaaaagggcttaacttacacaacaacccctctaactctaaacatagaaagcatatcctttgagatagtaaaagatgataatgataatgcaaataccattttaaatcatttatgtaatcacctttttgctatatctgaaatcacgtttggggacaaaatgaaggggtagatttaatgaagacggagctttaaccaatagaaacaacttagaaatgcctgagaaagttcgatcagcagaaagaaaaacaaatgaaaagttaacactgcttttattgtaagctacaaacatttcttcataaaaagcatgcttaagtagctacttttacattatatgaatgtaccaggataagaagcagatccaacaccctttgagatcagcccccgaataacctgtaaaagagaagataaagtttttgacttatggagcaaaggaacaaacacaaatttgaggaagaaagtagagccttgagaaccttcttcgccagcacttctgctgctctggttttggcgaaatcaggagatgtgacgacagaagcagagtggtgattgggaaaagaaaactcgtaaacatctcggggtcgtaatggagtagcgccaaggaccaaaattgctacttgaaagttaggaacttcactgatcataagcttaagcgcagtttggaaatctgaaatggtgtgcattaacttgtcgaatcgtttaattccatattttatctctctcatttcactagcgtgctttcttcgaaatgccgccgtcccttgaatttgcgcgagatcagtttcctgaaaatgacgaaaaagattaaaaaaaaaaatccccaattcttcaaagaaaaagaacaaatccaaattcgattttggaaaatctactcttaagttcacaaatataccaatttactatactctttacaccatttctcgaattcgagagtgatatcctgcaagacactatgtaaaagaaagcaacatcagatttctgcttacaggaaacatagagaacgtaaaggaagcatgatttttactctcaactttccgagaaaccaaacaggtcgcaatcacacaactcgaatcatttaggtgtcgggttttggtatgatttctcagagaaggaaacttacgaggggatttgttggtgcatgtagagaaggaatccggagacatcgttaatggcatggaagatcattgagcagtcgatagagtcggcgttggtctcaatctccatacagttcgtctccggttctgagcatccctgcccctcctccatggctttaggtttcatttcgctttggtaaaaaagacgataaatatcgtcatttaaatttaaatttaaatttgggtgttagcacgtagtttaggcggggaaaatcaacaacgttggagattttttctttattgctttcctccttgtacatgatgaaaagaataagcatagatgttgttagaaaaatgtgaaatatattatataactcatatcaaaatatcacaataaagttgtccattcgggtggcccggcccagcccggcttggcccgtcccgtttttataaaagccttgtgagcctaacccatcctattttataaaacaggctgggtcgggtctagtccatattttcaaagtaagctccgcccaacccataagtataaattattcgtattgggccggacccagaccgggcctaaacaggccaacccattttttagggacttcccgaatatgaccatccaattcaaataagttctcttaggatttatcttaagtacttattgatcttaagacccactggtcacatggccaacttcgcaactgccacgtctattgggacaaaagaggggcaacatttaccctctcccaagtcttatttttgcaatcttgtaaaatgagatttgagactcgcctcttgcctcagagagtgacgtaatcggtagtctacacgcgcgtgggttatttattatttataatcatttctcctcgtttttggcaaagaacaatttaattcccgcctgttcgacagggcctctcattaatgtcgttgtcaaaggagtactcgagcatttcaactgccctttttttttcttcaattttttgccaaactgtcctggccattagatcactagaatttggatggtttgaaccctgactgtcaaatgacaatcgattggcattcatcctggaggacctataaaagcttgtgccttttcctactgaaattcttacccactcattgtttctcgctctcagactttctaaaccttctagaaaaactcctaactctttagattttctcttgctctcctctatcgttgccaggaaaactaatactaatgtacagtggtttggacaccccctacatcttcttcaacatgtaagttcttacttctttcattttcatcttccgaaatgttatgtacattgtagcacattgttgttcatgcatttgattttttgaatgttaatggtgattttcctccgaacctccatttaaggttgcatttgttgttgttgttatttttttcttctctttttttagagaaaggaaaaacctttgcttttagaccttggtagaaatttttaggtctagggcttacgaagaatcataaaggttctcatttcattcctttttccttattcctttgttgtggcttggatattttgcacctgatgtatggcaataggactcgttagattcttctctgcctacatccaaagggggcctctctctagtggttagggaactctcattcccctttttaacttaggatttgacaaggggctaacagcttggtttcttatcttttagatgagtgaagttcttcaggatcttcacaagcacggtttcttcatatttgaccaagagattattgagcttcattcaaaaaatacaatgtcaaactctaaagtaccgtcaaacactactcttgatgataatccctctttggtcaaggcattttaaaagcttgtccccttggatgtcgttatgtaaggtcctataccttacaagaagtacatgtgtcgctccaacaactgggaggctgatgagttgcactcatccttgacgtctactcatcaactggagaaaattgtggccgtgaacgagatcaagccgatcggttcaagagtttaccatcgtttgcccagagatgaagaaatacccaaccacaactacaacgactttggagagtggagccaaactcacctaatgtcaggagccatgctaccacttcgagattattttgtaaactttttagtttttgttagacttgccccacaccaacttatcccacaagcataccacctgcttttaggtctttttatttttttatgctgatag

SEQ ID NO: 17875 - DNA, 3500 bp, Cannabis sativa
  modified_base (118)..(122): a, c, t, g, unknown or other
ttttcaaaatcagtaaaaaaaatggtataattttaaaaggtaaatatttttttttaggcccctggggtaggttatttttgggcccctggggtaggtgggccctaggcacaggcctagnnnnnctatgcccagggccgggcctgcccgagacccatctaatgtaccacggaatacattctgtaaaaatacatcacgagacaaaatcatatccctatattaatattaggtctcttatttttagacccaattctttgacttaagaatatagttttgtgcacttataaacatggttttctctaagataatggattttagaaaagaaatataattagttagaagaaaatatcttggtatgcacatgtcaccttttttctttcttgtctatatcatcacttttattttaaatattacaaaagtaatactatttttttatttatattaattcacacatattctttgataggacatattttatataagttatattaattaaaaatatatatcatgttaataatgagaataaaaaaattaatataaacttaagtgcatgtatgtatcattttataaaagcaaacaactaagattgaagatatatatatatatatatatttatcactttttttaattatttttttttttttgtaaaaatattcattatatatagttgtaatattaagtttgtaaattttaaaaaattatgaataatttataatattgacaacataatttttaatattgtacttaatcatatgtttaaaaaattttagacttgtttttggtattatatattatttaaaattttttaaaaagttataaaaataatattgtaattataacaactattgttatgaaaaaagaatattttcatttatatttttgaatacaaaaattaattaaaaagtaatatgaagttgtaattatcactctaaattcttaatatagatataactttgtaataatgttttctattttaccaaatagatcatattttatataaatatgaaatttaaaatgggtgattattctaggatggagagtgtaaattggagaagctcaagtagccaagctaaatgcttagggacaatagtgtccatatcaggagcatttgttgtgacactctacaaaggcccaccaattatacaagaactttctctaatacccaatttacccccacaacttctatcctcatcacaatcagaatgggcccttggaggtcttttccttgcaacagactgttttgtctcttctttgtggtacattttgcaggttggttttatttaaaattaaaatcaatacaccacaattatgtatgtgcttagtttacaaataaatttaataaaaatgaatagaatttttatcttgctttaaaaaaaaaaaaaaaaaaaattatctaaaaatttgaataaaataaaataaaatcagattataattggcactcttcttattaaaaatgctaaaaaggaataggatttatattttcctatacttgcatggttttgctctataaataatttttctgtgaaaaattcatccgagtctaagtgaaatataattatatagatagtactataacaataaaatctatatttataattttgaatttaatctttgaatatttaaagttagttataactagcttataagttaattaaatatacactttactgtaattataagcatagttaattatcacatcaataaattatctcaaaaaatgaaccaaatgcaactcaaagaaaaaatttgtaattatttctaaaatttaagaaaaaaatttcactgaagggttatggtttagaaagtaaaaatcttatttattgattaattaatcttaaaatttcactctcttctttgatacaatcatacaaatgtgtttgtattatttgcaggcatcaactcagaaaaggtacccagctgtggtattagcagtcttatatcaaacctcattttcagctctaatggatgcactcttttctctcattgtagtcaaagacacaagtgcttggaagctaaaatttgacatgggtttggttgcaattttgtacacagtaagtaagcacgtgaaattactgatcatgtatattatatatatataattaatgataagtttatgatatatggtgatgatattattgttgcaggcaattgtgtcaactgtgatacgttatacactaattacatggtgtgtgtcaaaagctgggcctctatattgctctatgttcaagcctttagggattgtattcactgttctcatgggtgctatcttcttaggagagtccctttatcttggatggtaagtaactacttatatatatgattaattattaggtcattttatagtgggatagggatggtaatggttagggtatagttagtgtatgtttattccctcattgaaaaaagttctacccatatccaccttattaagttattattttttgcgggtagagtccaggtattaccctgatggatatagggtacccacgggtagtcctatcctaattaattttaagaagaataaaaaaaaaatagtaaaattatgttaaaaaattacttaatatatatatgtaattatctaactagtaagtattgactttacaatttgtaaaattaattaaaaggtgtaattgctaacaattgaagcaaataaagtattggagataataaataattatagaatatttaagaattttatatttttattaatataaaagtattttttttttttttgtatttttaaatatgaactaaataaataatattcagatatacatataacaccctaaaaaaatatgcacataacataattacataaatatatatcttttcatactcttaccttatcttaaatcataattcaacggataatatcctactcataggtatccacaagtaaacttatttgttttcctatagcgagaacactattttttttttattggtaaaaacatttccgtttctattttttttaagaaaaacagaataacacttcattaattaatcaaatcattcatcaacacagaaatgaactttgagggagcattgttcactcacaaaatacgatcagaaaaaaaatcagtagatctcgctaaatagtaagccacattatttgcaaaccctttaataaacaagcacttgcactcgggtataattctaccaaaataagagagcaaggtagatgagctttgaatgacttggacaacaataagacaatcgatacccacgagtaaacttatttgtcttcataattcaggacatcaaccgtagtgtcttaaccaattcaacaagttgtaccttttttaatcaaagattgagcctctagcacatttttccaaataaaacttagattgcttcccaattaaaaaaactcaatactaactgactatgtcaaaagataagattattttttattgatctcaatatttcaattttgaataattcaaaaaatttcaaataatttattttattgaaaatatagttaaatttattattattattat

SEQ ID NO: 17876 - DNA, 2875 bp, Cannabis sativa
tctctctctctctctctctactctactcccatggcaattgccattgttagggtttcgaaacatttcaaaggggagttttgctttaggaattagcaatggcttcttcaccttctagaaagcgccggagagcaaaccagagcaaagacggtgcagatatagatgcagttgacacgtcaagtccaccatcttcaaccctcgagaaattatctcctgtgattgtcttcgctcatggtgctggtgctccttctacttctgactggatgatcaggtcagtactttctcccttccttttttatcatttatttttctgaaacaaaaatagaagagattgctgccaaaggaaaaaggaaacttcatatagagacaagattgagttcagcattatgttgttgtattgtgtaaaagaaaatgacccaatttgtttatttttgtgattattgatagtaaacacttacagttatgtctatgtcatttgtgaagattgtgactttctttcttcaaccaaggtcagctcataggttcaattgcaattacttaaactccttttgaagttcatacaacagaaaagccataatttgttagaatctattaggctcttttctcttgtgtaaatggatcattttttgagagttttagctgagaaagcaagaactacattgtactctatttagctcggtcaactcactcaaggtgatataacagaattaactgacgaattctgttatgactgttgttagctcttattcttacattgcctacataaacaaccaacttcgatcatttcagctagaactccaagaatctagagagagagttagtgagaacagagaaagaaagagagttgtaaatagagattgttcttccttagaggagacttttctcaagtgagattcatactcttacgttgctgtaactcgactccttgtaaactctctattgatcaatgaagataccagccattagagctgttctggccgtggagtaggcaagtgactcattgtcatcttgtttgaaccatgtaatgtgttcttgttccttttactttcatttctgtctttgaatttagtttattagtttctgttaagtttgtttgattcttatcctagacttgtcataactgtttcttcttgttgtgttggttcttgcatcttgagatccccattgttacaacataataggcaacaacacaagtcaaatcctctatatcaggaagttgaaggtgtaatgttgcaatcttgagagctttgagggtgtaatcttttctgatatagtgaatttgacttgtgttgttgcctagtctttgatgtaggatcaaccacactggttgtatctaattctttctattatgttttattttttgattgctttgtgtttgattagtggtctctgttacttgttcttttttgctgttgtattttgcactgtgttggttgtgttgagcaggtactaatcgccaacatctatctatgagtatgataattcatagggcacgattgagaaactttatgctgttaaatcaagttgtgaactagtgtgctgttcatttttattgtttgcagatggaaatatatgttgggcaaagcactacacgctgttgaagttgttacatttgattacccttgtgagtttctttaaatttcattatgagaaagagaaaaataaaataaaatgcagatgaaatagcttaagttggtagttgaaggccaaagggaattttctagtaagttatgttaaatttacgaaaaaccttgttcctaacagatatgtctggtggaaaacggagggcgcctcctaaggcagaaaagttggttgactttcactctgatattgtcaaagagactgttgccaagtaccctggccatccacttattttggccgggaagtcaatgggatcgaggtataagtcgttatagtttctaataatggcaataaactgtcttgcatcttttgtgtgtgtgtgtttttattattatcaatccggattattagcattgagtttgaaattctacaatctttgcaaattatggaagttgtggttatttactatgcataggatcttgatgaattcaaaatatattgttgctcactcagcacccttggttttatttttaatgtagcctaagcatgtgaaacgtagctagaataacgatttttactgttcactaaatttcaacttttaatttgtggtagagtcagctgcatggtggcttgcaaagaagacataagtgcttcagcaataatttgcttgggatacccactaaaggtttgccgttatttcataaaaatctgatttgtattcttgttttgatttcttgtatgtaaaattaaatggactttcttttcattttgcgtataaaaggtgtgattttgctgtctaccattctccaatattatagtttcgttctcttttacataattgaatcacttggtaaatagtcgattgttgtgagtggaagctgatacaaaatttactttcttaaataaaaatgattgaattcatatgactatcagcatgaaactatattttacctttcttcttcacatagatctctagggatgagattggatttttcattagagtaaggctactcaagcatttcatgctttttctttagagggattatgtttccatttttgtgttatatttcccctttatgtttcagggcatcggtggagcagtgagagatgagattctgttgcaacttaatgttcctataatgtttgtacaggtacttattctaagaacatcttcatgtaatattttatttgtttatttagctttattaaagtaatactaatcaacaattaatgttactaatgttctttctaaattgctctctaaattctaatagacatgccgctagttctcactttc

SEQ ID NO: 17877 - DNA, 4790 bp, Cannabis sativa
tgtttgacaagaatagaagctctgagaacacgacttggtaaatatcaaatttcgaggaacactatttggtatatgagcaatcactatgttagtcgtaccttaaaaaaattaaacagaactagacaaaaatacttaaacccaacaatctcaatagtttaacaaaatatttcgactctcgaaaaattcgagagacataatttagtacatgtattataagccccatcttaatcaaatgtgactgtattttggtgcattgtttgcatacgcatatcattacattttacatatacatatttatatacttggccctacactagacaaatttggagggtacaccttaaggcaatattatgatctaaaaggggccaggcagataatgagagcatgaatagtaattgtcttcaatgtcctcaccaaaacccctacttaacatttaatttgtgacaaagaaatctaaaccgcccaccaaccttcaccaaaaacagagttgaatatacatgaacacaagatgatctttcatatgaaacttcattccaaggacaatatggtaatttcagacacccccaaaaaaaattagaagaagaaaaagcaaatttacatttttagtaataataatttattaatacaagtcatacactagcccttttcagtccaacttaatatattttactcttctatattgtcaaaggtaatatactcttattctagtactactctttaagctagtgcctataaatatatgagagagctagccttctcatatcctcatcaatcaaattccaaatattttcattaaaccatactctgaccaagtctctctttattattttctctcttctaattaattactattcatattcattaatattctcacatcttcttcaattcttttaaaaacccaattaagatttttgtaccactatgatgatgatgaagaacaacaataataataatttgttgtctaagattgcaagtggtaatgggcatggagaagagtctccatattttgatggttggaaagcttatgatagtgatccttttcacacaacaaataatcctcatggagttattcagatgggattggctgaaaatcaattatcatttgatttggttagagattgggtcaagagaaatcaaagtgcttcaatttgtacaattgaaggagttgatgagtttaaagacatagccatttttcaagattatcatggtctacctgagtttagaaatgtaagtattataaaaactataaaacataacacttttttttgttattattattattgataattaattatgaaatttgttgtgataattaatctacaggctgtggctaattttatggagaaagtaagaggaaacaaggcgagtttcgacccgaaccgcattgttatgagtggcggagcaaccggggctcatgagactgttgccttttgtttggctaatcctggtgaagcttttctagttcctattccttattatccagggtaagtaattattaacaattatttttctttcatataaattattttcgagttttcgaaattctgcgagtatttctgcttttagctctaaaaagttctttttacgtataaaaaagtcagatttagtaattttttcagaaagaaattatcaaactttcaagtcctatgttaatttttgagactatggtttaagagaaataaattgaaaatgagctagggcaataattaataaaaataaatataattttagtggaaggtagaattttagattagtcaacgtttatacagcttgcaatccaagtatattttccaataaagtcaaaatcacaaaagttaatttgtttttttctttaatttaatgtatacaatagtcaaatgttacttgaaaatttccattattggtggggacatgtaagtactagtgatagtgaaccaaaccactcaaaaatttaataagcacttaagaacaataaattattttggaatcatttgattggagaaattttttttaagtttattatgctaataaaatttttggattatttttcagatttgatagagacttgaggtggagaacaggagtacaacttcttcctattcattgtgaaagctcaaatggttttaaagtgacaagagaagccatggaaaaagcctatgagaaagctcaagaggataacataagagttaaaggaatgttaatcaccaatccatcaaaccctttaggcacaattcttgatagagacacactaagaacaatagtgagattcatcaatgagaagaatattcacctaatcgccgacgaaatctatgctgcaacggtctttagcaagccgagttttgttagcatttcggagatcatagaggaagaggaacaaaacaagattgagtgtaacaaagatctcattcacatcatctatagcctctcaaaagacatggggttcccgggatttcgagtgggaattatttactcttacaacgatgaagtagtaaattgtgcgcgaaaaatgtccagttttggcttagtttcaacacaaacacaacatctgatagcagcgatgctgtcagatgatgtgtttgtgaataattttttgagtgagagcgcgaggagattggccataaggcacaaactctttacaaatggacttagccaagtcggaattgagtgcttgcaaagcaatgcaggattgtttttatggatggatttgcataagcttttgaagaatcaaacaaacgaagccgaaatggaactttggagggttataattcatgatgttaagctcaatgtttctcccggttcttccttccattgccctgaaccaggatggttcagggtttgcatcgctaacatggatgatcacaccatgaaagttgctttgacaaggattagaagctttgtgatgaagaacaaggagttaactcttgtggtgccaaacaagaagaagtgttggcaatcagatttgaaactcaggcttagcttgagtagaagtagaagatttgaacatgatttcatgatgtctcctcactcacctatgccacattctcctttggttcaagcaaggaattgattaattaggtatcaacatcttcagtccaatttttaacaaaataaatctctatgtactttatcacacaattaaaatcaagtttctctgtataatttcgacatctcaattagacatttatgtccagttaataaattgagatgccttaattagacgagaaaattgaaattaattaaatgattaagtatatagatctatattatacttaatcactttattaatcacaactacttaatgaatcgataataattaataccaactacaacatgaataaagatccattgtccaactcatgaaatttggacacccaaaattggacagaggattttttttttcattaagaataatacagattcattaagtagttggtattaatcaataattaattataaagatttatgaagtggttgggactactaattaagtgatcatcaattatatagatttagttgtttaatttttctagttattattaagtatataaagtcgacaaattgtacaactaccaatgttttttgtttcaatattattatttttcctttttcacataaaccaaatgtgagtgaaaaaggtgtgtaacgatttattgtgatataatgtttatgggaaataatttatttgtttgtttgcatatttttcaaaatgattattttaatttcttttttgagtacttgacaaagaaaagtaatggaagtaaaaaatccaattaatgaagagtattgtcgagaaaaataagatccaaggtgcaaaatgtgtattaaatttggcataagcacaaaaaaatagtatgtactaaattttaacttataataaataacacattttttaattattactttgtcacttattactatatttattaattaaaaatttatttttcattcacatttaaatctcaaaatttgcaacaataaaaaaagtaatcataaaaaaataaaacaaattaattgtattgcatatttccaatgaacattgactacttattcactttttttttagctaatttacttcttatgcattagatatcgattataaaagtagaataattacataaaatactatttttgtaaaaaaattatttttttacggtattttataaaaatataaaagttaaataaataacaagagaaaataatatcaaaataacaataaaacaacatcaaaacaacataaaaaatattatacaaataataaaaaatcaacaacaaaataacaagagtacaatataaaaatacactaaaaaatcgtatatattctgtaaataaaattttaaaaacgtaaaaatattaaaaattttgtacaaattgtatttttataattttattattatttttgtatttttatttaaattatctctataaaaattgggttaatataattttggtacatattttgagctaattttaatacaaattatacatattatattagagatgatataaagtatttaacacctaatatcttataattagttaacaatttcttatattatttattaaataaaaatacatataaccaatagagatgctctaagagtatatcaccttatattggtttagtgaaacatcattagatatcaaaccccaaactcatcctctcatgagtttagtggaatccaaattaatatacttgtcattaatcataaacaaacaaagacaaaaagctattaaacaaagacaaaaagctattgttcaaaataaaaaaacaaagacaaaaagccataagagaaatagccaaatgggcttgt

SEQ ID NO: 17878 - DNA, 3512 bp, Cannabis sativa
  modified_base (32)..(46): a, c, t, g, unknown or other
  modified_base (3070)..(3071): a, c, t, g, unknown or other
  modified_base (3101)..(3102): a, c, t, g, unknown or other
  modified_base (3128)..(3129): a, c, t, g, unknown or other
ttaacaaaacagagagtccaattggtaacttnnnnnnnnnnnnnnntccaaaatggtatttacccttatcttaaagacaaaaatagcaaaagggttcaacgttggaaagctaattaagctactctttagagcgagaaaataagctctggtcaaaacagttgcacaatctttgtcaagctatgcaatcaatgttttcttactttagttggagattagtctagacatggaaaaattaatgtcaaagttcttgtggaagtattcttctttagggtgatgggggtctggcagccacgggttagttgtaatcaaagtactaaggctattcccaacacgaattctagcacctgtactaataagatctttcgtttcaaatattctcttccagatgaacgatgaattatttccaagagaggccgagagaaaaagaatcattagaaaaatatctagtcttgtaaactttacaaactagggaagaatcttcagttaacaacctccatgtctatttcccaaataaggctaaattgtaatccctgaaatctctaaaacccaagcctcctactgtcttatgcatacatagctttttccaactaacccagccaactccattcttattcttagatgattgccaccaaaagttgctcataatgctttcgagactacaacaagttttcaatggtaacaaaaatgcggacatgtcatagctttgtaaagcttatgcaactatttttaggagtatttctttcccagctttagacaaaaattgacccgcccaatgcttaaattttttctgcagcttgtcttttaaaaaatccaaaatggctttcttgtttcttcccactaaagaaggaagtcccaagtacaaactcgaaccatcagcttcaggtatttgcatgagttgacagattcgacttctcatatcgtgaagagaattgctactaaaaaagattgatgacttgttaaaattaataacttgcccagaagcaaaagtattattagatagtctatgattaaaacaaacaacaaaggggaaaataacaacaaagggcaaaattatttttccttttgttgtaaaacaaacaacaaaggagaaaataacatatatttatactaaaaaaggatataatagtacttttaataactaactttctctccatttaattttgaaaatcacaaatgagaattactatcatttttaaattctccctccatcctactttctcctttttctaccaaacacgaccttcgtgttattttttttatttatgggtatttatataatttgcaatccgtagttttaaaccctaactaatccgtaccaaactatttgagaatgaaccaaatgaatttggtgcgaatgatttagttaatccggaccgtttaaaatttcttagttcagtcatagttttagaaatatcagtagcggttcaatcctaatcaattcgtataattattttatatatacttaatatatataattttggataaaatgttaatattttataacaactttaggtagaatattgacattgacttaatattattatgataataattttttattattatttatgtatgattaacttattaaaagtaaaaagaaaatactgaaaaaatgaacaattaccgtaaaaaaatttagaacaactacgaaatataaactatagttttgaaccaaattaatccatttttgagtggattagtttgatttagtttggtttgatcatttaattggtggaatggtttgattttaaatttttaaaataccgtaatgctaatttggtttgaaaaaattaaaaattcgaaccaagctaatatgtgaaaattcctatttttatttaataactttctatgcatggcttgtaaggaattaagtttagttgtataggtgtttgatactgaataaaaaataaagatctagacaacatttcaatgcaaaattactatcctagctataataaataaatattttttaatttttcttggtgaaagatattttatatatttttcttgttcactcattcttctatgttcaaaaagatttattttagagaattaaagaaagtattgtgtttttctccaattcttttctttcatactcttttcttctgcccaaaattccctcttaccaaacatatttaataaggaggatattcttaatcactaatgagatctagaccgttgggttgccaacgtggcatgagctcagccattgatgacgactggttgttgacttgaaggagtgggcaaccatcaaagaacacgtgttgaaagctacagaagactgcttttcagggacacgtggcacgttcatagttcttaaaagcaaacttatccactactactaatactatggttgaggtaattgtcaacagagaaggaaatgagattgggcccacttaataaaaaggtgagcccattcattgaaaacgaaagcccgctattgtcattgttttgggccccacttaagaacaacatccttatcggacccaaaatcaaatatggacccataaaaagcaaaaattatcattaactaacttcttaaaataaaaagaaatattctcgtaatgttttgggagaatacagattgcgttattttaatttataaaataagatttagattttcttgtctcagatttttggatccttcaaaatattatattatctataataagatacacttagttatattatagagcaattcatggcgtaaatacataagtttaactttcagttacagagaaatactttaagttatatttctggaacttctgtagatacttaccgttaagtattaaatcattattcatgtattatttttttattggtaaatttaacttaaattttaaataaaaataaaaatttaatgatctggactaaggattgtcatgtgataatttacttgacacttaacagtctgtctggtattctagaattacaacttaagtattattactgtcaaaaattaaatttatgtatttatttataactgagagttaaacttaaatatttatacgcaaattattctatattataatatttttggattatctttagatttatttatttattnntatctttagatttatttatttattattatnnttagatttatttatttattattattnntattattattattattttaattttgcaatctatttattatgaaagactgctattagccataaccattataacatggctctttataaacatttatagtgatattttttaaaaattattatattaaatcacgtagaacttattatttaattgtatcaatattaatataatagtactaaacactattaatattttttaatatttctctaatttgcaaaaccccactttatagtggtcttgtgtctaatagcattaatcttattaatctttcaaattattatgataagaatttctttttatttctaaaagtgaataataaagttatattacatacataaaattgagaaaattagagtttgtttggctgtgttttcagttttcagttt

SEQ ID NO: 17879 - DNA, 8119 bp, Cannabis sativa
  modified_base (31)..(33): a, c, t, g, unknown or other
  modified_base (6957)..(6967): a, c, t, g, unknown or other
ttaaatagctataacatacatgaatatgaannnaaattagactaaaaaatttttttgtacgccgaaacaagttaagggtgcaccaatacatcccttttaaggggtgcattgtagaatcacccaatattatattttatgtaaataaaatttaaaaatttacaaatgttaaaaattccttaacaaaggatctatatttttttttagttaaggtattaaattttgaactaaaagtttataccaaaataaaaatcctggtgctgtggttaagtggtggattaaagttaattgtgatgagtctctattctcgtcggaatcgaaatttgggctagggttgattgcttgcgtttcctaggggctgttggtggaggctatgaccgtggttcatatagagagtggatacccatatggctgaacaattggagttaaggaaatgctgaattggattaaatcttatgatgaagttttgttgatgacaggcttatgcttttattcttgaatttgattgtcattggttttcaatgctattttggatgatgctgttatctttttccctttggtactgttattgcagattgtaagagacttgttcatagtgtcaatgactcaatgatgttttgttttcttttattaaacaatccgggaaccaagcggcagattggttagttcacttctctagttcttttcctggtcataatttcggtgggggtgatgtttttactagtttgcaagctattgtattagttgattctatgaagttttttcttctgtttcaaaaaatatatatatctaaaccatacaaagaatatatttcttaccttaaaattttttatgaaactaaaacaaagtatagttcagagtctaaatttgaattgtacaatactacaagtgcagtagatgtagattaaaaaaagaaaactattgtaccaatttctgataccaaaggaataccacagaaaacaaatgtggaccacaaagaagaagctctaaactattacaaacgtttttattctagattgtgtctcctaatgtgatctggaatagtatatgcttttttgtccctattttgaatcattaaatcctataattaacttcatggcatattatcttccctttgcaaatctgaataaccatattatattaaacatgaatatattcaagcacatgatccaaaccaaacctaaaaagtaatcttaaagtgatccatgatttgtttccccataagcaaatgttaagacaaaaacatcttaaaaacgagatttatcaccatctttatcaccttgaataatgatacatagtatatagattaaagagtacaatcaaaacataatataatatcttcactatcttccaaaaaaatgatttgattgttggcttgagatcaaattggtgcttcattttatgaataaatgaaataaattaaactccaccaaccaccacatatttctagccaataaaaaagaaacagagtaggctgctgtttaaggtgatttgaattcttccacttgactttaaatagtggttttgtttaagtaccccataaaaggacaatataatagacaagaaagttttaaagcttagacctcttactttccaattagtaagaaaataaaaataatcgtactggactactgaaatcactttatggcatgtttctgtactatattcatataaaggatcacaattattgtcacccagtgaaactttgctcttgtttagttcatgataacaaaatgatacagaaaaaaaaaatgaagacaaaaatgtaatccaccagctaatgtaattgaaattcaatctgcctcaaacttgacaagtgttttatggtttaaaattttgttgtcaaaatttagtgatttttcacatccgtgaaattgtgtcatacaacataaaagccattaaagattctaaaaggttagttcagatccgaaccgaatataattcagattcaagattttacactgcacttgaccagattcaagtgactttatattactacataaaaattgtgcagtgtgctacagctttcgtctgtaaggaccacaatgaactgacgaagctccaaagtactagtctaagatttgtgtctcccaatatgctatctgctattttctggccctattttaaatcattaaaatcctataatttcatggcctccctctgcaaatttgtaaccatattaaaatctgtgatatacatttatatatataaatttaagcacattatgcaaacctaacaataatctaacattaattcttcatgatttatattcacaataaagcacatgtgtaagacagcaatatcttaaggttgatatttagaccatttttccaactgtggccacatgatttattagcaatgagagagtcatagctccttaaacatgtattatatttcactatcatccaaaaagaatgatttgattgtttgtttgagatttaatgggtgcttgcttcattttataaaattaaactataaaacaccaccaccactatatttatacacaatcaagaaaaaacagaataatattaatctcaaacaagaataataccttaaacagcaatattttttgtttttatttttgaaagagagtactctgttgtttaacgtacccttcattaattgataattccatttatttttgaatactccatgaaagtaaggaagtaaaaagagcaataaggtaggggatgaaatgttcatccccattatataaatatatagatataaaaagacacagtctagtttggccttttgatagttcttaaagcatataaaatatttcactatcttccaaataatataaaaaaaagaaatttttttgatttaattgtttgtttgagacttaattgatgcttcttttcaaaagataaataaaataccaccgcataattctacacaaaatagaaaaaacagagaagagagtactctgttgttgaggtacctacctttcatcgatttatgaccccatttaacttaattcgacttgtatcttttaaaaacaccccatgtctttaaagaaagatcataatataaaatattaaaatgccccatgaaagggaaagaaaataaaaagaagggcaataagaaagacagagtctagtttggcctcctactaggtatctagtcatccttatagtaaaaaaaaaacaaatattttaaccgtattggaccactagaggtagaagagaagaacattttggaagcagaatagtccctgttatgtacatatatcacaaaggaccacacagaatattgtcacctagtgaagctctgctctattttttaattttctcttttgttgccgtaccaactcaattagtgtagcattaataacagtactagttttttctgcatttcaaagaaacgatgcactaaaaaatcttaaaaatgaaggcttctacaaatatgaatcatcacacagcaatatttgtgttgtgtgtgtgagtaaatgggtttaaaagcaatcaatatgttttgtgggaatgtgatcattatttcccagagaaacgtaagtttgaaaattttggatggataccaacttaagttctatttatcattcaaaatgttataatatagagagctttattctcgtgatgtgtttgtgtttttttttttttaatttattttggctttgtattcatgcatggaaagagatccagtagtgcatagatttgtccgcaaagacagaatagaatagaatagatattggtaacgctcgaatatgtgggggcaattggcaaagacaaaagttggtgctacagaagaaaagaaagatgcctttggagtttggatggtgtttggctgttggtgaaaaataaaacccagttgggaactggtagactgcttaccaaccaacagcttgtttttcttgttgttacttgttagaagttgctgtgaacaaaagagaaaaaaaaaaaagaaaccaaccaccaaaatgcttcttattacacactcacccttttcctttttttacctggaaacaacaagtaatgtataaaggaaaacaaaaaatacttagccattcgtcactcatggaaatatatagcatgcccaaaatatttccttttcaaaaattatacatggctggcatgttaattataaaattagatatcaatttagacctaattttttccacatacgtgaaagccaccaccaggtatattgtgaagtaccctcatcaaacaaaccttttcttatacgacttttttttttttttttttttttaaatttaaagatattaaaagggttggggtcagacaaagagtgtctatatatgtaataaataaaaaagaaaacaaaacagaaaaaaatttaaaagatatgattgatattgttaagccaattcaagcccccacgccaattgacaaagccgcaactggttttgcactctaaaatatgtatttattatagcaaaaaaatgaatatctgcatttcttagctggaaatgaaacagtgggccatgttgtctctatctctatttgactcttccttttcttcttctccaaactcttatatataaatacacgaaccttccttccctattttcatacaaacaaattaaccaaaaatctctctttctctttttctctttttcttttaaaaatcctaagaaagacatatatataaatggcaaaagtaggaaagctaggagggaagttgaagtcagccataaaaagatggccatccttgaccaaattcagccgcatgagcagcaatggaagcatctcatcaccatatcaccctcatcataataatgatcatgaccataaccagatctcaaacgacgtcgttaataatgatcagcttcatgccgtttacgtgggcaagtctaggcggcgttacttggtgagctcagaagtggttgaacatcctctgtttcaggagctcgtagacaagtctgctgctgcctctgtctactgtgaagacgctactggaatctccgttgcttgcgaggttgtgttgtttgaacacttgctttggatgttggacaacgccgaggctcagctgggttccatggatgagcttgttgagttctatacttgctgatttttttttatatttatatttatatatatatcactgaccaagcatatgaagcagttaattaattattagtttgtaattgtatagagatattatatatggtaatggtcttttgtgtgcctgtgctttggacagtgaccaataacaatatatattattgttataattaaccatttctttttcgagaaaagttgtattaattgctaatgcaaaagagtttgttattcaaaatctctctcaggttaattagtgttaggaacttgatgatgatgattttcatttcatatattttcattatatttatgaataattacttgtattttatggttacattaatttaaataaaatttatgttgtaattcatttgaagtaatattattaccattatagtcgatatatatataagcatgaataaccttacatatatatgtccaaacgagaatgtacatgtacatgtaccagtatttctgtaaaatacttaaaaataaataaagaaataaaaaaaaacacaaaagaaaagataatacaaacaaccaaaaacaactgtatctgggtaatgtttaatgggattattaatactgggaaattttgcccatactatatattaggtacaatgcattggcccctactccatttatattttggatgtttctattctactattacaacttgtttgactatataatatgtatctatatatctccaatgtgccagttaaaatcacacttttacacatactatatatgaagtgatttatttagaggaaaaaaagtggacgaggatgactaaagagtaatgagaattataaattgaatattagctggcaggaaatgtaaaacaatatctctaattaataaagatagttaattagcttgactggtggtctcaaatttaaagaaatatttagtttaagtttcaaatgattgggttgttaagctggatgcttaagaccaaccaagcattgaactaataaaagtttattaatataacattttctattagtaatcatattaattaagttagatgaggattgtcattattcagaccaagcaagcaaatttgcgtgctacagaagaattaagtttttttttttttttttttttggtgtgttattattttattgtatgtggcttagggtgtaattactaattaattaggaatttcttaagaatttgaacattaaagaaagtataatgttgtgaaaactaacagtggcacgctataagtacgtactcactgagtagtggagggcatcataaatcatattaatgatagagcataatatagcaatttaatatgcaaacattgctcattttgaaaggaaacttataatcaccgttaattaattaatgtagagtgtctacataaacatggttgctacttgctgtctaaattataagtaagattaaggacacacaaaatattcatgatattatacaaatattttggtgtgagataatatgattattttggtgtatagtataatttatttctcattttcatccttaatatatgtcaactttatgattgttatgcccaaaaagagagactattggaaaaaattatataagaagaaaccttcaaaaaataatactatcgagcaccagtagtataattggttagtaatatttactaaaaatactacttaagttagagcattgctattgggtattagttgagcttagcaccttctagatgtgttatcttgtaattgatcattaacgactctctaaaagttattgcatatatgcatgagatccgatacacaccaaataggaatattgatacgtagtagtgcgttaagcaccaatgatgtctttaagcatttctcccttaaattatatggatctgatacttaatgcatcaataacagtatgaccctgaagatgttaagcaccacaagtgccttttagnnnnnnnnnnnaaaaaaaaaaaaaaaaaacactgagacactaatataatgaaaaatgaaaaatataccgtagtaatatgtagaaggatgtacagccatttattaaacatttaataataaaactttattatatgtaaggaaatcagagcagtggcatagtatagccaaaataacaggagtgggcaagtaggtcataaactgtgtgcggttacatttactatgggtcttgcccattggaccaaattgaggccatacaatttgttgggtgttgttcattacaaacattttaaattagttgagtgttgttctgcctgaagaatctgttgaatatagaaacaaaatatgtttgggtgtgaagttaatgaaatatggtggaagaatccaaaaatagattgaatagaagatacaattgctgagctgagctaggttgtttgggccacagccacacacccatattaatgaccaaaaatatatatgataaaacaataaaacaatgcattggcctcctaaagtactagcaataatcactaaagttatgcagagcaacacttaggtttaatgtacagttggctttggcttttctagctactttttctacccaacttttgattaatatattatatataaacgtaattcgattacataaattcaatactagggaaaatatttattataataataaagatatataaactattttttttttccttttgagggaaaaagataaactaattcgattggacaaaatgttcagaagaagagtatattgctggccactaatggtgacaaatttgaaagttccaaataatgtaaaaagaataataagttcccaaaataataacattaccatttccatttccatttccattttctttacattaatattgcaagagtgcaagcttataccctcaaaagaaataaaatagaagaagaaagatgggtgcaacactgcaactcaatctgatagatgttgttgatattaatttacataatggtaacattttcaatatttggtcttagacatgcatcttaatatttaagatagaagtcaaatataataggtgatactatttgtatatatattttcttcgttcttatatttcaaattaatgtgccaagtgttgtttcaaataattgtttatatgcttttaattaacattttat

SEQ ID NO: 17880 - DNA, 3508 bp, Cannabis sativa
tacattccgtgaaaatacatcacgagacaaaatcgtgtccctacatttttattctcatatcaatacaaaaaaatcacaataattaaatcaatatgcaataataatcaacatagtaaatagtaaattacatatagggtttaaacacaacaattgagtacaagtaacttctctatatgaaatataagaccaaaagtttatacacttacaaaaaagtaaccaaatctttatatgagtagcaagaatgtacaatattaatagttaatttcctcttacaacaacccacccaagcaaaaataagataatacaataacttataactcatccaaatattacaagaaacaaaaaagaaagataccctattagcaactctagatgctaatgatatgctttttttttatacattatataaagattttgattaattaataaacacataccatctcatttatgtagagtagagaagaatagaatcacttttcaagcataaattaaaaataaaaaaggtggaaagaataatgtgcttgcaatccaaatattgctgcaaacaaataataataaattgatacttttttttggatggatatttattagctttcttttttcttaggttcttcaagaacaaattcagcatataaatccttcagagctatcacaactgtggttatcagaggccccattattgcaccctataaacatatatacacacataaaatcagtatagaatctaaagaaatgataaagtgtgtaaaatttgacatacaatagcatttccaaacaatgtgttatgaaaagttggcaagaatagtactaggatttttgcattttcgggtacattctaaacatttcagatcgttaaaaattcttcctgaattattgagacttagactgttatttcgatatgaagtaatatttggaaactagaaaactatagcaattactacttaggtagtaaggaagaactcggaactcaaaccttgtggaagcaaatcacatgcctaattatttgaacaaccgaaagagatcataaagtgttctagcctttgggaaagggtgattttgactataagtttggttaaactaaattgttttctaaactaggctgcctaaccctatatttaaagaccgaaaaactaaagcaattgctagataagtaaccgaaaggggattcgaatcttagactctacgagagcaaaccgcaacttgccactttgagctacaaaaaacctatcaaaactaggctcccagctcccatgtccaaccttacaatatttcaagactaaaaaactatatcaaccagcaattcatttcgataagacaagttaaggcgaaacatagaaactaaaacacgaaaaagggatagaattttacctctattgcagagggaaacaatgtcattccaccaatgatgctaagaccagtgagataagcactatggccaggtatgtcctcttgaatttcggatgcaccataatccataaggaaaaggtgaacaatagacaagactatcgccacgatgtatctaccttcgagcacgagttgcagagcagctggaattgttgcaaaccaagatgggaaaatcggtaacagagagctaatgattgcaagaactgttgacatgtacaagaaatgtatcttaattagtctaaacaaaagccatgtaagacatccttgaacaaatgcaatctcagctgtagatagaagtacacccgaaacagcttgatcaagaacctcaacacatctttctctagctgatttcgatattggaagcatacatataacttgctcggtcacaccacctgattcggttgtgattaggtaatacaaaacccaaaagaacaccattgactgagacaagaaattgaaaacctcagcagctccagatatgatcgaatttcctatggagaacatgaatttcgcgctgcttcctaaaaccgatgtgctactagcgagcacacgttgagatacatctgcgccttttacagcatacccttttgccttttctaccaaatcctctctagtgatgataaattctcgaattatcgcatccatttctgtgtaaatctgtccccattctcggttaccaattcgagtccttaaactcataagtttctctgtgtaaggcgaggaaggactcatcagagcggttgaaggcgctgatgaattagtctggcgtttaataacgaaatgcttaatcccagtaacgaattcggttaaattatactgcattgctaaagtatcaatctgttcagaaacagtctcatatgctttagtactatacttatcaaccattccaggcaaatcattatcttccatccatttcttaacaccaattctctcagcataattactctcttcaacatgtaatttcaatgaaataacagcatctttaccttcaacaccaatcttataagagaaaaatgtaacaccaaacaaaaaccccaaaatcataccaataatcaaaccaattccaactattgttttcaattttctcaacaaccctcttgtgaaaaaagcactaattctactacgaggaaaactaacacttctaaaagaagtaactgttgacattgttgaatcaactgttttagcactaaacacaaaacccaatccaacaatccctaatgacccaattccaccaaaactctcataagcaataatgaacacccaaaaagacacaagccaccttaaaagcttcgaaaacgcgcctcttcgccttttcgggtgagctgatttgggttttctcaacagaatttgaacagcaacttccctaacctcaacaagggtacctacaaaaaccctaaaaacagctactggaattgctagaacagtttctgtcaaccccaaattcaatggctcaatccaaaatgcttctagggtttgttgaattccccttaagggaattgaacagagtacagcccattgaatgggtctgagatattcttctagaagcttacaaaccgcaaacagaatgaagatagtgaaagcaaagccagcgtgtgccatggctatgtatagcgcgagtcgtacctggggatcaccggagagggtggctctgccatctgggtcggtgactgtttccggtgagtctttaccacgcgccgtcgagggaggcgcgtgtgatggtggtgttggtgagggttttcgaattgaagctgatctgaacatgtcttgccacgctgggtttgatgaatttggttctgagtatggaacaagttccattttttatatacagagaaggatttttttgagtgtgggagttttttcccagatgaaaagggattgactttattggtttatattctgaatgaagagagagaaagaagaactgatgagagtggaagagagagagagaggcagagccagttgtgtttttgggaataaagattggatttttaagaacatgtgaaagtgaaagtgaaagcgaaagtgaagaatactgtgtcggaaatcactttcgagtcccttgtggattttcttttagtaccaatcattcattcaataaaaattg

SEQ ID NO: 17881 - DNA, 6094 bp, Cannabis sativa
tatatttgtgtttattttgtattttctttcaattgttaaatattttagggaataaattgacagaaattttactgttaacttaaatcatttaaaatttccgcaatgaaatgttgattctaaattttagtaacctattatgtcatagtgaaacatgcatttattaccctactcaactcatgattcatcaattttatgtctcatttatgaaatggacacctttggttgataatgcaggcacgtgacatttctttgtggtaaaggtggggtctacgcgcttggatctgtggttgctaactgcattggggaccatcaaaagcgtgacatgtaccttaacctcttcttagaggtaattatctataactataatctatataacccatccctatcttcaagacttttttttcatctcaccattggaattgtatttttgcatactattttaaaaaatctacctaataaataaaatatctggcttcatttgatatccctttctctcgagagaaaaaccagtttttgtttgtttttttatttgtgctattaatatttttgcttttaggtttcggtatcttattcaaagatttattaaaccgtacacgcgtctatcgtaccaagcatatagttttactgacatagacaacaaaaagcaattaataagaatatgtggtgcgaaatatctttatgcctgcaaatgcaattgaccgttaggggtactttgccaaaacaaaaagaccatttggggattttccaaacaagtagaaaaaattaagtttatttcgatattattttattttagattatgatttttttcttccgaactttgacatatactaaatcatttgctctgaattttttcggctgttaaaaattctcttaaactattaagattgttagatttaagtgtttttgtctaatttcattcaattttactgtttcattaattgttgatgtattaaaccatgctccccaaactttgatatctaccaaatcatgcttctcaaattttgatatgtactaaatactttcatctatactagattttttttactaaaattagacaaaaatccttaatctaacaatcacaatagttctaggaaatttttaacaattttaaaagttcaagagtataatttattacatgttaaaatttggagagaaaaattcttaattaacctttattttattttcttatatcaaagaattaaagtatttaattatccagtagtgattttttttaatgtaatgcgttaaatttaagcagcatttacatagcatttacataggaatggacaaatccaactgaatagcttgacttccaaagggaggttaatccctatccacttaagcacttgccctgctaagtagaacataattgtctattaaattaagtagtaattttgagaatacataaatttacacttacttttaagtcttttctttttcttttttgttctctaatgctccaattgttatcattttctttgacatacatgataaagtggttgtaagttcctaattattttctttcacatacatgctaagctaaagtgaacatattttatgaaactaattataagctaattggtctgaggaaagaaaaaagaaaatgcaaatgagttcctattacttaatatatttctatatgtatacataaacaatttaaatatatctctctatttacacaaaactactcagtttatatgcacttagttttgatagcagagcacaaaactgtagatgttaaatttcaacgtgttaaaagtagtttccagagtactgcagatcatatatattcatagctcatttctagcctcatccatcctcttgttatcaatctgactcagttaaattagaattattaaagcaaaagatgaacggaataactaataattcgtctcgcattttaagttctgagatctatatgtatgtctacgaattaacaatgactcaagtgtttatagtaacaacaagaagaaaatctcacaaacatgaaaacttacattcttttatagcccttcatcttttttttgctcatcattgcagaatttatgtagaagtcgagatcacattaagtagcttaatcacatagtttgtttaactaaaatttaatcatgttataggttgcacaggaaagggctctccctgctggacccgaggaaggtggttttggaatgtcatatgatcttctctacggcagagcaggcttcctatgggcagctctattcataaataaatacattggtgaagacaataagctgtctagtgatcttctcatgccaattgtcgaagctgtgttagacggaggcagagcaggggcatcggttaactcttcctgtccactcatgtataggtggcacggaacaagatattggggcgcagccaatggcctagcaggaattttgcatgtacttctctactttccactatgtaaagaagacgcagaggatgtcaaggccactttaaggtacatgatgagtaaaaggtttcctcatagtggaaattacccctcaagtgaaggaaatcccagggacgagttggtgcaatggtctcatggtgccaccagcatggccattactctgtccaaggcttcagaggttagcaattcaaccaaaactataatacaagaatgtgcaaaccttttaggatatgtttggtttggtttcaacccaacgtactctttgtcccttttggcattgtattaaagaaatgtgattggtttatctgtataggtgttcccaggtgatagagaattccgtgatgctgctatagaagcaggagaagtagtgtggaagaatgggttggtgaagaaggttggactggctgatggggtggctgggaatgcctatgctttcctttccctctacagactgacaggcgagaccctatacgaagagagagctaaggcatttgcatgctttttgtatcataatgctccaaagctaatgaacatggagcataattctcctggggttgaccatgcctgctctctttttcaaggacttgctggaactgcttgcctttggtttgatctgcttgctcctcaaaactctaggtttccaggttatgaactatagagactaagataacagaaaagtatactctacttagttgtaattttatgtcaatgagatgtgatgtgatcctttatggaaatgttgcagtgtcaatctcaggcatggtctagttagtttacaactttaggcttgactcttcaaggtctgatttagctttcagatccacacgtgtagatcttctctggtgtccgggttaggccaaaccataagcatatgtagtctacttgaattactaactatgcatatgaactaaacttaactctactccatctacagtctacttgcttgatgctcaatctatgatctctagtcgtttatgtttgtttaggtaaaaatagctaaatgggtactcgagctagtaaagtgtgatctaactatggattatgtataattggatttcattgattggtatctttattcatgcttttttattagttagtaggtattattgattattggaatgttgctctctaaatgtgattacactgattagagttggaaatatgactaaaagatactaaaactagacagttggtactttgcttcgtagggaaattgtactggaattaaaattaaaattttattattttatttgttttttttttaaaaaaaaaatattaattgtaatatcttttcaataagtgttagagcatctcccaacatctatgaatcatagtgacggaaagtaaaaaagaaataatgtggttctagttaggggtgtgcataaatcgattcaattcaatgagaatcaaccgatccaattataatcgatcgctaaatattggatattcaattgtgatcggattggattagatgttaattttaaatatctaattggatcagatcagatagtgaatgaggtgtctaaacgtccaatatcaacatccaatcgaattaattagtattttcatttagttttgataagtaattagattttatatagttatacataaaatctatatgtatatataaaaattcacattaaaattttacttttttttttttggtttggatggatccagtccaatccaatacataaactaaaatattggatgggtttgatttgatccaaaaaaatattaagtgtaaaatattagataaatcaaatttaaaccaataaatatatatgaaatatatccattggatatatagaatggatccaatccaacatccaatggatgtcggatcgattggatgactgaaattaattggatcggattgaatggtaaaatctaacatccaatatataattagatcggatctggataactttaaaaatttaagatgtggtccaatgaacaccgctagttctaatcatataaaatttggctctcgaaaatgtggtgagtttttttttcatattattttaataacaataataattttatcatataaatatttaataatttaaaatatttgtaattaacttttcctaccaacaatatttttttcactcgttaaagtctttatagagaaatcaagatccaactaatttttataaaacaatcttgataatattttcccatatatttaagtagttccagtcacttccaaaaatttcactttgattgaactacttaacttactgataaaacagtaaggtgtactgcttgtaacaattccaatgaaaatacctcaaaccttggtgcaacacaattatgaatcattatacatcaattttgggcaatgcataaatttttcttgtgtcactacctgaccatatttgagtacaaggaaccaattgttgtaaaggcatagacaatttgaccggcacacctgaaattagaactgaggtaagactagtatgacacacatgtttatatttgccatatatatgacatatctgttagaacaatagttggtgtatatatgattacatcttaatatcgtgaatgtatgtgtttatcaattcagaaagtatgaaccaatgctatcaacactagtacgccaaattatactgagtgcatgtggtattatggttgggtatactttcaaaagcatgaactagtactaccaacactagtacgccagagtactgagtgcatgtggtattatggttggttatactttcaaaatcatgaactagtactaccaacactagtacgactagagttgtaagtgcatgtgatattatggtcaattatactatggtcaagaatgttcgagactcatttatacatatttgacatggtttatgacttgttgataggtgtatgggcgcttagtcgcaggtcagttatatttatattttatgtttttcttactgagtttgtcaactcacaaatgatatgttatgtgcaagtaaagacaaaactgttgttgaacgacaataagttttgagctggatgtagattgtacatatcaagatagttcgacctggagtgttgtatctttgagaaagctagggctcactattttgtagtcgaggtgcgacatcttttaattatgtacagttaaaaaatgtagatacgggatctcagattttataaatgtaatacattatatgtttatttatttaagattaaattttatcgcttttgataaaccctttgattagcaaaggttgcacaataattatgaaaagtattgtagcacgcctaaactagtaaggtgttacaagatggctgttattttcataacctgataacataacaatcatcagactactttgtcagataactaaaaaataaagaaagcttctctagattttgaaatactcatctcttctttcttcttagttttgaaccctatagtgagtgagtgcttgcccacacagtcaatactcaaatatagtgtggtagattgtgaagaattccatcatctaaggagatccaggtttagatcttagtaatactctgtgatgaaaatgaacaagggttagagatctgaatgaaaggaaacattatattccgctgctaccaatgtacagttttctatagactttgtatgtgtttatttcattgctatagaaaattcatatttaggatgttagattatattcatataatcaacatacatgttag

SEQ ID NO: 17882 - DNA, 3122 bp, Cannabis sativa
gtttttttgcagtgcgttcgcaagccatcctgactctcccgtgctccgatctaaccccttgagctcgtttaaactgcatccaaaacaatacactgtctctctttcttttctcgccctctttccctcttcccttactgtctattctctttaactctcgtctgtttgaactttctgtttcctttactcgtcctctgctcctttcagcgtcttttgattagttgacataaaaatggccgatcaagtttctgcaatcgggtttgaaggatttgagaagaggctcgaagtttcattctttgagcctggactctttgctgatccttcggggatgggcttccgatctttgtcgaagtctcaattggatgagattctgaagccagctgagtgcactattgtttcctcactgtctaatgatcaacttgattcatatgtgctctcagaatccagcttctttgtgtacccttacaaggtcattatcaaaacttgcggaactactaaattgctactctctattcctgctatactgaagcttgcaagctccctttctcttgctgtaaaatctgtcaagtacactcgtgggaacttcatctttcccggtgctcagtcctaccctcaccgtagcttttctgaggaagttactgtccttgatagctactttggcaagcttggtttgtctagcagcgcttacatgatgggcagccctgatcaaccacagaagtggcatgtgtactctgcccatgctgaattggctagccttgtcttcggcacccagcagtccgggtcagtgcatactcttgagatgtgcatgactggtcttgatagagaaagcgcatctgtcttctacaaaactgaagcaagctctgccatcgggatgactgagaattctggtatcaggaagattctcccccaatctgaaatatgtgattttgagtttgagccatgtggctactccatgaactctatcgaaggggatgcaatctctactatccatgtgacccctgaagatgggttcagttatgcaagctttgaaacaatgggatatgattttgagaaggttgatctgagccagctgcttgagagggtcttggtttgtttccagccaaatgaattctctgtggctctgcactctaatgttgtgaacgaagaccttggaaacaagttcccagtgcacctgaagggctactctattggagaaaagaacactgaagcgctcggcatgggtggaagtatcatctactacagctttgttaaggatgcagagagtgcatctccgcggtcaattctgaaacgttgttggagcgaggacgagaaggattcaggaggtgaatccgacgagaattagtttcttcttcctatcgttatttgggatgtggtttttctattaatgttagtcattgaataaagcaaactttcggggttatggtttgttcttttgtctttgtttatgtttatttgaactactacttaagagtctgtctttgataataggcgagacgctttttatctctttgagttgagagtgttggacctatttaaataaataaaggaatttcttattgtatttacggttttcatgaattctctcgtctctatcaattgtcaatttattttctctaaagatcctagagagcacgagcacccatacttgattttgtttctaagggtagggtaagggttacttgggaaagattttgttgtagtagggtatagatcatatatctggaccattcgtatgtgtggggacaatttttatttttgtagaaagcatcttcctcttagggttagctgactgatggaagagggccatgctattgctgacatgaatagtcttctgaagaagtttgtggaaatggagtgtaatggaggagcatgactttaatgatgtggactagggaaggctcaaagaacagtcagggttcggataagctcccatctcaaccaaaaagtttattcctattttattctatgattctatcaatttaaaaataaagtgacatccattcatatatgttatgtaaagatacaagtgggcataataatacaatgaaattattaaattgataggatttttttttttttaaaaaaaaaatcaagtgatatggttttaataatactaaagatagaagtgggcagaataataaattgatatcgatttctgtagctttggtaggtataaaaacaaaatttgtattttgtcctgccagaaatccaattagatcaaatattattaagtgtcgctgtctaccatcatcgcaattaaataaaactttgcaattcaacctggtagaaattttaggcaagcccttctttatgataaaaaagaagaaaaaaaaacctggtagaaatttttgcatgggtcacatgtattaaaaccatcgactcttttcaaaatttaaaaagtgataaaataattgtaagaaaataaactcaagatgaccatctctaaattttcaatgattgtttatgtatgtactaaattatattctttaaactttgatatttatcaaatcatgccactcgaacttaaatcatgttccttaaatttttatctgtttaattttttttcactaaaattagacaaaaatttaaattcaacaatgtcaatagtttaggagcatacttactaaatcatgtcccctaaacttttatcgaactcaatttagtacatgtcaaaattcgattttttttttttaattaaccttcttttaatgctattgtagaatatatatatatattgtaaggacttttatttctcaagaaaaaatatatatattttttgtttttgaaaatatcaagaaaaaataattgtaatgacttaaataccacattttctattttcaaaaaataaagaaaataccacattttctcattattccttctaggaatatcttactagtcccattttaaaatttacaaaatccaatgacaatcaaatatgttgattgtattagagatacagctgtgatgaatagcaatgtctttgttgttaggttccaattggggtggtgaggtgcatgcattgtatttcctaataaattatcaaacccaatcttttcacaatggagagtacatcttcttgaaggtttcgataagataagacaagacaaaagaaaagaaaagttttt

SEQ ID NO: 17883 - DNA, 7122 bp, Cannabis sativa
agaataaagcattgagtgtgatccaattataaaggaaaggctcttctattgccaaaagacttgctggtagaagaggcagcagaattgacttttcatgcactgtgaattaaaagcgccaaaagtgtttaaaaaggttgtgtgtatcaatttagaaaagccaagccttaattgaatatagaatttataaatatctgaccttggaatgagaacaggtagaaggagaaagcgctattgagcaacccgtaaaggaaaccttgtttgctgggagcccatatctgctgaatcattgaaggaaggcaagtggagatagttgcaccaaagctgagtagcttcagtgttggtgttgtgaacagtctcttccacttgataacaaccgaagtggtgcaccagaagttagccacataatcctcatataaccctctctcgaaaggagccagacgagagagaacctgtataagattgaaaaagaacacatatgaaaagaacaactttggtcaactactaagggaatagttagcatgcattttcaaaggcaaaagtaaaaacgaagatagagacagaacaaaaggcattaataaaaaattgtgaagatgaccaataagtaaggccccaaaaatttatttctaccccaaatgaaagaaggccatcttccaaatcttaaaaggttttattgtttatttttcaacataacataaggccaaaaagttggccataacagaaacatccataatgtcttccaccttctcccagatgcagaatctatgttgaaactacataaatcatatcatatccatctgctgcaaaacattatggcaaggcaatcagcaggccaaacccaagatactatgaaatactgtaacattcttgaccgtagaaccacaacacatggacaatgcaaaaaaatacagtccaatgccagtagcaataagcaagatttgttatctgcaacttagcacacccccttagtagttatgacgcaccaccaaacatatccattccagagaagggtactaaagtcaaaagataaaattatgaatgaaaaataggagtagaatgttcggttcaaaaggattagtggttaaattcatagtttgaaattttacaatagaaccaataaagtgtctacagcctgacaaaaaaaatgtctacaggatctcagcaagcataatactatttgtggattatttatccaatgcaaaccaaaatggtggagagttttagaatttcaaaagcctccatacatgaaagaatatattatttaatgcataaaaaaccaccctacaggccctgcaaatgactatattatcaagtaagttatggcaatgaccagagagtccaattaatcactgaaaattatgtcttccattcattgctcaagtaaattgatgcttacctgcaaaaaggcttccatggaatggatatacggccaccaaataagagaaaatgttccaacgaccacaaagccaagtttaagcacttcaagaagtggatttgaacgctttaaacatttacccaatagatggctgaaaaatgcaggtgcaaaatatgcactcatctgccaagggcaaagattagaagaataaacctcatagtaaagggcttgcttcacaacatattcgggttttagccaatattaatttgtgcattgcttctttttctctaccaaaagctcaatcaccataaattatttagtccggtgattttgtatatacatatttcttaattttgataaatatccatacaggagaactgaacttaatttaaatttgagcaaaatataaatctagtcatctcttaacatacaatagcttaattgaaaaagcacctgcttgtgattgagagcaaggctgaacaagaaacaagcaataagatcactgtttgagagaatagcagccacggcaccaacggtgagtcccaaactgatgcaattgtactgaaaaaatattagttaagaatgagaaacaaattacaaatttcaaagcagcaatgtaatacttgaaatctatacctgaaaatgaccatgatcaattaggataagacatggattaagcaaaaccattgcaatatgccaagcaatctcagttttacgactactttttcgacctgtatgatacacaaacacaaaatacaaaactgaagggaaaaacaccaaagcatctgaagataacactgtccacctcataagaagcttcctgcaaaaaataacatccacccaaaaaataaaaatccagtctttcattaaaaactattaaagaaaaatgaaaattttcttccaacaatgaaaattgaattggaaaaacaatgtaataatgggccagttacaatacaatccccaaataaacaaaacaaaaaatccactatttcctttttaccatttgtttttgaaaaaacattaaaaaaggagaatcttcatagcaaaataatcacaagaactaatgcaacattaagctacggctccttgcttggattactgcaaactttccaatgttgattaacacacacacaataatgggtgagagcacataccctaaataggattcatggccacgagaagtgaaaagggaaacagaatcagggtgaaagaatctgagaaaaaggccatggaagtagctctggtaagcagtgagaggaggatagtcaaggccccaatagcttaaatcattagagctactgttagtgtaccaatccttgataggaagattaagagtgatctccatccaatgcctctgagcttcgaaatccccatacttgggaggatttgctgcacctgaataaggatgaaccgaaacagaaagtctcaccaataacccaaaaacagcaaagcaaaggaaggaagcccagattccgttattgacaatccaccaccagccatcgtcctccacctcttcctcaacaaatttctttgtctttcttctcaattccttttgggctttgaatcacaaacaaccaaaagttcagaaatcggcaaagaacaaagcaatgacgagagagggagaaagagtgtgattacctatcggtgacattgagaagcaacagatctgaatttttctcttccgactgctctgctacaaaaaccccgccaaccggttatactatctatattttttttgtaaggaataaatatatttttaaatggctagtttgatttttttttaatggtatttataaattatttttcgaactttcaaatgtattaaatcatgtatcgaattttttttaggtcattaatttttttttattattgagattattaaatttaaagatttttgtcactttcttcaattttattaatatgatgattattcatgtattaaattatgccttgaacttttaaatctactaaatcgtgtctctcgaattttgatatgtaccaatctttaaacttttatccacatcatacttctgtttctgttctgttgatttaacacaaaatttatttaattctaataatttcaataatttaagaaaaatttgtaatgacttgaaaaatttagggtcatttattatattacatgtcaaaatttagaagtcaaaaatctttattagtctttttaaaactctcattcttattatatttttttagaataattaatatatttgccctttaacttttcacactactaaattgtgcttttatagtatatgtctcgtcaataatgctttttgaaatataacttttagagtaacttattctttccattatattctattcaaatagatgcaaattaaatacttttcacgctttttattttttattagcgtaaaaggggtgaatgaatatttaatttgcattcatttattaactatcatctatcacttcacttatttcatgataaaattaaataaaatgtgatagaatgattatgttgctgtaaaacttatatttttatgagatattattaacaagtcgtaactataaaaggcacaacttaatagtgtaaaaagtttaagaacaaaaatactaattattagtattaattttggataaaaattcatatatacaattgaatataataaaaattgcaaaatagtaatttttaaattcttcttatacattaatttgtatttgtataagcaaaaaaaaaaaaaagaaaaaaatcttcatatactaatacaaaataatatatatacactatatactttatatacttttttaaattgatgtttttaatttttacattctgtttactttttttttcaatcattttattaatttatttttatcatttcacgagtttctattattctctaattaaaattttacttaaattttctcaaaaacatactcattcatatgaaaatgtgaggataatttaagtacaataatcataaaaaaataaatttaaattaaactttatttaaatataaagttaattaatatataagaaaataaaggtatttttcaacttctctaaataatatagcctaaaattaaatataattgaagagtttgccctagggagtgttaaacctaaaggttggagctttgccactgaccacattccttggtttccttactctcacggagctgtgttcgactccacatttttgctctgccgcagattctcttccctactttcctttctctcaacgccatcggtaatgccatcctcaacttctatcatcatctcagtttcaaaacaaagtattttgaaaacagtaatcaattcgtttcgattaggattgtattgtaccaatttacgtacgaaatgattttcaatttatttgtgtagtattgttgccctattgatccttatcgtgtttttattattggttactttgttcagattgaggtgtattgaagtttaggaggctccacttcttcttcatcgagttatggcccgttttggaagtgtaagagctccaatagacatacatatatgtttttgtatgaatatatttttgagttcaaggctgtctttggttttccaggaaaatatgtattttcttagcaaccaaacagagttaatatagctgtaatggactatgattagggctttataatgggttcatgctaattttgtttttttaatttgtaaatactaatttaacagaaaaagaaaaaggggtttgtgaaacccattatgaagaagaatcaggctactgtggatcatatcacaggggataagattccaaagagctttgtttttgctagaggtaaattgcccggtcctctcaggatgcttcaaatggatttgagaaagctcatgcttccttatactgctctcaagcttcgggtaacactcatcactttgtagttttttgtatttctcttcactgttgttctttagtctctttgggaatagatttgaaatgcatctgaatacttactaagatagtgaaatagaaagcctcctatttttgctattaacaagtatgattctgaggtattattataaatatggaatttcttctattgctgtgaatattcaaattgatgtacttttaagagttgagtgaatatttgacaaaatgtctggaaggaaaaattaatatatttgatgttgggttactttcatactaatgaggattagtcataaacttgtacttaatgaacttgccatccccaacagatgaagaccctccgttttacccgcttcttctcagtccaccaatatattgttttgcaacattagattattaaatgaatgtgttttaaaaaattatagtaaattctgtttcaaaaaacaaaacaaaacaaaaaagtatgttatgtcatctattagttgctgtgagtcttgttattctcatttttcttcactcctagtaatatttgatttgactgagatcaactaaatgaaagactctacagagaaaaataagaatagtaagagcaataaataaaatcaaattaagaattaagtttagaatatgcaaaaaaaaaaagtgactcggatgttatagtttagctatggcaaagagatatttggtcatactataacctcaactggcataaagaggctttgttatttttcctaggattttaatttagcttactttgtcccctttttcgtttggcaggagaagaaaaggaataatctcaaggactttctaaatgttgctgggccaatgggtgttacacatttcctcatattgtcaaaaactccatctgcaccttacttgagggttgcaagaaccccacaaggcccaactcttacatttaagatacaagaatactctttggcagttgatgttgctaaatctcaattgcggcctagatgtccacacgatctattcaccaacccccctttggtaatcttatgtttctgagtgtgcaatcatactagcttgtcattttgattttgttttcgctttctagactttttgttatactgtttgtgattacttctcctctgcagattgttctttctggttttggcactggagaacaacatctaaaacttacaactattatgtttcagaacatctttccagctattgatattaacactgtgagttctctgagtttacgagtcaaattggacccaagtttattttgccgttatttttttgatctaaaagagtttctggaaacttatatggttttcatgataatgtttcaggtaaaacttgcttcctgccagagaattgtgttgctcaattacaacaaagatactaaactcgttgactttcggcattattccattaggttgcagccagttggtgtctcccgtagaattagaaaatttgtgcagaaccatcaagtccctgatcttagaaatcttcaagatgttagtgactttattacaaagtaaggattctggattttgttttttcaaatgcgtacttagaaaagtaaatttcacttgcagaatggaagcatgttccaaaagcaaaccacttcatatatgcttattagaacattctctttcgaatgaataataaacaagtcttgtcttgtctttttcttgatatctgaagggccggttatggatcagaaagtgaaggagatgatgaagcagccacagtaactctggctagtgatattagcagggttaatcgagcttctactaaaagtgccatcaagcttcaagagattggaccgagaatgactcttcaactcatgaagatcgaggaaggattgtgttctggaggaactatcttcagtgaattcggtatatt

SEQ ID NO: 17884 - DNA, 2912 bp, Cannabis sativa
aaatggtatttacccttaattaaacaagcaattttacaactcaaacaagaccaaacaacaaactaccctctacttacacaagcgattttacaacaattattaactatatttaattattccgttatttgtttccctttctctgtttgtatatatatatcatgcttttgctctgtaatgaagtgaattcattttcccattcaaactctctctctctctctctctctctctctctaacactattgaagtgagacgtttcctttttacaaagttcaatctcaccttaatactttcctttacaacttagctatacattgtggagtaagacataatcattcaaaaatacataaattcctattcaatttgtcataagcctttttggcctcctcgtattcacctactgaatcaattcatcaaaggtacaagacaaaagatgactatctttaacacaacattttcatgattaaggaaggacaggataagaacaaatgtgcatgatctttctaagtcaatctcgcaaactggacacatagcaggaaaagagcagtttgcatttatataaaagaaaattagaaatatgtaaaaatgtaaatttttttgttattttgaatattgtgaaataatccctaatattttactatattttcgtttctgtaacagatatctgcattataactatctggaaggcagtataccatcaacactaggaaaactgagttctctccaagatttgtaattacaccaattaaaaccccaatcacttaattaattatatatcttcttcatacgtaatggctaccttcaaatcaatttcaattaattagttcttcctttatatggttttgaaaggtatttggacttcaatatgctatcagggtcgatacccgatgaattcggatccctctacaacctttcaaagttgtaagtttttaattattaatttctcacacgtataattcattcatatgaattaatgccttatttcttgattcaaggcagctggcagaaaatagactatctggtagtcttcctacaacattggcaaatttgatcaatcttatatcgttgtaagttatttatgagtgagaacacaaaacacactcacacattacatctgctgtgttagatctagctagatagaaatcgatcatgactctcactctcaactctatatgtgttgttgtagttggacaccatccaattattttactgggaaaataccagccacatacacgaatttaacaaatcttcgctggttgtaagtactactattattttcaagatttgacaaatataaattaatttgttcttgacaaaaaaatgatcaatgcagtgaagtttctgggaatgagttatcaggtccgttgcctaacgtaaagaactggtcaaagatcgaatctatgtaagtttattgaatataaattgtccatgaaatatgatgtaataaaacagagcacttcagagtatcatatagttgttgtaatattgggaaagtattatttttactaattcataacttagaagttaaatcttattttgatggatttaatgtattataaaataatctaattcattagtaaatatactgcaattttaaagaacagtgttgagcaccccttatcacaacaatttaattacattttaaataatattcgtactatatctctaataattattaagtttgcaaaatatgcttctttagctctgtacagggaaataattttgaaggggaagttccggcagagtacttcaatttgtcaagtcttcagtatctgtgagtacaccgtgcctttcacttggtttaattttctccatatagttgttttaacgggtccattttgtttatctctattttattttgctttgtataatactgcagattcataagtgaccttcataatagccatccattcaaattgccacattctgcaaatgtttccaacttatatacactgtgagtaacaacatttcaagttttcaaggcttgttaattagttaagccttcaatataaacttgttggaactttttaattttttatgtaaaaatgaagatttttggtttttttttcattaagtccttgcattgcattaaattatttctttagatatgtacgagaggtgactaaggttgttctctctaaataattaggggaaattacactctatactctttttatattgttctcttttatttttacccactttttaaaagtttattatttttacctcttttttcaaatattgtaccaaatttacccctatcacttcaagatactcttcatgtgactctcttatgtaagggtattttgggtacaatatatataaaaagagatatgtttcaattaaatataaaattagaggtaaatttgatcaattaattaataaaagtggtatttttcaacttaccccaaataattaagtatcgatttgtggagagcatggaggagaagattatagggcccgcgtaatgggcccaagaagttttatggtaacttcgtaatatttatatacaaaaacagtatattatttataggaccctaaggtcatttagttagggtaataaaatgaataaaaaataattaatgttcattctactcttttatttaattatatttcaaaataaattttctatgattttgatggaataactcttttattttaaaatgtatgaacgatcattccaaagcaaaattatttagttattatttttattttaataattttttttatcaattttttaatgcatttaaaatttaatttcattctattctattcttaatattattcatatttctattcctattattatttatatatttttatttattttaatcaaacgtgacttaagtataaactgaagatactctgtactaattgaaaattgagattaagattggctaagattttaaaagtta

SEQ ID NO: 17885 - DNA, 2482 bp, Cannabis sativa
ttatatttcaattataaccggttttagttattttgtattatttgtttttattcattatgttatagaactggttctatttttgtttatagccgagacatctacttttggtgacttttccagcaacagtgattttccattaactttttcggtgatttttttgacgacactaattttttcggtgactttttcggtaaaatttattattgttttaaaaatatgagttttttttttctttcaaaaatatggcataaaaaagtacatataaatataaaaaaatcaaaaaacccatatattatttataccataaaaaaataaagttttataattttttcatatattgtgtaatttttaatttcgagattatgttgtttctatttttataaattgccattaaaataatgtactcttataatttttttttgtatattgtttcatttttactttcgaaattatgttagtttctatttttataaattaatgaataaaaagtttataaaagtataagtgaataaaaagtataaatgggaaaaaaaaaatgtaacataaatatcaaaatataacctattcaagaatttaacacatcccttcgaaaaagaaaagctatactcaaaaactgttatacctccaacatttatgggagattctctttttatcaattaaacctccctaacaaaaaacaattgtagttaccaaaaaaaaaaacaacccttatttcatttttattctcttctatatttcttctctagccgcctccaaaatttttactcactaccaataaccatttccggccattcactacactgctcgcctctattgtcgccgccggtcaaagatctacttcaggtttctctattgtttttgtgtttttcttttaattatgttttatttgcttgattgtcattattgtttattgtctctttttcttgaatgtttttatgataatcttgtgttgtgtgttttttcttttcttatttggactttaatttagctttatggctttattttttgttgttaaagtaacttatcaatgctgaatagcgtctgcaaatccatagaaatgcttaatttatagccattgcacaggaatagaaacccacctttagaggattgaacagtaattgaaatgtggcaatagtttatgttcattggtagaaactgaaatttaggtcttcttaccaaccacattttcactgttattatgggcctgtaaataatcacatgaacatcattagttttagagtaaatttaggaccaaatgctacctgattaaatgcatgttgaaagagcctatttgggaagtcacagacatggacttttttttccctcttttatatatatgtaagagatattagtgaagtgatggagtatcgaaagtactataagtgtgatacacatcaaataaaataaagttcatacattaggtgtcttattgttgaagtgtggtgctttatgaaattgactatatcatggtttttccatctttatttgaccttagctatataattaacattattgctgaatacatgtatgtgcactagtaaactagagtacatgtaaatattgccaaataccattatgaaataaaaatattgttacatgaatttatatttacatttacaaaattcttttttgtagagataccaatgctgtgaagttttgcatttgaagaattcgatcaaatttagagcaaacgttagataggattatcatgagcactactgctacaggagagcatgaaactttatttgagcaactcaagagtactgatgagtcagtgacgcctgataaattttctgacgagagaaataacaagagatcaattaaacgacttgagaaacaaataaaaaaaatgaaaagaaaaaatcaaacgaaggaacaagaatttgtaaaattacttgaagtaattgttcgtcttgttgaggtcgtggagtttggaagtagaagtaatgacatatctaatgtggatagggaaactccaaattctagtataccagatgttattaaagtgttaaattccttacctggaattgagattgggagcaatttatatttctttgcaactcgcttgtttatagtgaaagaaaaaagagagatatttctttcacttgaaaatcccaatctcaagcttgactggctcaagtatgagcaaaagatgtttatttcatcaaattaaaaaatcatgaactcaactcaagcttaattggctaagtatgaacatcatgttacagctttacgtctaccgctctagtataagtatgatgcttaaatttatagtatttgttttaaaaccttgtgttatgactatttaatgtatgttttccatattattatgagtacttatagtatttgttttatcaacttcgtgttatattgctatggctctttagtacatggtttgttatatcattacgagtatttgcgtttataattttgtattctttcatatatgggtggttgtatatgtgtcttgatagaaattaat

SEQ ID NO: 17886 - DNA, 10974 bp, Cannabis sativa
  modified_base (10651)..(10653): a, c, t, g, unknown or other
  modified_base (10922)..(10929): a, c, t, g, unknown or other
agagagagagagagaggtagaggagacaaaaatggtgaaagagagagtggttaattaattttagtttttttttttacatgaatttttttttttattagtgtttttgttttttgaaaatattttattagttaaggtacatgatgtggcaatgtttattgtaaatggtgggagtgatgatgcatttatttttaatgacatggcacgccacttggcatattatatggcaaaaaacggagaggtacctacggaagttccacactagtgacggaagatatttttaccaccaaaaatacgacttaagtaattatctgctactcggagtaaaacttaagtatttatgccgcaaattactctttattgaatagccaaatggcttttattaaaagtaagaaactaacaactatacctaaatataagataacaaactgtgactaagttacatataatttttacaagaaacttaaatgttggtttaaataaaccattagtcaaaatatctactgatcttcaaatttcacaaatgagatacaaataacttccatttctaagttttcttttatgaagtatcgatcaacctctatatgcttggttctatcgtgttgcattgggttatgtacaatacttatagcaaccttattatcacaaataacttcataggtagactaacttcaagcttcagctcatgtagaacccgtcttatccacaggatctcacacaccccattgtcatagtcctgtactcggcctcagcactacttgcaaccacatttcactttttgcttctccaagtcaccaaatttctccatacatatgcaatacccagaggtagattttctatcagtaatcaagccggtccaatttgcattagtaaatgctgcaacatttctattgtcaacctttttaaaaagaagacctttacctggactactctataaatacctcaaaattcgataagcagctttaagatgttctttataaggacagtgcataaattgactcaccatacttaccgcaaacacaatgtcaagatgagtgtgacacaaatagataagcctccaactaaccgttggtattgttgcacatccactaatgttccgtgttgaatgtcactcagtttcttgttcgaatcaataggagtatccattagacaacactcactcattcctgcatccttcagaagatcaagaatgtattttccttgggagatggcaatcccttttttcgaccttgcaacctccatagctcaaaaatgcttcatttcacctagatctttgagcttattttcattgcctctaattcttctagatcatctcctgtaagtatattatcaacataaacaattaaagttgcaatctttccattagttgagtgttgagtgaatattatataatcagcttgtgcttgtatattgtcttgtttcttcaccacttgagtgaaacctttcaaacaaagttcgcagtgattgcttcaagccataaatagccttttccaacctacacactttatttacaaacttataaagccaggtggagggagcattctccacatcaaattgcctcaaaggccattctaaattagctcaatagacaacaagatccgaacaatattaagtttggctactggagcaaaggtctcaatgtaattaatattgtaggtttgtgtaaaccccttcgcaaccatccgagctttgaacctctctaaagtgtcatctccattaaatttgggcataaaaacccacttacagccaattatcgaagcacctttgggtagcttttcaacttttcatgtgtgatttttctccaaagcactcatttactcaagaacaagacttcttccactctagaacatttagagcttcctgtatagtatttggaatctggacatttgatattgtcaaaaatggtgaatgaattacgtattttattcaataaaatagtatgtatttaaatacaaaattagaaagtaaataggaaactaactaaatataattaatatagctaatatattataacactccccctcaagctggagcataaatgttaatcatgttcagcttattacaaatataatcaacctacaccccattcaaagcattttgtaaaaatatctcctaattgttctacagtcttcacatatcctatggagttcagaccttgttgaatttttaatgaacaaaatgataatcaatctcgatatatttagttcgctcgtggaacacaagatttgaggcaatatgaagagcagtttgattatcacaccaaaattttactagaactgacattttaaacccgaatgcagccaaaagctgataaatccatactatctcacacacaaactgtactatagccttatattctgattccgcattagatctggacacaacattttgcttcttactcttccaagagaccaaattacctccgacaaagacacaataacctgaagtggatcttctatccaccttggtactagcccaatctgcatctgagaaacactcgtctgagtgatccttttaagtaacacaaaatttgctctagggctgcccaatgatgaattgttagagaagacataaactagctaacaacactaactgagaatgcaatatctggacgagtcacaattagataatttagctttccaactaatctgcgatacttctcaaggtcttcaaatggttctccatcactcattagatgcatagcaggattcattcgagcactacaaggttttgctcccaattttttcttgtcccgttaacaaatcaagtacatacttctttgagatagaaaaataccttgtctactctgaggaacttcaactttcaagaaatacctgagcacccccaaatgcttcgtgtgaaactgggtatgaaggaatgatacctctagtatcatctccagtaataacaatatcatccacatacacaaccaacaaaataataccggcagttgatcttttataaaacacagaataatctaacttacttttcaacaaaccaaatttcttaacagttaaatttaccaaactaagcacgaggactttgtttcaaaaaatatagacttgcgacgacgacaaactttccctaactcctcctgagcaacaaacctaggaagttgctccatatactcttctttctcaagatctctatgaagaaaaacatttttaatatcaagttgatgcaaaagccaatgatgaatagctatcatagaaatgaacagtcgaacaaatgtcagttcagcaacaggagaaaaagtatcataatagtccactccatatgtttgaggataacccttggcaataagacgggtctttaagcgagcaattatttcaattggattgactttaaccgtaaactcctatttgccccttatggcccgtttttctaaaagtaaattaaccaagtcccaagtaccattcgcaactaaagcattatctcttctattattgcaggatcgaccttgagatgagacgaatgaggtggccgccttaagctccttaccgctcaggcccccattttgaaaaaagttaaaataaagttagtaataaaataaaaatattactcataatactaaatatatgttgcagcttagtggtaatttgattatagtaataattaagaggttcagagttcaaatcccaacaacctcactttttcacttgggccccaatttttatttttgcctaaagagggtcgaccctaatcattgcaacaagtcaaccaggatgagacatgacttcacgaatattttaaaaacagtaaaagaagcaataaaaggacaagaagaaaaggataaatgattataacaaacaaaagaagaaataggataagtacatttgcatttacctttacgtagtacaatgggaagatcatcgttagggttcggatccgatgacaaagaagcaggtgcaggacatgaaataggaggcaaaagaggcggaggagtaggcatgtcaagagttgtgaccaagtcgagagactcgtcaaaacatgtgtcagacgcagaagatgtgatggaatataccaacaaattgtcatcctcccctgatgagtaggagtatgtgaagatgaaaaataaggtgtatttattttccacaaaagtaaaacattgaaagaaacaagatatttgttaagatcgggacaatagcacatataccatttttgaacacaagaataaccaaggaatacacacttcaatgacttacgatctaatttaattacctgtagacgaacgtcacgaacaaagcaagtgctacaaaaaattcttggcttgataggaaatagtatcttattgggaaaaagaatattgtaaagaatttctccatgaagaacagaagatggcgtgcgattaatcaaaaaaacatgcagtagaaacagcatcgcccaaaaacagtttaggaacatgcatttgaaataagagttctaactgtttaagcatatatctatttttttgttcggctacactattttgaaatggagtatcaacacaagtttcataaagcatgtcgttttgaaccatataagattgaaataaactagatttgtactatttggcattatcacttctcaaagtacgaatagacacattaaattgatttcaaatttcagcacaaaagacacgaaaaatagagaacaatacagaacgattcttcatcaaaaacaaccaagtgacatgagaataatcatttataaaagtaacaaaataacgaaaaccaagtttagacaagataagaggaccccaaacatcaggatgggctaatttaaaaggaacactagcacgtttattgactctaggacttaaactaaggtgatgatgtttagcaaactgacatgattcacaatctaacgaagaaaacttataatattgtggacaaaattttttaagcagaggaaaaaatgggtgaccaaacctacaatgtgccttgaagggagattgtacaccaaaacaagcaactgatttaagtattagtgtatcaagaatgtagaggtcttcagattcatgccctttaccaatatttgcttcgtcataagatcttgaaatcagcaatgatcagtaaaaaaaaaaaagagatacaacagttaagatcacaagtaagttgactgacagatcaaattaaaagaaaaattaagtaaatgtaggacagacgccaaaggaaacattggagtaggagtaattgtactagacccaataacacaagatggtgacccattgactaaggtaacagtagaagtgggagcgtgaggttgaagattagaaaagaatctagaattaccggtcatatggtctatagcaccagagtcaataacccatttggaagacgagaaaagaagacacgaatttgatttacctaaatcaacaatagtagtgatagaagaaagtgaatacttaagagactcttgatactgtaagaatttgacatattcaactgcagaaacaaaaattggtcttccagaagtcattacaaatattatgtttgtcccaccaaactaactaaaacagcaaaccaacaaaccaacagacccgataaaggagcaaacgaaatgagacaacaagctggcaatcaaaatctcacaactaatataggagaacccaaaccaaaccacaaacggagaagagcaccggagataaaagataaagattgacactaaaggatgacgaataatcctcaacaatcacaaaagaagaaaacaatggtcgaaatagatgcaccaaaaggtcaaaaacactgaaaaatggaatcggcagagaaacacctaggaaaagacacctcacacgtgggtgttgtcgctgaagcttcaggcagcgcgtgtggctcacgcgcgacaattccagccaccaaactttgaggttctgcagaacggtggctgggttgtccgttggtgccagcaatgagagctcacgtgctctctaaatgtgttttttgaaaaatgaaccttaaaatagatgaagaacaaaccctaattgcaaatcttaattttaggataaatagggagtgatgtgtagttatcagccatttagaaggaatcatcaaccatttagaaggataagaagaagacgaaaaaggaagaaagaaatgggaaaaaaaaagtcgatcagaatagtatcggctctgatactatctaattttggtgaataataattcttattattcattgaatagccaaatggctttttataaattacaatcggtaataaatcaaaataaataagtctaaaaaataagaaacgaactaacaattattcctattttcaaaaaaaaaaaaaaaaactaacaattattcctaaatataagataactaagactttacaagtcattttgcaattatgtttgctaaaatgcctcagagaaagttagaatgtttgagtattttctagggtgtcttacatttgttctattgctaagagttgggatctatatggggcttggacaagggaacatgtagttctagttgtatccaaaaaaaaaaatactttcttctcattctttttctgtgtgttctcaacgatagccattggtgaaatgtacaaattattacatgatcaactgaaacagctttctatgaaaaactgaaatagctaattctgtcgtagctaattatcgaatattgtccttcctagttgaatataaattgtacatttcttctagtattatttgccttttgtctaatgacaatgagggagcttgtcaaaaaattaccgacaaaaaagttggagtgcaccacttttggtatcataggtaatagatatggcttctaagcatcagtgaaagattaaatcagttcattaatggctaacttggtcattaatagttgtcatgcggaatccaaacagagagaaagaaagaattaattattttttaatgaatcaagaaacaaaagaattaccaagctctgtatttatacacaagattagtaactaaattcaataactaattgttactaaaccagaaacttatctaactgactcaaatcaagttgcctaactgactaaactaactctaactttagaataaccagtttgatagtcatggtgccattaagatggattatatggtaacaaacctttacagatttcagaccaccttgaagagcctgtaatggggacaatgggctgttatgtttttgaatttctggtcctctacttcgttttacattgctcttgctatttgtggctgtattagttgtagtagttttctgtttctagtcagattttgcttgtttcttatacataatttcatctataccaactgtgtaatgaataatattgatcaatctatattctatgtttagctgctatatctaaaaaaaattcttgtgaattcggtggggatgcataagaaatttacaggaatgtctatgagttttatcgaggacagaagtctttttcaatccaaaatgttctagttgcttgttcatttgatataaaaattacatatgtatttacctaggtgagaaggtaatgcttttgattcaagaggttctaaataatgtataatgttataactagagagttccataaactaattgttcctcaaagtaatatcttgtcagtaaatagtatagtgcaaaaaatccaccagaaaatgcaagaggctcgttgcgcaattcaattgaaatagcatttagcatattgaagaaaaaatttccaatattgactagtggagttcgagccatataatgtataagttgatctagtgttggcagaatgtattttgtaaaactatctcatgggtaacgatcctgatgaaggtcttattacaaaaattgatagacaacttaatcaagcaagcaggcaaccaaccaatttttattacatcaaatttaaccctttgtttggtaactaggataaagaattgattatgtaggaggtatggaaaagtatggaggatagatttgatagttctttaggtttgtttggtacaacaggaaggaaagaaagaattagtattttttattatttaaaataaaataaaaagaaaattagcataaaattattttaaaaaaaaaaattctcaatttttttcatctaccaccaacatgtgggaggatcatttttggtgggcccaggtgatttgaaatccatagcaatttccatcctcaactaatgaatgtagagaggaagaaatgttgagttagcatataactatgattatgtggagatattataatttaaatacttaatgatgtaacttttaaatcatattctagtgtaaattatgtattttgtgatatacatgttctcatatagatagaaattgccaaagagagtgaatagatattaataatatgttaattttaactaattataagaaaggatttaacattaatatgaaatggaaggataaaaagagaaattattttctttcccattaagaaccaaacaagataaaaaaattaaaaggaaaccatttttttcatacaatttttcttttctttaccaaacatgagaaagtaaattttttttcctttaccacaccttcttctttctctatcttttccttccctttttatttcactaccaaattccaagttccaaacacagggaaatttttcaatgaaactagtacactcgatggagataccaaagtcaatcttagaaagtatatcactgagtgcatatatattgatggtgatagaagaatgaacccatgttttggatcagttgacttattaacaacagcaagtaaagctatcagattcaaaatacttttcttaagcaaatgctagtgaattcaatgagacgatgaatatactttacatccacagcaagtaaagttaaattttcatttagcatatagattcaaaactatatgaaaacatgaaactagcaattttttgaagggtgcaaaatattgcagagccttcactctcattaaacatattgggtacccaaacatattagatatgtttaaaaatgaattgactttaaatcattgcccttaaactaaaaacaaaacatgaaaaaaataagcagagaaagaaacttcatagctgtccaacattgtatgcatttagtgaaattaaagtctgtgaaagataggacaagagatagtatcattcattgacatgataacacatatccttaaatcaaaaaattaagaaacacatttataagaataatgacatcttataaagaataagaatgaactcacaaggttcttaattcagtaaggccctaatttcaccttcaagtctccctctgagtcccattgttgacaatcccctgaaaatatgagcagatcatgatatagaagacatataatgaagtgatcgattgatcaatcatactaatggtcttgtaaacttactttattttctaaaggatattagaaacaacactgagcactcacaatgcagtcaatcttgggtttttagagctcacaccttccaaaggaactccccagatatcttcaaattctgtccagcttggaggcatattttgtttgaaggtatttcaccatgaagatatattagcttcctgacattagattgaaaagaaaacatactaaagtcatttcaccataaaccacactgtctcagagattattaaagctcttcataatatgtttgggatgcttattctatgaaaaaagggtaaacataacctttcagacttagtccacttagcaagtctctcaagcatggagtaaacaatttcttcattcgcaatgacatcatttcttatcaacagcaagaaaagactactaattaaaccctaacctttttttcaaaaaaaaaaaaaagaagaagaaagaatatatattggaaaaacacaaacaataaatatatatgtacatttagcctattaattcactcaattgaacctaaactataaacacaacgcaaatcaatgaaaaaataaaaataaacagatgatcaagcaaaaaaaaataataaacagatgtaaatgaaattggagtataaaatcagattatttttgaaaataataaccactggagagccgaaatctgaacctttccttctcgataggtaagggctgagctccttgtgtgttaaacatcatcgtctaggatttgaaccaaataatactatattgatctgaatatgtatttaaatttgtaaactaggaattatgatttccactaaataatcaaaggaagacaatgaagtaacttggtccaggggtggtcgaaatgtttggatttgtagggaatgataacctctggtagatcaaattattggtatcaaaaaaaaaaaaatattaaattgtcgttgaaataatatataaatactaaaaattaatttataatttattttaaaaggttaaatactataaatagtgtattcttagaagattataatatttttgtaatctccaacaataacttcacgttagtgctttcacttattttattattatcttttttttatttaataaaaattctataaaatatgatttaaagttttttatattaaaatacttttaaaaatataattaatctattattatttatatttttggagtattttattaatcctaacaagtagtataggaccacattttttaaattaattaaagatttgaattcataaaatttgaagatttgtaagattaagatttttttatcttcatatttatatatattcgaattgtaagttttagcatatgtggtttatatatatatatatatannnatatatatatttatatatattagatagatgttacgtgccaagtcacgtatgttaattttattttagtttagtttttaattttttttaatatcataattttaaaattaataatatttaatgtagtgataatcattgaaatttgaaaacataatagtgatttaaatgaaaatacaaattactattatactttgtaatagtaattaaaaaaaaattattatacatctaaagttatcttcggaattaatgaaaatgctatctggttaaactannnnnnnnttcaaatttaatttaaaataatatttaaaatttaactaattctaa

SEQ ID NO: 17887 - DNA, 4144 bp, Cannabis sativa
taataataatccgatctaaaagtgttatgacaaaactgtttatattttctgtatttattcgtttgaggagtcattttcaaattggtcatattaaaaaaagttgtaaaaaattaaatttatgtcttatttttattattttagaaaatataatgtcaattttatcaattagcaaaacaaagattgtaatggataaatgttgcaaaacacaatatttatttatcctttaaaaaaggttataaattatctattaaaatggatatttaggaggccaatccggcgattgggccagaatttaagcaatctgtgaagattgagctaagtcgacgacggtactaatgacagctcactttgtcaaatatctttaattattaataatttaaataaaaataaaaaccaataaattttggtccaccatataaatactccaacttgaatcaacccacttctatttttccgcctttaacaacaaaattccctcgcattttctgtttggcaagatagaaagaaaatgtcggaaactcaaagaaacgatgagaaaatgtccaaacacaagcgagatagaaacttactcgctttcactggaggagctgctctccttgctctagcagtcaatctcggtattgccgctttcaactctcataagcaaaggaaaaagaagaaaggtttgtcttcttctccctgaactatttttcttttgtagtctgagaaaaatgctcttatgtacatctctttcttcaattttagatcttcctggctccagttttcgtgttaatttatcggcgtctgagattctcaaattggcggatcgaatcattgctaagtcaaaggaggttcacgatttcgtggcctcggttgctcttgagaaggtattgatttgactttatgtgaagatcagtgattataatgtgtataaagtaatgttcttacagccgtggttttgaatgatttatgttcattttctatttatgtcttaactgttcggtttgttattttaaaataatgtatataaaagtgtacaaaatggtctattttataatacgtttcatgtatgctaaacttactatagctcattataaagtaactataatgacgatataattaagtggtaaaagaaaaaaaaatggtttagattaagttgttccatttttgcaggtcacatatacgaatgtgatatcgcctcttgcagaattagaagcgcaacagtttccgttggtccaatcttgtgttcttcccaagttattatctttaaccgatgatatttgcaaagctagtgctgaagcagagcggagaatagatgcccatgtcctcacgtgcaggtttcattatttactatttcttgtttttgtgaatctatgtttttgttgctctttattccatctttttacatgtaaaatgttagtagggtgagtgataattttgaagagcattgctagtataaggcgcttaggatgcccaacaatattaggacatggcatatcctcaatttagtagcgggttccatgtatattaaatgtaaatttaaatatgcgggaacgaatacgaataattcaactgactgcactagggtgctctttaacatttctcaattttgaatggtacgtaggcaaaatgtgttggagtgcgtgacctgaagaagaaaaagtttctttgttggtaaaaacctgggtggtgatagaatcacagaggttgagcatataccatatacattatttatcttccagtcagatagtttgttatagtagaattagattttcttaaatgtgcaatgttcaatcttctgttgcttttaatgtaattcatttgacttttgagtttacgcttttcacatggatgataagcgaagtgacttgaaattttgcagttacttagttaagcactaaataatgtgctattttgttcaatatggtcagaaaacgtgaagatgtatatcgtgtagtcagagcttttgtgtccaagggagaatggataaatgctgaagcaaagcgctataccctttgcctggtaagaaaattcttatcatacttgtttccactagtatgtttttttttttttcctggttaaatgatttcggttgcttaataaatgctacttgttttttctttttaaaaaatattacttgttttctgggagccttgaagctagctaactacccatgtatgattgttgtgatcccaccctttattaaaatagttaacttcatgcttatgaaatttccattgtttgattatgtcttcttacagtcttcattgttaggaagataagaaaaaccgatgttgattattttctaatcagtgacaggtgaaagactttgaacgtaatgggttgaatcttacttcaaccaaaagagaggaaatgcagcggttgaggacacagatcgatgatcttagcttccaatatattcaaaatctgaatgatgacaattcctttctttcctttagtgagaccgagcttgctggtttaccaccagaatttcttaaggtacatttatgtctccttatcattatcaacattcctttcgtgtgagtatgaaactcttccaaattttggagcaaaaactgtctttactttccctctattgctgcgtgattggattaaacatgtaggtgtcttttgtctcttgtttctgatggatattttcagtcatgttaatgttatatatttcatactctcgttgcatattatgaatggatgtttgataggttgatgacaagttgttacctacttgacttaggctacatataattaagctctaaatattgcaaccaaaaaaaaaaaaaactgaagaagaagatttctgtaacttcggaaattctgcatatccatcttaatggaaagtgtgcccaatgtcatcaccaatgtagaccagtttcaaaatttaaacgatattgcttgaagccttatatttaattttttcagagggtctttacagcctttacctgtactgatgaaattttactgtacagaccttaaacaaagctggaaatggtaaattcaaggtatctctgagaaatcatcatgttgcagctgtattggaactttgtaaggtattatactctaaatctgttacctactaccattttgtgttgggaatttggaaattccaccaatggtttctttgtacttggcttcgctgaatgttatcttactgtcaactacattgtttaataagtaaagcagttattaatgtacttcacaatgtttatttcgagtgtttttaaggtgggaaaaacaagaaatatgatagcagtggcatatggaaaaaggtgcggggacatcaatcttcctgtcttagaagatctggtaagccttctgccttttcttattttcccagaaaagtattcaattaggtgaagtttgagttcagtatatatttgcagttctttcttttatagtatttcacttttcaaatggttatacaagatgtcagtgtttctcaacttcaaacaaatgaataagtttaggttgcgaatgaattagtgttcagcattccaaagatagaagtgtaaccaactacttggaatttgggattttatagcagagttgatgttccttactttctgtcaagtttgaaatttaaaaagttgttttgagaaaattgcaatattctaattggtaggatcagtgctactttttttccgagtaaaatggcttccaggtcaattctatccctgacatatctatggaaatttatcgacaagtatcattatttacttttcaatttgacttcatttccactttcatttctggttaattttaaaaatcaataagaattaattatttctgtccaggttcaactacgccataagtttgctcgaatacttggttattcgaactttgctgactatgctgttgatcttcgaatggcaaagacaccatcaaaggtttgttttgttatgtcaagtagaatggtattctcataaagtgagataattctagaggaaagtccctctgcttcctactgttctcagccttctttagtgtcaggggcgagaggtgtatgggtggttcattgcactgctgatagattttgtgatgtgttttccttcaggtatttgaattcttagaggacatttcaagtagtttgacagatttggcctctaaagaacttcagatgttgaaggacttaaaggttcgtttggtttat

SEQ ID NO: 17888 - DNA, 5300 bp, Cannabis sativa
cttgttgttgctcgatagtggaggggttctggtgtagtgttaggattgtgatagggtgatctttatgaacactatctagaaagaaagtatcaatgttgggattacgagtactagtttgtaaaggataaattgattcatagaaaactacatcccttgattggaagatgtggttgtttgtatatcaagaagtgtgtaagctttcatatggtcaggatatcctatgaaaatgcaagctttagctcgaggagcaaatttgtgtggattgttaacatgggaagcatatgataaacacctaaaatttttgaggtgagcatactggggtaatttttgatgcattaattcataagaggttttatcttgtaagagaataaagggcgttctatagagcaaatagacatcagttttgatcatgtaactctaataggataagggtaaattggattaaaatgctaaagctcgacccacatttaatatgtgttggtattttctctccactacattattttgttggggtctttctacacatgatcagttgtagttaattacactattttgagcatagaagctagtaagggttaattcttttgcattatttgttctaacagatttgatgttgcttttgtagtgaacatttacaaaagtaaagaaattttgaatgatggttgaagcatctgattttgcccaaagtaagttaaccatgtgtacctagagtggtcatccacaatggttagaaaatatttttatcctttaatggaaggtaagtgatatggtcctcaaaagtctaaatgaactagatcgaaaattactttggagaaattataatgagacacaaaaggtaatttctttttctttgaaagatggcaagtgggacaattgtgaatactatgattatcaggagaaaaattcagttatttattgattttgtttgtaataagtacagaaggatgaccaaggcgtgtatatcattggtgtttagtcgattataccttacaaaaaactaaattaaatgcttgaacatgtgaagatcctgctaaatatagtagagtttgccaaaccttttagttgtcccaatcttcaatctctgagaaggatcctgaatgtagcaagtgttagatgtgaataatacattattggtgttgtcatctattagaatgctaactaatagtaagtttaatttgaattaaggcagagataaaatattataaagtgttatagcagagtttagtatgacagtgcctaagagttcaatttgaactgttgtagcatttggtaatgtgacagatttatttgtaatggatttgtgtattgagaaaaaacatctaatattgcaaaaaaatgtggtgagtatcaccactatctataatctaagaagtaggagataaagggtcaaggatacccgaaaaattattaatggttggaccatctaatgtggaagcatcatgaccaggctgtagttgttgactgatcatggagatcaattgctgacattgagcaggagttaattgaggagtgttttgatcacttggtggaataaagacttgcaaagtttgtgggacattgcgagatgtggatccagtctctggtttttgattgttcaaagcaaaagactcatttgatcttggtttgccataaccaggtaggaagttgtgaagaaagtagcatttatccttataatgacctgacgtttagtagtgagtacaataaggacgatgccttttatttcttgaagtttgattagctatgggattgacatcaaggatagtaggtgttgtagcaacaacaagtggaggtgtaatgcgatttcccaaagttctttatgtttcttggtgaataaacattgaaaaaactttgttaaggggaggacaaggatagataagcaagatttgatcacgaatggcgtgataagatttgttcaatcctttgagaaactacaaaacttgatcatgattaaggtgatcttgattttgagttgctgcagcacgagtgcaattaatccaaggcccgagttgattaatctcgtcccacattgttgttaatttggtaaagtatgcactcacaaattcatcaccttgatgagggtaggtcaagattttattgagttcaaagattcttagaccatttccttgattgaatctattgttgagcactgtccacatctcagcagcagtgccaagatacagtatgctacttttgatttcaggagacatagaatgaagaatccatgacataaccatttggttgcaccttgtccaagaactgtgaagagaatcagtagggattggtaggagttttattttgcgtgccaatggagagtttaagtctcatttctatggctaagaattacaatcggtgagaagtagtgttgcgagtgtcaggccaggatgctctgcgctgcagagatagtatggagatctaatgtcttcatacgtagggcgatcgatttattctgatcgtgaaactggaacaaatggttcacttcgaggcagagtgtcggggaaattatgagatggtggtggagcaatagaagcatcgaccactggatgatctaaatcagtggtggtagctgaagtgattgctcgagtgcacaccattattgaattcttgatgaagcttcaattgaattcttgaagtgctatgttatttctgctgatgccatattaattagaaaaatagagaaaaaacttattttcattattatcattaaaatgattcaattcgcaatggcaaggaactaatccttatataaagaaagattacattacaattaacaaacaaacttgtaatagaaaataacaaatataacgatctttaatatataatatttgtatgtttaatactaataaattagattttcagtagctcaaagttgttaatgagacccttatactgtaattccacttgtaacttatagccacataagcaaattatttatttttaaaaaaattgagtagaatgtaattggagggatataatttcaataatttgtatagttcgagaaaaattttcacaataaaaaaattattgacaaaactttaaaaaaaatcataatttagaggacaaatatcatatttaattaataagaatctaactaaatattttcatgtacaatcacatacaatttacaagtttccaaataatcatattgtccaccttaatattcacttaattagtttaatttgaacttcttgtactatactcacatttttggaacctaattagcactatttttattcgctcactcacaccacatcaacatccaacttggcaaatatgcatatatgccgaagcatttttatagctacaagaaaatataatttgttgccaccacctaaacacacttcaatcaattaaaaccaaggtacactcctaacataattgtatgtaaatttaatttaattttttaatattgctttttaacgaaaaattaggatctctaaatttgtcaaaaaaagaaaagaaaaaaaaaaagatatcttaatttgttaaaaaaaaaaatatattaggatctcctaaaaaaagagatgcttaacccaaattaggccacgttttatgcaaatccttgtctaaaactaaatggcgttttataaacaaagatatattaatttaagacgccttctcctggttcctggctgcacaagaaagtgggctttcgaaaccttcaaaaggtaacaaacccactcatttaaaatggtatatcttttaattgttcaaaacaaaatatggtatattttaaattggcatcgaccacctggccaaaatgcccattccttcaaccacttgtagcaaattaggtattcataattaataaatttattaattttgattaagtccattttttgtgttataacttataattttcttccttcaaatgccaatttgaattagtttcttaatttatcaaattcaaaatttcttaatattggcgttattttgttgagaatattccctggaaagggtccgcatgaccaatgccaatgaagtttcttattggtcctctctcttcttttcagcgcttgacctgaaaaattcagaaaattaaaacaaacgtcattcaataattccaaaaataaaaatcacacaactcacattacttgaccaaacaattgattatatatacttacatttattttttcaattatataaatataaatatatatattaataacttacattcctgacatgaaacggaagttttaaggagtcagttgaagaaaattattttttagagtaaaccttcgtttaggtaaaattaatcattaattaagctcactgttatttcataaaaatgaaataaaaaaaaatcctttaatattcacagttcaatcaaaatccactctgtatttactttgaatggaaaaaagaaagaaaagaacaaaattgttattttgaatggtttttatttttttttaattttttgtctgttgtataatctctagtctacacttgtgtatttttctttcctattttgaaatcgctcttctttggttgaaagttgaaatcttcaagattcttcaagctcttccaagaatcattgccagtaatagcagcgaggaacttcttgatgatgaagaaagtgatggtgttgatgctgatgcaggaaaacaggacaatgcctgttatagctcattttttcataccctttctggagtccgctgccagcgaatttcaccggcgacgagaatctcggaacggatttaactgtacggaacagaggttctacgccgcgaggtacaacggaaggtggtggcgagactttcttaatagattgtcgctgaatcaaaaccgccttgatcttaaggtggcgcgtggagtcacgcgacgaaaccctaacgtattcctccaacagactcgccaattcctcttcggatttgatcgtaactaaggtctcgaagtctccgtttggcaattgacacttcaaatcaggggagaagccacaaaactctccgagtttcaccattagctctgtaaacaaaatattcagacctaaatcaatctcaagtattcaaatatctaacaccgatacggaatggaaagtagatgacgaaatagaaactttcacaatggaaaacatcgaacgaacctgcaaaggagatagaacgatcgacggtgaggactcgattgtgaccgccaacgtaacggagctggccatcgccgggacgagggagaatcttgcctccgtagctacaaaagaactttagggtttcagtactggtgggtttggtctggttgatcatgactgtgttgaaactgtactggttatggttcagtttgaataagccaagaaagaagagagagaaaga

SEQ ID NO: 17889 - DNA, 4838 bp, Cannabis sativa
aaataaaataaaaataattaaatttattacccttaatagcattccttataaaattggtgggagaagttctccctttcttttctgccttatttaaccaagttctccatttcctgtttttaataatgtaagtaaacaagtgtaagagaatgattaccttaccattgattcccattatttattagtaaacatgctataattgtatgcttttctctcttaatttcatctttttctgtccttttattatctttaaaataatttctcgccacgtcgtcattactcggttggtcctaaaaaaatatcattatgatttattcttcaatgtgaatatttcaagatgtaaaaaaaaatatatttttttttaaatcatatttaacatttattttagaattttgttaattgaattatattatattatatgataactaattagctttcaaaataacaaaaatgtatataaaataattagtatataaaaataatagcttgttatatttcatgacaatttattagttttaaaaatattttttaagatcacttaaatgtattttaaattctgagctaccataatgtaacttaaaaaaactaataaattgttaagatgtatacaaataaattttggaggtaaccaaaatgtatttcaaattatatgatatataaatgaaagtttctatgtaaaagtaattaattggtttcttatcaacactataagtaaccaataatttttttttaaaaaaaaatgcaggaagataaaaaaaaaaaggaaaacatcatataagttagatttagccgatatggcacgcgagtaatagtagtaacatcatttttataagtcagattcaaacaatatatattattgtaagcttccctaataataatagtaaaactgtaatacggtagaactcgacagcatatgaagaatttttatttttatggtttttaaagtatagatttgtaaaaatatggcatttttaaaaaaaggttatataatagaaaaatctttaaaaaaaaagttaaaaaatattaaaaaaacagcataaggtaccttattacactttatggtaactggttacccctttaaataccataaatgtacctagttattcttaccaaattttctcatattttttaactttttcttctattttctccaaaaaaaaaaaaaaaaaattgaaaaaaaagccattgtttttataccaaaagtataaaatccataaaatttataatttcctctatttatagttgtaaatttgtaatggttatggcccccattttctagcttttgatattataggctgatgtgcacgctgagattataaactaaaatcatataatgctaatcaaacacccatagaaccaaccaaaggctttattaaggcatgcacacaagaatcacaaattaacatgctgatcaaaacaaaagattcaccatatgacatgattagtgtttaaaatttcatattattaggtacatttgtattttcataattttaattgcaaaaacatatattggttaagaaatatttcatttaatcgaatttgtgttatattgcagagtttgtgcatagcccaatttgatgaagtggcagatatgataaggcccaatttgtcgctttagtagatggcctatgctcttaactgtggtccaatgtttcacacggtccaagcccaaggcagtaaaaacatgggatgggattatttcaagaaacatacaaaaatagcaaaaaaattacaaaaataccaagttatgcggaattttaaatatttttacaatttttacgattttatttacataaatacaatttttttttatgtattgttatgttgtattcttgtaattttattattacatttttattatttatatattattttgacgtgattttcttgttgtttttgtaaataccgtaaaaatatatattaaaaatatttaaacaaagtgtaagaatttaataatttatgtaaatttccaaatagactcaggaagtgatccaaaggacataatgcttgcattggaattatgtgaattcacactttgctccatgaccaaagccagaatggagaatttttagtctctaaggtggcgtttgattggaggtaatgaaatgaaatagaatagaaaataaataatttttattccatttatttaatgtagggttattttaggaggatatggcgaaaacaaaacccaaacaaagttagttttctcacacatggagtttttctagttagattccattcggtggaagacaaagatagcatttataaaggggctatcaattttttatcacgaaatcactaataatgaaagcataggatccagatacaagatttactagagaagaagtttggaaagtgccaatatggatgcaattaggaacctagacttaatattgggggaagggggaaagagctatggggaaatttattaagctagatcaggctactttaaatagagacaagctcccattcacctaaggtcttgtggaggtcaatattactcaagaattgccaaactcaatttgatttgaagatgagattgattgaagggtgtacatagaagtggcttatgaatgaaaacctgaaaaatgtggcacttttagtggtattgggcataacaaagatgcttgtaaaaagattaaaatattgaaagtttaaattaggggtgttcatcaaatcacaaactgcccgcactacaccacatcgcacaaaaaatatggtttgaaaatttttgcggtgcggttgcaatttgtgttttcgccaaactgcacaatgcagtgcgattttgaatttaataatcgcggtttagactgcatcgcattatatattacaaaatactaattttgttcgctatgatttctcatttttatttatgaacaacttatatgtttacaaaacccaagacatacaattaaatttaagtaacatctatataaattattctctttttttttattttttgttaacttcttattgctaacatattattattgatatgtatataatatgtaatatataagtatattatataattatttagagacaattcaataaaataacttgattaatatatatgttatgacgttaaaagtttgataagatattttttttaattgttgtaactttattagactaatcttttaatttttattttaatgtttgataatgatgacagtgtaaacttcctaaactgcatcataccacaccacatttttatggtgtgattttcgcgattttaaggtcttgcgatgcggttgcagtttgagaaattataaaaactacatatgcagtttggtttgaaaatattacctatacccgtaccacccgcaccgcgaagactcctagttcaaacaaatatggaagcctaaaaatcctgaaatgaaatcagaggaaagatggctagtagacagaggtggatggtttcaaggaagtgaagggaaagaagtttgtcattgctcaacctagcaaagtgagtaccaataatctatttgaagcccttgtagttttaaatgttcaagaaagaaaggttgaggaagtgttatgtgatttatattccacaattgatggagggggagaccctctaccaattaatggatatgtttttcttttttggaatgcgaggagaatcaacaaaacctcgaagtaaaaagaggttatgaaaatgttctctaacaaaaatatacgtttttttagcctcctgaaaactaaagtaaaggcgcctaggatgggagccttgtacctacaaatgtttcaaagttggtgttttaccactatctttcccatcactcgaatggtagaattattattgctatgtcccgattaaagtcctaggtcgtgacagatatgtaatatccataacttgggtagtcaaaggtcacactatgacccttgtaggaagagaatgcttataaatgaccctttaatatccccacagttatgtaattaccaatagatggatttaataaatcattaaaataccaaaataatacttaacatccaccaattctcatttttaactagtacatagctaatttatgtcatcctgactatccattcaagctaaaatacaaaaattaatttttgatggaaagtttgataaataaaataagactaaactaataacgatttttatcctcaattgtaccaacctcatccactagcatcaaactgagttcctggaataatgagagaaaataaggggtgagcttataaagcccagtaggaaaacaattaatatcaaaggtaccattagtttaataaattttttgcatagttagcttttaaaaataaaacatcgtatcaccattatcaaaatgtataaacaaagtagagagaccacaaataatcacaaaattaagcgtcaaatacatatcacaccgttcactagacccctagctctcaataccaatcatagaaaacgacatccaaaaattaagtagtcgcacctgataaccaccataataccggggctcacattcaattaacttcatgtacaaattctaggtcttttacttacagctgagtgcacacctgatctacctatgatgacacatagactagatcgtgaaacaacaatatatacaaatcatgatcaacatgtctctcatcagtataactaaaagcaggagaataataagaataccaaaagatcatattcccttttattttctagaaaatccaacagcataacgactgtattttgaataaatctaaaaatcataacctgcataaatatttgtacaaagatatatctggcactcagggccccaaaacagtccagaaaaatatgcagattaagttttcaatttttcaaacaatttgtaaattataaaaattggaat

SEQ ID NO: 17890 - DNA, 3041 bp, Cannabis sativa
tacaatgctcaaaaggagcagtggaccattgaggatatgactgctattcttgacaaggaagaagaggacatgaaaaaggaaagagcaagaagtatctgcatagagacaaacccaaataattatcacaagagaaagtttacttccaacaactctagtgaccaaaggcttcaaaagaagaaagccaccttttattcctcacatttctaggctagaaaccatgggtagggtcggtattgtggaggatgccacacattctctagacggtagagagccagaggttggccaggcaaaggcgcctgtggccaaccatgatgtagagatctgggatagcgagtccgaggttgaggaggttttacctgcaaggaggaggtagtacaggacttgttctggtttctccaatggccctatgtgctcatacaatggtgacgggcatcccttgaataggcttggtcagtcttcgatgattggtgtagaccatgttttgataaaggctgctaagcctcaagttctcgatcaggggccgtagggagactgttgggtctttccttcttctcttattagtgtcgagactctcaacaagattagagagatcggacttatagggggtgtccatagtgagtagccgttgagggactaacgagcattccaattggccctcaacttgatggtgtggtaaaggcgccacattcattaggggaaatatggcatatgcacccctacttcagagaaattgcagcatacttcgaaatgtgcctaacataaatcaccatgaaaggtatcaagtatcctttagcgatgtttgttctttatgttgaactaggttggccttaacctactctttatgagattggatacttctttgacctgaactctgctccgaaatagaattggacaggatacttctactttggccagcttggctattagtggttgggttataccaacagtacacctttgtcaaaggtgggggatatgcctagaactatttcattgcctaagatatctaacaaatttaccaccatcgcttctagagagtgcccacttacaaatgctccattcctacccttcaaatgtggatagagctaaccactttctgtcccttccagtagagaggaggaatatactaaggtttgcttgtgtggcaaacttttggagatacagcttgtatcccccagagtttggagttgcgggggctgagggcccatcgggttgtccagacagagctccaactactgaggaggctagcccaagaggaagacgtactcccaatatggatgatgatgttcttttctcccaaataggcaagaacttggagaagagagacggagccctcttccagcgcttgactcgcagaggcaccgttggggacgccacactactaatcaggctggaggccagatttcttcccttcccacttgcccctgcctacatctagaggcaagggaggcaaggacaaggtgcccactgatgatagttcggatgactcctcttctgaggatgatggtagttgattgtaccaaattttccacttttccatcgtattaaacatttgtaaattatattcttaatttgttactttagttttacagatatggcttctatatgcagagatctagttggagggccttcaggcgaggctttaggtctccttagggccaaggtggcctggaccattcatttcggtgatgttgcatgatcttctcttcctcctcctccttctaggcttgcaccagttaggcagccaatgattgttgaccctccattgaggaggacccaaccttcaagcaagggcacccgtaggcctaaccgaggcgtagatttagccataaggctgagagctttggaggcagctcataggagaatggatagagtcttacgcaacgtcgatatgagcttcgagagctcggtgatggcaagctgaagatgttgtcttctagttgtcgctagcacttgatctcagtaagttgcacatctaactttactcacttttctgtattgttgaatgttggccagacataagtagttataatgcaaggctggtcggctagtcctgtgttcttgagaagctgattggccctagaagcaccatagaggggctggcctcccaggcatatcttttggtactaacttgccattgtttggtttttaggccttttttaagttcaacattttgcatgactactccaagaggtccttggacgctctctgggagaagctaaaggccaagtagattgagctttaggtaaggggcgaagcccttgctaattctgaggttcttcttaaaagaagaagaacgtgattactggtttggagggcatggtcaacaccaagaactaggagattaacacacttgctgctgacatctctaggctagaggcatactcaggaggagtaataaagcattgaagcttagtaaagaagaattgaagcttgcccttgatggctagcaggccattaggaatgagtatgttggctagtcttcagagatcatctatgagattaagctacacaatcctaaggttgatctttcctatattggagcatctttccttgagagcacattggctcaagggaaacagttgtatgagaaaaggatggagaaagaccagaccaccgctttgctagaaggatcatcattggggcagtttgataaggccatggccgatacacctactgaggtggtggatggctagggcatgaccaggtggccgaccagcctatagaggccatggccggcccacttttggacatctggacactgtaacttcttactcgactccacctaaacctccacctaattctagaaacataattatccttactttagtttaagttttatgaaacatcttttggtatgtttaaatttcatgtgacatttgtatgttatttttatgagatatcttatggtatatttgaaatttgtgtgatattttattcatccttagatgttctagaatatcatttcaatataatttgtgatgcttacacctcaaacacctcgagacttacaaaattactaactagtaactaattatactata

SEQ ID NO: 17891 - DNA, 3430 bp, Cannabis sativa
ccgaaataagtatactaagaacataactaaaagtgctttaaaatttggcataatataatatcgtgccaaaattttacatttttattttgactttaacaaatctttacatttttttatttaccataatttaaaaaattaaaagaaataagtttttatattcttattagtacatcactatcattgatataattaaattttatttccttgcgaactttacacaaattttaaccttagagatgttctaaatgttaataagtgagagagctaaaaggagtggttttgatcatatttaagagcaaaatatcatatcaacttatgtaggtaggtacacacagagattagattaaatggtggccacagagaaaaagataagaaatgtagtggccaaaaaacgacacacacactcagccaaagcactgatcagtaggaagtggtccaggaatggagccttgttccaagaactgaagcccaaaaaccaccaaaatcccaaccaacgacaagtaagacaaaccttctacagcccccaataacccaaaagggccattgggcaaaccagacccagttttcgctttggtatacaaagaccaacccacaattcccaccacggctaagtagctcactccttccaccgcgccgattgagccgccgggaccaggtggcaagccacaccctgtggtcttcagagtgtacagagaccacccaatgactggagtcgacactaagccaccgatgatcgcggctgtctccgctactccaccacctccctcagtttcttcgctggtttcctttgccatggctatgaccttgagccgccgtgtggttgttaatctgggtttgagacttgaaattgtgggttttattgaagtgggttttggagaaaagagcaacatttttgctgcggcttccatggtggtaggagagagagagagagtttggcttagaaaaatgaatattgaaaagtcaccttatcaccatgaatgaactatttatttggcttaatataacatactttacttctaatatggtaatggatggtaccaatggaatcactacagctcagctgaaataaaaacaagaccatataatgcgtatcatttatatgttattaaccgttggatcaaaatttgggtacaatctaagaggcccacgttacataaccattacaactcagaagagcccatctcattgccacctggcatatatggactatactattactacaccaccataattacagaccatagaggattaaaaataagaaataaacaaaaattacacgtcacatggctgaataatgagaaaagatagtcaacaggtcagaatacttgaagttgaagccccatttgattgaatggaatatgagggaaatgaaacctatccacatgcgttttttttttttttgtttttttacatgcccctttttctaaaaaaaaaaagaacaaataagataaaagaaagaaaagggtactctgcttgggcaaacacaagaaaaaatatatattaactaagttcacaacttccctttttctctcgttgtttccctccaagaattcccccttttgaaacctaactcttgaaatcagaacatgtacttgtgaaccgctcttaactgtcttttgaaatgtgaaagagtaacggctattatgtaagagttccaaagctggggggagaaaagactaacgaacttttgaactgaaatcccacccccaaaggccaaggatattaacgatatcatcatatcttccttccaactatatatatttagagccaaaatcactactaccagagtaccaaccaatctagctaaggtttctccttgtcttccatactaaaaagacatgaacaaaagaaaaacagaaaaacattaaacatgcaaagatcagattagatcgatggcagagtgtgttagtgatgcttcttcgaagacttgctaaactcaacaacatcatcatcatcctcatcatccccaccatcatcatcatcatcgtcgtcgtcatctttgtttcctccatctctcttcctctttagctgggaagaagaagtagatggagggggtatcacatgaacttcatcatcatcttcaacttcttcttcttcaccatcaccttcttcttcttcatcatcgtcttcttcttcttcctcttcattcccaggatccatgtcactacctccaccatcttcttcctcagcttgaaccacaggttgaaccaggtagccttcaccatagtcatcatcctgcaatcccagaaaacaattaatggatcaaaaaaatacaaaattttttgctaaacaaagtaaaattaataattaaacggagcagatcaaatatcattaaaatcaacaagcagccaggaaaaaataaaactaaaatcgataacaagcctggaaaaaataatcattaagaaatttaaacaaaaattctaaaagtaagaaacttgaaagcaaccaacacaaacaacaacactatcagctcacaaatggacataaaatgtgaaaaattaagcagcaaaattaccataaacatacaaaatttgcatgaataaacctcagaaaagccaagtagttttttaaaatacaaaaataaacagaaaggcagcaccaaaaacttggaaaacaaacgataatcaattggttccatgaaagcagcagccaaaacagaaatacctataagctattttctggagcacaaattggccagaatatctccaactccactaaaaaagcaaacatagtgtcagtcactgatttgaagtatattgatgacacagttgcatcaaatagatataacagcggcgtatacaatcagagcaaataaaatggcttaacaataaaaaaaaaaaaatcaacttcacaattacagttgaaaggaactgttttgaacaaaattacaattagataacgttaaaaatgtaagaagaaaaccccaaaacaatacatgcagaatttcacaaattataaaagagagataatgtcgcaaatcacaaaaagaagtcatagatatgcaaaataagagacatcatctctcaatctaattaaccaagttttttctacaataacaaaaaacaagaagaacaagttaaaagagccaaaaatctaaaacatgataaacaacataatatctattcagacctctaagatcaaaacaactatcgctggtttccagcccaatatcataatatgcactatgtgccgatgtattcacataagacaacacctattagctcagaaaccatccttaagagcttgacactacaaaattattgtagaactccaatttcacacaaacatacaccaaaaaagcaactcttgcagccatgcaaagtggtttcatctggtaatctaaagaagaacaaaacagttaatgcaacagagcagataaagtaatatataagtgcaaaaattgggaaataaacacaaaaaaaaaaaaaaa

SEQ ID NO: 17892 - DNA, 8419 bp, Cannabis sativa
cacgtacaaatctcttgtgtcaagtgatttaattttctgtaattatttttatattctgcttattctcgtttgtttctgcaaaactaatttctgcaataacagaattacattctgctgttgcagacgcatatagttttatatatattatatttgtgtaatatttattgatatttgcaaaaactcaattttttcagttatggtgttgagattgttctcacatcttatacacatttgtgctatttactatcttatggcttacatgttgtttatagcattgtgttgtaatcttattttcatttccctattctctattttatgtgtatttttgcaataaagttgtaacaatatttaatctattattttgtccttgtattattcttatgatatagttgtattttttattttggttttctattgaagcactaatatttctaacaatcaaaaatttatcatttcctacattccttcaatggaagaaggtaagttaacatgtgacaatacaagagtaaaaaatgtgatttattatgatttactattttatataatagtaatatatattcctatgtagggatataaactttaatatattagtatatgttatattaacatagtgatatataatattgttattttttttttgtcaaattagttgtcaaaatattttttaattttttgtgaatatttaaagtgaattaaatattattttcttgtgagtaatttcatttttatggctatcattttcatttaggaaagttttcataaaagagaaggaattctctttgcgaaaagtttgattaaacgagttatttttagaaaaattgacttttccttttgctagttgctcttttgagttttgatatgaatgtagtagattgtataatctttatatggcaagtattaaattccaaattgtaatcttggacttatttagaaagtttcctaatttgtcactgagtgcaattatgtcgctgtaaatcaagacttattttaagaaaattttgtacaactataaaaacgtgttatggttatctctagggtttctatatgctataaataggacctagagagcagccaagcttgctcatctcttctagtctcatattttcatatattagttttatgagaagagtgtttttttttttttttttgtaaaaaatatagagtgatcaattaggttttagttttcttgtgatgatctcttgttgttcatagaataagttcaagagaagctttgaacaagtgtggctcttcgggagaagacttttcaaagtctcatatcgagaagagtgagcatgcatcaatagctgaagggagttcactacttgttgtgtttcagagattatattagcgaggtggattaccaagggttgcaacaaatcattagagagagtctaattttattttaagtcaattacttttgtaatctttgatactttactaattgatttgattctatgggtgtggcctcatggactagtagtgtttgaaagaacactaatacctcgtataattctcttgtgtcaaattttaaattttgcataatttatttatgtttctattctgttacagcaagtctatgttctatagtaacaagtttttaatctgttacaacaagtcgttacagtcgcattttaattataatatttaaagtaataaatcagtatatgcaaaaatatagtttttcaattggtattatagcaggaccttaaactcttagtgtggtcttttaacgtttccttctatttttacaatatgtttccactacagttggtctacattgctaaataattttactacccttattggaaggccaggatgaagactctcatcaaaccccaaaatgaaaagcttggaaatatattctaactagttggtctctaccagttgaagaagatgatgaaggtaataccaaggtaaaatcttaattagaatggtcaaatgaggaagatatattttcaagtaataataataaagctatgcatgctatatttaattatgttggtgaaggttttattaaattaatcttcttgtgtgaatctgcaagaaaagcttggttaattcttgaaactcaagttgaaggaaatatagatgtaaggcattctcggttcattatattacaaagtagatttgatgatcttagaatgtctgattttgaaattctttttgaattttatgaaaaattgtctgacattgctaatggattttttgccttgagtgaaaaacttgatgaatttgttttagttacgaaaatagtttaagttcttcctgacaggtttaatgcaaagattttggtgatggaggaggctaatgactttagcacaatgaaagttgaggagctaatgggatcacttcagacatttgaggttaatcaataaacccaataaaaagagaaacacaataagataaaagaaaagaaaaatcaattgccttaaaaaattttgagaatattgattctgatgatgaggaatgcaacgccctatccaacagggacgccacatgtgtgtgcttttataaaattctcttttataatttatataattataacaaatgtgtgggtgatttaaaattttatagataaaataaacactttattgttataagagttaggtactaatctttatggggacccctcgtaacaaaatatttacatttggttccaaaatacttttacaacataaactttatatgtcaaaatacaatcaaaagaaacatcttatcgaccgggtcgtgataccgcgactgatatgtatattgttgctccgacctcagactcatggctgctcaaccttagcctttcctttacctgcactatttagcacctgtgagtcatagagactcagcaagaaagtgaataaatcaatataacattcatttaaataatcatatagtaacatactcaatcatatacacatcattaaaatcatacaatcttagtacttcataaagtacccataccacttgttaaccacgagctgtatatgtcactatcgatgcccgatacagcaaatgataagtaagaaacctatctgtagtttctggagtaattactcaatatggtaatgatcgtttccaatccctcggttataaccgaggcttagcacatactatctaagttctcgaccataatcgagactataaccatacaattattaatcacttaaccctaagtgatgtataacactttccttacctcagtctagaactttccaagtgtgcgagccaacctgagtggaaaataagctgggcgatcctggccctatgtcacaacaaacaaatttgaataaatacctcaaaccaaagtttcggaataaaaccctaattcgaaaccttataaaaatctaactttcaccaactccaaattaggctagacaacacataaacaacctaaaacagatgctacgcatcaccccgagccaaaacagaatagaaagaaaactcgagaatttcccctgcagggcatccggtcgactgaatctggtgcaccagaaccaaccggtcgaccggttctggcagacgaggaattcaagggttctcttcttcaatttcgacccaaacctcctccaaacctaatcaaactttccagaacagtataatatgacaaatataatataaccaattcaccataattcatcaatttgctcaaaatcacattctcaaatgaaaattaagctcaatttacttcactaaacatattcaatccaaacaacccttatatctaacctccataagcttaaacaaattcataaactaacctaaaaatatactctaatcctatcttaacatcacagccccaaaaattccaaaaaccctaacctatagtaatctaaaacttcaagaaaaataagagaaagtgttgaatgcttaccttaatgtacaattgactccaacacacaactaatccagccaagaagatgaagaattgcaagaaaatccttaggctgcaactctcctagggttcagccaagaagaagaagcaaaaccaaaaatgcttctatcaaaactaataatcccttttacttaatttctaatttccttttttttttaaaaaaaaaataatgtagccactaacttaaattcagccaaaatatatataatatccattaatcacaataaccattataccattaatcttaaaattaaacctatgggcattttaataattctagctaatctgttaaatcgacattctaaaattctagactagtccgaaatacttccaaaataatccatccttattgtcgtgacatctctgaccacaccgtcatgtttccctagtcgtcggacccgaaaatattttatctcaaaaatggtatccatgatacccccatattctaataaaacctccgtaattaataaattatgcttcattaaatcatttactaaattcacactaattaatctaagtaagttcataatcttacttcattaccggaagaatttacatatttaataaaataagcctaattaaatatcataatattttctggcatattacaaggaagataatgaattgaccatattaataagaagtttttttcaattattgaaagcaatgggacacaaaaagaattttttttttaattctcagaaaataattcatcttcaaaaaaatttatgcataacaataaaagagttgttcaatgtaaaaaatgtgatggttttggtcacatacaatctgaatgtactaattttttaaaaaagaataataattgttttaatgaaactttgagtgacaatgattatgaaactagggttgatgaattagttgttttaacctctgttctttctagaatgtctcattttttgcagaaaaagagaaactttgtttggctaaacaacaatgttttagataataaaatttgtcattgtgctatagaatctgaatctcatgactccgaactagatgaagattatgtggttgattcctacaaggttatgtatgaaaagtgaatacaaatttgttctgaaaatagattcatgacagaaatgaataaaaatcagtctcaagaaattttttatcttaaattaaaaattaagaattatgagacttatttatgtttaaaaattgatgaaattaatcttttgaagaaagaacttgataatcttaagagaaatattaagatgcttaactgtgattcatctatttttgaggaagtacaaaatgcaggttaaagagggttggctggtctaggctcaaatggtgctaaaatttatggaataccaaaattcatgtgatccagtgtcctaacaaattttcctgctactgcaaattcgttgtctgctgctgcaaattcatcttatgcagaagcaagttctccaaaaaaacttgaaaaaggtaagttcttaagtaagaaaatttattccaacttatcatttctgtggcgttaaaggtcacattcgacctaaatatttcacattacaaaatatatttaggtcaaactatttcgaaaaaataaataagttgaaaaagaaacatgtttcacaaaaacaaatatggattacaatgtcttgttggcatttttgataaaactattgcttaaaaaatatggtattttgacaatggttgttctagacatatgacaagtgacaaggagtttattatcaacatcaggcctatacaatgtggtgaggtaacatttggtattggtttagcataaaatgttattggtatgaaaactctcaattttgaaagtctaccaatgttgaaaatattcttttggttgatgaacttaaggctgatttaattagtataagtcaacttcatgagcaaggcttgtctgtaaatttttctcataatgattgttctgtgcttgaccaaagtagtaattatgtgatgaaatgttttagatgtgttgataattattatactctcacttcttttcttatcatactgcatgtgataataccagtactacacatatatctaaaaattatgttcaacattctcgtacaaaatacatttatataagatattattttgtaatatcccgataagcctaatggtaaataattaggatttatatttatattatggattaattagattataagtaagattatgatcatactagtatatcttagcatacattttaagtctgctataagggagtaaataagtataatttattaattacggagatttatatagcatgtgtgaatgtaatatgagctatttgtgaaataaaaatatttttaagtttggcgaccttggagactcgatcgggggccaaaaatatcataacaggtttaattagtaaatttaacgggaatattatgataagttgatattgtaagtattagagtaattatgagtatgtagaatttgacttagcgtcccagaagtagagatatcttattgactaaaaaatgatagaataactattaataatttttttttattaatacgtattattattattactgttaagataattattattaatatattattatattattatattattaatttttttaaaaaaaagttatcagtacatatattatatgtttataacttacagtacgaaaatgaaacctttctcctcttttgacgaaactcgtatctcttcctatctattttctttgatttttaacctgaaacctagcgatctaagctccggtagtagcggaatagcaaatctttagagaaagatagcttaaggtatggtttgattttattttaagctaaaaacgattagttttatataggagtttcatgaattagaatagttatggaggttttgaagacagtgaacatcctacacatgtatgcaagttacaaaaagtgatctatggtctcaagcaagccccaagggcttggtaagagaaactaaaatctgctctactctcatggggatttgtcaacactgtctcagacaactccatgtttatgtccaataacaaaggacatgttctactggttcttgtgtatgttgatgacatactgatcaccggacacgattcatcagccatacaacatgtcctctcagctctggacacaaaatttgctttaaaaatattgggctcaatacactattttcttggtttccaagcttatagaacaaggtatctatatatcactcagaccaagtatgctcaagacatcctaaagaaagcaaacatggaagactctaaatcatgcagtaccccaacgtgccatgaaaataagttgttcaccaacaacaatgacttattccctaacccaaagatatacagaagcattataggctccttacaatatttcaccttaaccaggctagacttgccttttcccattaataggctaagtcagtatatgcaaaaccccacaacttcccattggaatgcctggaaaagggtactaagatacatcaaaggcactactcaccttggccttgtattcaaacgttcaacatctatgaatattgaagtatattcagatgcagattgggcctgcaatctagatgacagaaaatctactaaagggttttgtgtcatgctggagagaatgaagtaaattattcattgattgaatgaatgaaataatgtacaaagagctagctatatttatagtacaagctaataacaaccatgaagagaagtaaagacactacctgttttaactaattaagccaacaaaaaacagaaaactaacatgcttgttattgtagaattactatttgttacaatcaccataatgatcaagctactttaatttgtaactcttacatttttttttgtgtacaatgataatggttaatgattaactaaattaatagtgattggattagagttatgaacttcttagaagtaaaaatgattagttactgttacattgtttttactatacattaagttagttaagtctgttaaagaattagttagttgtctccctttattttcggttgtctagcattgtaatctgttggatacttttctatataaataagatgtttctggccaactgtattcagttgagctttcccatttcacttcatcttcttcctccattgtttctccattttttgctcaatcttgagtactgagtttcagtactcttacatggtatcagagccatgtcgaaccatggcattcgagttgaacctccagcaggtgaaagagttgagccacaccaagctcgagctgcagatccagcccctgaagctcaaaatccaattcccttccctaacaatcatctcctccccctaaacatccgtcttgatcgttcgaactacactatatggcgatctctggttcttgctgcggtcagagcttacgatcttgatggctatgttcttggtcatcatcctcaaccaccagaatttcttgcaggtaacattctcaatcttgcatttcaaaattggatgcgttttgaccatttcttgatgcattggctcatgaattctgtcactgaacatatgcttggtcatgttatcaactg

SEQ ID NO: 17893 - DNA, 6943 bp, Cannabis sativa
  modified_base (2736)..(2739): a, c, t, g, unknown or other
attaatgaaaaatctccttttttgataaaaaaaatgctctccaattcggttccctgttacgttgctctacaatttcgttttctatactaacaatctgtttattttgcaggttgagggagctaacgacagcagagattggtaaactagtctctgtgtcgggagtggtgactcgtacaagtgaggttcgacccgagcttctccaggggactttcaagtgtttggaatgcggaggcgtcattaagaatgttgaacagcaatttaagtacactgaggtgtttatcttttaactcatatttgatgttcaaatacttctgcatgtgggcagttttttcttgtttcaatttttatttgacaataatttttgttaacggtgtcctttttcttttgggggtcacagcctacaatatgcatgaatgcaacctgtgccaatagaacaaagtgggcattacttaggcaagagagcaaatttgcagactggcagagggtacggatgcaggagacttccaaggagattcctgctggttcccttcccagatcattggatgttattatccgacatgagattgtggaaaaagcaagggcaggcgacacgtaagattttacaattttgcttttctaagtttcctcgtattgatcagcattctcaaatggttttattcaatcttaaatactaatccaggagtattcaccgtttcattcattacgttttttacagggtagtcttcacaggcactgttgttgtgatacccgacattatggcattggcctcacctggagagagagcagagtgtcgccgggaagcttcttcacgcaaggattcaatggctggacaagaaggtgtgaggggccttagagcattaggagtcagagatctctcttacagccttgcatttattgccaattcagttcaggttggttatgattggttttttacagtaaaaatgtcattgttatcatgtgatgaccttctgattggttcctcatatttttattcttaatgtttagatttctgatggaagaagggataatgatataaggaatagaaagaaggatgctgatgaagatgagacccagcaattcacagtaagttcttgatgcacttttcataatcattatgtagatacttttttgcctcaaatttagttgttataagtttataactcatctttatgatcatgatgttgtagtttattagtaagcatgactaaaccttttaaagtaaagaattgtagtgctcgtttaattaactttttcaaaactgccttggtttctctcttatcattttggttccataacttcgttctagagtaagtgttgtgcattcggggcctattgtttgattccataacttggttatcatttgtgaatttcgcagcctgaagagttggatgaagttcaaagaatgaggaatatcccggatttcttcaataagcttgttgatagtgttgccccaactgtctttggtcaccaagacattaagcgagcaatcctgcttatgctgatgagtggtgtccacaaagtcacccatgaaggcatcaacttaagaggagatatcaatgtttgcattgttggagatcctagttgcgcaaagtctcagtttcttaagtatgtgaatcttagtcttttcattgccccatttacagttttacagattgaatctttcataatgcttgtcttttatatatgccacaggtatacttcgggtatagttccaagatctgtttacacgtctggaaaatcttcctcagctgctgggttaactgctacagttgccaaagaacctgaaactggtgaattctgcatagaggtatccctgcaaaatccttgaatttacttccttttttcagttcaatcttcattttgaggatcaagatctcagcagaaagttttcaagtattgtggagtcttattacattctcttccgttgactggtccaaaaggaatttatacatgaaatttgttgacacagatgaaatagccaatgtttctttgcatgttgagttctttgttttatcttataatcttattgcatatctgttctttattttagtccttgattataatttattttgtgtcccaggctggtgcactgatgcttgctgataatggcatatgttgcattgatgaatttgacaagatggatgtcagagatcaggtatgtcctccgttacttttttttcctaaaaaaaacattgtaatgaaaattgtgtctggaatctgatgaatgaattgactttgaaggttgccattcatgaagccatggaacaacaaaccataagcattacaaaagcaggaatacaagcaacactgaacgctcgaacatcaattctcgctgctgccaaccccacaggggggcgttacgataaatctaaaccacttaaggtgagagctccatttactgttttaaatttttcattttttctttaataaagactatcaaatgtttttgatatgattctgaactttagcagtatgaacttgctaaagttggagcttttggatgttatactcacttttaatgtgcttttttttttgcagtataatgtggctcttcctcctgctattctttcaaggtttgatctagtatatgtaatgattgatgacccagatgatcaaacagattaccacattgcccaccacatcgtgagggtacatcaaaagcgtgaagaagctctttctcctacatttactactgcacaactcaaacgttacattggatatgcaaaaactctgaannnnaaggtttgctacaagtcctttttacgggagttttgtttctcccactttctattcttatttgtttttgtttctgccctgtagatgagtacagaagccagaaaattgttggtggagtcctatgtaactctccgtagaggagatactgctccagggagtcgagttgcttatcgtatgactgttaggcaactggaggcattgatcagactttcagaggccatcgctagaagtcatttggaaactcaggtgtgttgaagtgaaattcagtattgtaaattttatacaaatttctccaccacacttaaaaactgatttttactttccaatagatatttgctcgccatgtccgattagcagtgagattgctgaaaacatccataatcaggtaagaatgataaagctctcttgtcattttgttttatctttctgttttttatgaccataatgtgtgttatattttaccttaacagtgtggaatctagtgagatagatctatctgaatttgatgaagaaataaatcacgataatggtgacgatggtaatgaaaataacaatgctggcgaaggcggtgaacaaccaagtaataatgctgcccctgatccagcttctactaacaatggtaatttttataccaaatatcataatttcttttccttgccttgtgtaaatgcttaccaattatgtggtgcagaaaatgggggaggttctgcccaacaaccacaacaagcaaagaaactcgtgataagcgatgaatatttccaaagggtaactcatgcccttgttatgcgccttagacaacatgaagaaacagttaggattgaaggtcagccttgtgtgttggttgattttaacagcttgtaaatgttaacaataaatatttggtgattatgatggttgttttcgtttgcaggaaccggactagctggaatgaggcagagggatttgatccagtggtatgtgaatcaacagaatgagaaaaacaactacagcacgatggaagaggcagcaagcgaagtttcgaaaatcaaagctattatagaggtaataaaatatggttttgtgtgagtttgatagtcaatactaaatgaaatactaaaaataagtgtttgttaattttagagtttgattcgaagagaagggcatttgatagtgttggacgatggaggacaagcagcagcggatggtgaaggacggccatcgtcatccagaaatgatagaatattagccgtagctcccaattatgtcattgaataatgtagtggttagttgtagttgtagttgtagttgtagtcttccatttagaagacattttttgttccttatttttattgttgtgtttaaacttgtaacaaagcatttattattatttttttttgtcttattaaaaagggtatatccataagatttagaggtacaacattgtacaaagcatctaaacatcatatgtcatattgctatttgtgcaagttccttgtcgggttttatagattttaagttaaattgaattatgtgaaatttaactgagaaattcgactttttatgtttaaattaaaattaaataaggatctaaagtttgtcgctctttcaaaatgatgctcatttttcattaggtttcaaattacaccttccatttgaaaggtctcactttccttttatcaaatagaacgacaaaatgtcaccaatcactacttgtatggcttgtctatgcctctatgggcaaagctttaaacttgaaatcctaaattgcaaatcactaattttgatataattagcgtttagttagtcgatctttgcttcttgtgtggttttcattcatttttttttttttggtataaaacgagttttggtaaaatatgcatttttttgaattttttgttaatgtttaatatggttaaatagcggttcgatatgtgctcgataaaagtagtgtctaaagattagggatgaatttcaatgctacccatcgaatttctaaagaacaaatatcacacaactatcaaatgatactactgtttgagaggtgtgatattttgttctttaggaatttgataggccgttagatgggattataagttaaaaaatagtgtaaaatattttgggtgcacaagattctcttttgctgccattctttctgttttggtgtgacacgtaataatatctaaatttagttctgtattagaaaggagaacaaaaaaaccaaaaacaatatatagagatatatactgaaaaatggaatacataaaaattctcaaaaatccaatagttagagtaagaagtgtgaaaatctagactcgtacaaactgaaaagaactaactcttcatatatcctatattgtccttctatatatgtaaaatacttgaaccaaatttacaccaccaccacaaacacaaactcccaccctccctatccacacaaaattattattcgatttatttatatacgccgcagagaggccaaccttttctccagttcatctacgtctggagatgcagaactgcatacattacgaattaggagtttagaacaaacaaacacactgcaaaactcaaaagaagtgttttaaacaaatgcatataataatatatacctggtattctcagcagcagcagtcttggttggggcagcggcagtcttggccggggcagcattttcagcattcctggatgcaatcctgccttttggtgctgaagataactgttagcaacaacaattacgatcagacaacgaaaattatatgcaagaacgaactacaaaactacaatcagagtacaaccaacctgagatgcaatgtcaacaccaatttcgtctagcacctgcaaaaatgaaaggcttagtaaaagatttgatgagggattaagtcaaaaacctctaagtgaaacgaaattagactttttgaatttcacctggttagtcagctcttctgtttcctcctctgcttcgtctttgtctaaagtctcgtcaatagcctctgacatcatctcgatctgccacatagagcaatggaatatacatacatacacacacacaatcaaactcaaagcgaagaaacaataagaaacaaaataaatcatccctttaaacaaaaaagccttaataattaccgtcatgtctaattgtgcagactgcttctggaattctcttatcactttaacttgtttagtaggtgccatttgctgaaacataaaatgtcaaaaaaaatcttcacttagtcatcttttaatatatatatatatgtcacagaaactagaaaacttgtgggaaatgagctcatatacatgctactcctaataattccattaaagaaaaagacttcaaaatttctaccttgctagttgtgtgcattctcatcatctctatctaaacagttatacatacaatgctgctactccagcaaccaaaattttgtgtgcattattataataacgcccactaacgatatacaactcctaataatttcagtaaagaatacagactttgttcattgccacaaacaaagtagaatttaataattccaacaaagacttaaggaatttaaaatgcataccttgttcattgccaccattgctttagttgcacctttcattcctgtagaaattgatgtgctggcatatagtgcctgagaacaaatatgaactgaaaaagattaggaagatgaacagatagataaaccgtcttttattcttatgttcagatttttcgagtaaatggccaaacaacctgtgtgtgagttgctacccctctgatttgggcacgactcccttgcaaattagttatttgttgacgtagtcgaacaagttgacgggctaatattttggtggcagcctgtaaaagaagaacatatacaggttcttatacacaatgtgttatggcatagaagtgagaaaatatatatataataattgggtgagacagacttgcctcatttccagttttagctgttttcttgatttcagccactaatcttttttcctgaagacaaatttaaggcaaaataagtaatctccaaaatgaaaatttgaaaggaaaaaaggaacgtgggaggaaacatataacacctctagctgaagcgatgcaatctcgcgttcaatacctggcagaagaagaagaagattagttagttgcaataacaacataacattgtgatgggaatttcctatcatttcggtacaaactgtagcaaaaaatagagataatagagctgatata

SEQ ID NO: 17894 - DNA, 5456 bp, Cannabis sativa
actttcaccaattctttttctacatccacgtctcctaccttgctgacctgggacccaacttcctcttgcagcttcttcatttccttttccaaatcagttatatggacttgagcatcattattttgttcactaagtaaagtaacattagtctgagcctgagataatgcatcttcaagggatttcacggtcttgtaggcctctgttagtttgttggtctggacagcaacctcctcttttacttgctcaagttctgtctctgcaacaaatctaccaagtacagcactttctttctcactgacgaaggcatgtatgttattttccgcaagtgttaatgcttcttctagtgacttcttccgctcaaaaacatcagtgaacttgctagtgagcaaagaagcttcctcgtgtgctttttgtaactcttgttcaacattgtccttagccaattctatctcttttttttcttcagcaagttgagtaatatcactctttgcaactgacaaggtatcttccaacgatttaatagtagcttctgcttctacaagcttgccattcaaggtaccgatttcctcctttactttcaccaattctttttctacaaatgttttgccatcctgacactccttaatatatcctgaaagccaattcaccttatctacaggctcatcaaacactaaatcaacaggaagaacaatgccatcaatagattcaattattctctgcaaaatgttattgttctccaatgttttaatagttgcctctgcttctatgagtttgttagctaggattttgacttcctcctctactctcaccaattctttttctgcaattgtcttgtcatccaggcatttactaatgtacccttcaagcaaattcaccttttgtgcgggttcatcgaaaactgaatcagcaggaagtgtaatgccatcaatagattcaattactttttgcaacatgttattgctgtccaatagaaacttttcaagctgatccttttgttcctttacagcaacaatatccatctctaactttgggatgccctctatatcagcagacattctattgatctgatctctttgttcagcaagttctgattgttgctgctggacttgaagcctcagcttttcaatttctgagttcttttcatcaatttgatgtttcaaattttcccgatcttgaaccagcccctttcctttcttcactgccatggttaacttctccctcagtaaggatgacttttcatctgcccgatcaagatctttcttcatggactctttttgctctttcaatgctactagttcttcggacacccttgtcaactcaatagagagacttctaacctgcgatctcatcaacaaatcttcatctagtaaaagctgggacaacaccaattcttgattggtcatatataaataactctcaactttttcaaatagctcagcatcaacataagaacccaaagaggcattactcagttcttttatcctcccaatgcatctctctacaagcgtaacgatatcaagagaagaatgagagactccatcctccattgtaagtcctgaggtttcatgtagcattttcaccaagtgatccttctctaaggacattttacgttctttttcaacaatttctttgtatttgcatgtcaaatcatccagctccacctgaagataatcatttgtctgcaattcagctgaaagtgaagcagttaagcgatcaatttcattttgtgcagcatcctttgtcacggaaaactcatcttgcattgtatttaattcagaattgacctggtataataactctctaacccaattcacttgagaggacaattcagaagatgaaacagattctggtagatgaattaaagacaaagcatctttaactttgtggaattctaaggaaacacccttcaatttattattctcgtcaacaagccctttgcatctctcgacaatttccattgatagaagctcttcaggaatactattatgagacaataattcttccaatttctcaaggattgcatttttctcgaacagcgtttcttgcaatgaggtgaccacaatttcacttctaagtaactcctctatatgcaattcagcagcctccaatgcactggacttttcttgtaaattagttgagcatttctcaagctctcttgtcttttcagccaatgattgtttcagcgagtccctttgttgtaccaatgctttaccttttgtcacagccatagtaagtttttctttggtattactggatctagtcttttcctgctcaagttcggatttcgttttaccaagttctgcattcaccctctcagccatcattctctgatcgtcaagttgttgaagcaatttcctattttcatcttcaaaatggcttaatttttcagcaaagtccgactcctttctttttagttcaagtaattcatcacgggctgcagtaaaaattgtcccgaagtcctgaaaactagcacttgatctggtctcagacaaacattgccttaattgatcaatttcagaaagcagcatattatatgtcacagccaatgtataagtgcctttctcaatagaaactaatttaccaccaatggaaccatctgatgcttcttgtggatcaactagcccagttaggtaggatagcaatctatctgtaaccatctcaatatgtgatacagggaattcgttaaccttcacgttaagctcttcaatctcttgattctttgccaataaaatagcctgaagctcacttactgtagccttagtctgcaatcgttcttcacaagcacttttaacaatttgtgtacactcagtcatcaactcagtcaccgagacactagtatccgtctcctggaccttattctcagactcttgactaacactttcatcaatcaaaggctctccactggtaaaggcttggagttggcgcctaagtccagcaagctctctaataaaagcctctctttcttcctacataacatcaatattcaacatcaatcaaattaaaattaaggcaattttaccttaaattaatacaaacacaatcccatctaaccttatattcaagtgaagcgttttctttctcacaaacagtctgatcaagcacaaccttgagccgttccaattcatccatgacataatcatctcgcacaccattttcctcgtgcaaataaggctcctccttcatattatccaccaattccacagctacaattgcttctttaccatcaccacttgtaaccaactcgtcaggacaatccacaaacatatcttcctttccaacatcttctcccactttcaggttatcctctccttgcatatttccttctacaccttccgaaatgccattatgattttccaccacaattgtggacccaaactcctgtgattcatggaaatcattataaattagcatttaataaaatctgaaaccaactgtctagcattttctgcaattttattcaatccattaaggtacctgattatctggttcgccgacatcattttggattgcagattttgaagattcaacctccatagacccatttgaagcttcaagagagtggatagaatctgatgaacttaccggctgactttcttcaagcaactcggggttatgagtctcagacatttttgtggctcataacccaattgcttcttcttctataaaattgggacctgaaactgagcaaaaaaaacacaatttgagattggaaaaaaaaaaaagtacactcaatcaaagggctcataaatctaatgccaaaccaaaactggtaaaaactgtaaagagtaaaatagagcaaattttgtttgttttaacgctatttaatcataattgtatttctatttggtaccttcaactaaaaattatttggtatttatttcataaataaaattatgcgtcacgggaatcatcagaaacaaatccattcagtctgtataaaagtgcagaaaacaatatgtgggtgtggtgtggatacttcttattgtatcagcaaagctacattccttacgacacaacaaaaaatgcaaaagggtccaaacccattatgttaatatttataaaacagtatgctagcagcactcattgaaattcaaatatttttgtaatatagaagttagaacacaaaatattcagtcaaagcaaagactgttacccccatattggaaaacgtgaataatcaaatataccaagaaccaaaaatcatattctaattcataaccaagaataagaattgggtgattaattaataaaatttgagccataaataaatgaattatagatggaaaattcttaccatattcattatcaaatgaaagacacaaacaattaaaaacaaatttaagtgccttgtctggtaacttagtcctaacatatatggactaaaacactcaaaccttccatccttacattcataaacaactactaaaagaggattcacaactaaaatgattattctgttcttttcccaaaccttgaaattttctttagtaactattaaaaagagacaaaatcacattgaaaaatgagccaaaggacgcagaattcataccaaaatcaactaaatgtatgtatttatatataaaaggcaacaaacaatcaatatacagctagtttcaataatgcaggaacagctagtttctcttaatactaatctaacctataaacaagagtgacccaactagccgtcgtcttccgtggtcgcagtagtaagaaaaagagagaaagaaatagggctctaaacccaaaaagaccacacaaaccccccacattgacattttatcgagtacaatgtgagcaaacattcccctaattctaattcattcctaagaaatcgtaaacaaaccagccatgaaattttatacaaggaaataaacatatgcttacataaaaccatgaaatcaccataacaaaagaaaaacgtcttatactcaaaatcatagaattactcaccaaatacaaccgcagctccacagcccaagcaaaaacaaaaacaagaagaagaagagtttaaaagagacaaactttaagcccagattccatttggaaatctgggattctccattttagaaagatttatttagcaataattgggagagaaagagatggtttcggatctggtgtatgaaaaaagaggtgggattgtgtgcgtgggttagccgtaggatctgacggtggggattgtagagcagaaaaggcaggaccacatgggtgcgtgggtgggttgcagaatgcagatcaaggctggtgtggtatgaattgggtcgatgttttttttgtaaaggctgttccttttttgtcgagctagagagagctattgtgtttgtgtgtcaacgttaaagactcctcgattaaggcatacgtatttgcacgcacaccacttagggacacgtactttggccacacacaccatgccatatcaaaatttggtattgtttttctccattcaaacaaatgta

SEQ ID NO: 17895 - DNA, 8406 bp, Cannabis sativa
tattctctcaattggcataacgggacaaaatcaccatcctaaatttataatggtaaaagagtctacaaatatcatcttaaaaaaaaaaaaaaaatctacaaatatcaccgcattaaacagacatataaatttgatctatatttcacaataaatattacgatttttttggtatatatttttaagggttagctggctttggccaaaatcaaggtgctgtgattgacgccatgcttgaaaaccacttcccggctttacaaaataccatttaattttctctttttaacctctaatttttcatattgttactcttcaatctttaactagttttatatccaaatacagttcaccactagggtttcttattccattggattggaacataccaactttgtccctcgcccttattttatattttgcttctgaatcacggaattggaggcttttcttgagctggtaagtttcattgtatgatcaattgggaattaggctcgatgatgaatttgactttgtttgttttctggacaattttatatttttttactatgaataactttgactcatgcattattcttacttttgtagtattctagggtttaattgaactgatcaattgctgcctttcagtcgtatccaattttgattaattatgttgattttcggtgttaattgtatggtcaacggttcaatttcgacatgtgtaattgaatttttatccgatcaggacatggagtgaagggctgattgttgttgttttaaattcctcactaacattgtttaattttttttatgggaaatttttatttgagttcgacattaggatttgtttttaaaaaatagttttttttttcttgaactttttattgcataacatacatatttatgtggtgacatttttgtccttttcttttctttgctacgatgctgttagagtttagtatttttctgctggaaggaaagaataatcaagcaaattctgggtatttttctttcgtgaccatgtctgaaagtgtttgtatgtggaaatctgttattaacagttgcttttgacgttcagacaggtcttcaacaggctcggctcattatttactagtatcaactgtggctggagtagcatatccctattaatagtcgttgacaagtgtctttagagattaatatctgattattgtgagatcagaatatagtgagcagcttctcaattttctgaagctgctaaatttctggttggtgttggtgttatatgagtgaaaatgcacttgaagcgaaagcaagccttgctgttttcattgttcgtcgttgtttttcttggttttgcgaaagcagagtctgaacatgaaattgcacagaagttgatatcagctcctcacaagaatgtacgaagtaacgttattgatggtgtgggaactgagagttctttcagattggacgaaacaagtagtggtggagtgggtgagaggattagtggaagtagcaaagtttcgatctcaactgttgctttgttcacattggctatggcagctgccactggtttaggtgcagtaccttttttctttgtagagcttgatccacaatgggccggattatgcaatggaatggctgctggtgtgatgttggcagcaagctttgatctcattcaagaaggacaagaacacggtgctgggaattgggttgtgattgggattttagccgggggaattttcatttggctttgtaagcaggtgattacttttgttctttatggagttcacccttccttgcattattatttttgttgttaaaatacagtgtcgagattatattattctagtgtcgtgttaagaaacttgaattgatatgtatacacacacatattgtatttacctttaatctttatctctatttcagtttcttgagcaatacggtgaagtaagcatgttagatataaaaggcgcagatgcaacaaaggttgttcttgtcattgggataatgactcttcattcatttggtgagggctctggtgttggagtttcatttgctggcaacaagggtttctctcaaggccttctggtaactctggctattgcagtgcacaacataccagaaggattagctgttagtatggtgcttgcagcaaggggagtgtctccgcagaatgccatgttatggagtgtaatcacatcactgcctcaggtattgtcttgtaaattgatcacaattctcagctttgtgaagggaaatcccatattagtacattggtcttttttcttcaaattattgatgccttcaattatttagttattattttgaagaaaacttcaagtacttcgtagaatacaataaatacataaaacagagtggctcttaggaagatgttaaacggatgaattgttgtaggaatgaacaaaaattgattgaagaaccacatgttcttttattgggattttggtctagtctatatgatggccttgttaattgttatttgcttgaaaattactagaatggacctctgttgtcttctggtatgcttaaggtctatttgtgtagcacaaccctatgattaacagaacaggcagacacacacacacacacacacacactgacacacacatatttgtgtagctcagtcctatgattaacggaacaggcagacatgacacagacacaaacacatcctctttcatcataatcaagacacaaactaaatgatttacaaagcaagtttctcgtcaaaacacatctggagactgcctttattttacacatttagttatcttacataggaggaaaatcttcatgaaataattaatgatcatgttttgataattacttttctggtctcttcataatattatcccttgtaatactttttccttgcagccacttgtagcagttcctgcattcatgtgtgcagatgcattcaacaagtttctgcctttctgtacaggctttgctgccggatgtatgatctggatggttgttgctgaggtacttcctgatgcattcaaggtaataaacctcacatagttgtgttgatttcctgttactagaataattgatgatgaccaagtcaagtgctagaaggatttatagaacatgaaaaaagagtgaaattgagaatgtttcgaaaactctatgtttgatgtttgtggtaatttgtgtcagtttttatttgagtccttttctcttgtagcttttaatttctaggcatgtaatgtcaatttcttctcacatttggcttgtaggctgcctctccatcgcaggttgcctcagcagctactctctctgttgcatttatggaagctcttagcactatgtttcaaagttttacccatgactacaagtgagtgtcttggatgtttatgttgtctcagatgtagcaactctgttatattatttggataatgtggtttattgcctgttgtgagagagagttatcatttaccatgtgctacagctgagtatcaagctgtgtttcataaaaagattatttgttgagatatctgatgtgtgttccatatccattattcttcattagctgaaatgaaacttgaactttttgcattttaacaatataaaattagtatcttccaaccagatcaatgacaagttttctatgtcttattaatgcaacctgtatttcctattaatttggatgataccttataatctctttttttaaggatggcttgtttttctttttactgaaacttgaattttctacaaaatgcagctcagaggatgcttctggtttctttgtttcactactttttggtcttgggccattgcttggtggaattgttctggtttctttttctttggcttttcgcttgcagcatgctcttctcatgggtgcagcatctggcattgccttcgtccttggtgcttggcgaccactgcagctacttttttctgcaaagatgggagctatacctcttgtgtttttgcttgcagcaggtgctattttcgttcatggtgtaagctctaatattcttgggcttgctagtcggaaaaaatcatcagtgaatgacttgccaacagcaaatggtttccaagtgagcattcacactcttcaatcgttcttatcatgtggtgcagttgcccttcatgctttagctgaagggcttgcacttggtgtagctgcaccaaaagcttatgggcttggtcggcatatggtccttccagtctctttacacggtcttcctcgaggagcagctgttgcaagttgcatttttggtgctactgacagctggcaagcatcccttgcagctgctgccctaattggtttcatgggtccagtgtctgcaattggagcaatacttgcaggaatcgactatagtggtttagaccatgtgatggtgtttgcttgtggagggctactaccatgtttcggaaatataatcaagagagctgcaagattggactcgaggaaatctgtctgtggcctcattataggactggggtttgccaccttgtgtttgacgtgcaccaaattagtttgcttgcatacaccttactgcaattctgcaccagaggctgttagatgagattgattgtgtgagggttgtgtaaactaatagttggttgtcactggagctgttgttgggggtacaagtttgggacacctgttgaagccttttttcaaagagaattagtaaacagaagtgaacggagaagattttctttaaatcagtatgtcatcctatactttgagagacaagccaagcttttctacacccacaaaaggcttcagcatttcatatattgattattgtattaatattattattattgatttttgaacaatagaggtgatacaaatctccttgtaggcaaccattcttgccgtgagtcatgtacttaaatttatcactagaaagcaaggtggttgtgattatacctctaaataatcgaccgtagttgacactgacttttttcttttgtgtatctgttcataactgcctatataatctgggccatgtatcactcaagttttatgtcaaatcatagttataaataagactaagcctttagaccagcgagtgttggacaaaatatactcaaaataataaatgttaggctaggtgtcacaacgtacatgcatgtgttaggtcagcatacctaccccctgtttttttttttttgaaaaagatacctactccctgtttggagatggaaatttcataaaagcatatttaaaaaggggacttataaagaagtccctcacaataatttgaggtgttggatcccttaaatcagaagaaaatttaaaatctttgtcacgtggccatgaattcatgaccttctactacaagtttttcaactactacaatattttatgaaaaagaaattatttttaaattgattttttttctatttgtattacaataaattttcaaggggtgaaacttcttgttgttccgtacctccaaaggggagggtgcaccaccataatcagagtcaggaatgtagcattccactactcgtagggagagagaaaattacggagatattaaaatttcatatcaaatttgttttttaatattagacaaaaaaaaaaaaaaaaaaaagaaaataagagcgcagaagagttttgtttgcaagttgcaaatgtacgggacatgtcacataagaacaagtattcatggacacaatttgttgttaccactgtaaattgctgctttataaatcttacagaaaaacatgaacacggggtccatatgttattattagccacaaagcttaattctcagattcaacaaacatgtcaagcctccaaacaagttcacagtgctttataaacaacaaaaaaaactattagttattacaaaagtaaaaaaaaaaaaactgcagccacggaagcccaatttttacttgttcaaagtcgactgattaatgctctgcaagccctcactctcttccaccaatttttccttctcagccgcagatccaatctctttggtcgccgttttctcaccctcaacgctttgagatcctgttgccctcgccaaaacgacaaacgacattccacccaggacattgttcaagcacctcaggaccaccaccgatgacttgaacagcagtggaggaagccctttgtccagcacaaactctattccgttcagggtttggtaccttagattgctgctgacgcccatgtggatcgcccaggtcatggcgttcagtaaagtcggcggcgccttgttcggtgtctcgaaagtcggatccatagctttcctcattttcatcagaccatttgatatggcagttccgacgagacctgcggcgaatccgaccgtagcaaacacggttcctttgtagacgaaggttcctagccggttcaccaagctgtaagcgcccggttcgaacatgtggctacttgggcaattggcgaaaatggcagggagactagatgaggaagatcccagggttggagctaggagatacatgagagtgaaattaagaatcgaaccgacgacgagggtcgagaatacgaaatctagctcgttgagaccaaaatttgggcgggaagccatgtcgccgaggacgcacgagctgacgcccacaacttcttccattaaaaccttgaaagggaattgtggatcggcagcaactctcgatctccacccgttcaggaaaagccctattggaccaaatgacgacgatttgtcttcgtgggcaccatcgcccccactccatcttccactatctcccccaccaccggaactgccatgtccaactccgctaccgccatttcctccagcgaatgaaatctcaagcttttcatgggatagagtctgaagaagcggtcgagaatcggaagaagtgatcgggaaagatactgaagtcggagtagtattggagatgcgaaggtggtcggaaccgttgcgatggtgattcgatagaggagaatagcgaaggagatgggcagtagccgccatggttttcttgcaaagcttctctgttttttttattttctttattatttatgtatacgagaattgttaggtgagtatcagagcagcggcaaaaaggtatctaaaagtaaccctaataatcgttaattagtttattaataaaaactctgttgcatatttttgttaaaaagaaaaaaaagattgagaaagtgggatgacaagtggcatgtgaatttggacagaattgtgggagaggtggtagtaaataaatggtgaccagtgaccagcaaatcactagcatgtttggagtcttgaataagaggtttggattcgactgttttattctatattatgtttggtgtatttctttttctttctttttttttttttttttaagtttggaagaattagatagtataatccaattaattaaattagtcccataaggatggatggattatcttaactgtaagtgagaaaaataatcttgctgtaaaatgtaattttaaagtgataaaaaaaattgatgttgtgatgtggtaggtttgtaaaaaaaaacagctcgtttcatttaaagggaaacatggcagaatacagaaggcaaatgaaagtagagctcaaaaaagaaaggatctaaagcagaactcaaaaaagaaaagaacgaacacttaaataggagctttgaaagcgagaaacaagaaagcgcacaaaggagcataagagaatcaatccatgtggactaattagaacaggcgaaaagagaaaaagttaacaatccttcacgcctataaataggagtctccctcattcgaaaaaagagacaaattcttgctcacgtcagactagtcaaaactttgtcagagtacattcgcaagaacactttgaggcttagagcacgaggagcaaaagacccaaacaaaattaagtaaattgagtgagaaattgtgcaaattgacatattgtatttttattacactgaacttaggtgtaaagaatttacagtcataatacaatttgttgttgtgtcaatttttgctatcaacattaacccatcaaaagaatgagttaaaatagttccattttttttttttttttaattttctaatatgtatatactagatggatattttgtattatttgaggttattaatacatactagatgaatattatattatttaatatgattagttttatttgaggttatattttcttttacaattatcatatgtaaatttacgatatatagtatttaattgtgattgataatcttacaaagtatataataatttgaaaaagatacttttaagtgatatgttgtataaagggttaaggaataaaagataaattcaaaatggcagtaaattatattaaaagtaataatatgggtatgaaattgtaaataaaataatgtgtaagatgttgatgttaaaatttttcatcactcataaaatatgcaataacaagattcaattctataaataaacatattacataaaattataagtgtataac

SEQ ID NO: 17896 - DNA, 4295 bp, Cannabis sativa
taatttttatatatatatatatacataaaaaaatcatacatcttaagtcttacactattcttattcccaaagtcatgttgttggtgcattttctaagacctttgttggttcttttccacccaaatgaaatgaaagaaagaattttgattacaaatacaatcacaacttacaatgaactctacatcattggttcttttccacccaaatgaaacgaaagcaagaattttgtattacaaatacaatcaaaacttacaatggactctacatcatagtttgcaatttacagtatgttttcaagattaatacaatttctcaactcattccttctcaaaatgttagaataactaaaaaaagccaaaaaacaataaacaatgtccaactcaaacaacccttaaaatttacaagtatatttatttctttcacactccaaacaccatttctaccttttcttaccaagaaacttcataaatgactacccaacacgcatattcttgaattgttttcatagtattttccgaaacacaaattttaatccaaaaatcaattctttattggtctacatcacacaacaaatcattattaaatcatcattaattttctcaagcacttcaacaaaactttctagtaagaacccaaaacttaaaaaaacaaattttctcaaactcaaagtcaaaatacttacaatgtataaactcaaaacgtgttccattcaaattcatactcggtcaataaccgtgttcaactcgcataccaacatagatatataatataaaaatgtaatctttattcagaacaagtatcaaagaaaccatttttatttttctcaagcttcatcaatgaaattttctcgagaaaatcatatgggtaaagagaaaacgattcaagaagaagaagaaaaagactacattgatcaactcccagatgaaattcttctcacaatcttcaacaaaattctcgatgccaaatccctaatccaatgtcgaacgatttcgaaacgtttcaattctttaattccccaaatcgattcaatttacctaaatctttctcatcgaaaaattccccaaaagaaaccttttttcaatatccccaaatcgattcgatttctacagagcattatttctcctaataaaaccaaatcgagattgaacaacaacactcggaatattctccattaccaacctgaagaagctctcaagaatttcaatcacgtcaaatccctaaatctcgagattccttcttctgaagagaaaaacgacaagtcgtttttgaaatgggcagcagagttcggaaccagtttaaagagttgcgtaattatcggggctaattcgataagcaaaaacgacaatgaaaattcgcaatctcgaattgaatctcagccgttgattttatccgacgaggaattgaagctgcgaatcgtgtggatgatatcgtctttaatggctgcttcgtcaagacactacatgttgaaacgcatcgtcgtagattttccaactatatcaaacgtcgtcgtttcggatgaggagaaaagagggaaggtttatatgggagcggagcaactcagtgagttgagattgaactcggtaaacgacgagtttaaattgtcgttggagaggagtgttatacctgatttgagaatgaaagtgtggtatgtgcctaagcttgaattggggtgtgggcttgtgatgagtggggccactcttgtggtgattaggcccatggtgagtggtgatcaggcccaggcccaggcccaggcccatgatgataatgatgtgtttagaaatgggtttgattatgaaaatgatgaagagaagaagattgtgggtgaagctattggtgagatgattaagatgaagaagacttatgttatggaaatgacctctttttaattatatcactttgttcaatagttttttttttatttattttttgtgatacgaaaattgattatttattggaaattctttgtaagtttaaactaaaacaatttacataattaaaatgtggtgtttgtgtttcattttggttttggttttatgaattttgttgtagtgattaatatcttttttacatctatttaatttaattatatattagattttagattttatcatctaattcgatttaattaatttcagtcatccaatcaatctaacatctattgaatatgttagattggatcaattctatcaattagatgtatttcatatatatttatttgtttaatttaggtttattcaatattttaaatttagtattttttttttggatcggatcatatccatccaatcttaaagtacaatataatatgtattggattggactcggtccactcaaaaagaataatattttaatatgaatttatatatatattttatttataatagtataaaatctaattactcatctaaactaaataaaaatattaattagttcgatcggatgttggatgtaataatttattagacactctatccaacatccgatcaaatctaattgggttttaaaaataacatcatatctgagctgatcacaattagatatccagtgtttgacggtcagttgcaattagattggtcggttaacattaaattgaatcaatttatgacatctctagtagtaatagttgaatttaattttgagcgataatatgttttactttaagtaaaaagaaagaacgaaaaaaaatattattttaaactttatattttacaaaaattatcggttagtctctctgttttgataaatatcaaattgaaccctaaattttcaaaaaaaaaaaaaaaagtacaaaatactaaaataatatcttgatgtaaatgatatttactcttccaataagatccaaaataatatttattcaataaactcaccaaaatataaataaaaaccgtaaacgacatgaaaagtcacaaaacgacaccaaaaactaaaaacgacaaaataaaaagcattattgtcttcgtcgtcgtcaagctcagttggtcaaaccttactgcgcagccagccatggaggttgacccagcagtagaatccgaaccagaaatcgttaacttcggcaaatctataatagttccaagtgttcaggagctagccaagcttccattactccaccttcctccacgctattcccattgctttcaacaatctccgatcaactccaatgatccattgtcgattccatcaatccctattattgatctccaccgtttgggtacgacggaattcactgattctgaggttcagagattacactccgcttgtcgagagtggggatttttccaggtaaggaagaacccattttgccaatttggctataatttcataaagtttgctactttactcagaagaacccatttgcccatttcaattaaatgcatttttagaacccatttgcccatttgaattaaatgcattcttccttatgagcattggttattttttcatattagctgaaaaaaagttttttttttttttttgaataatattagctgaaaaaatgtttgttactttagttacaccagaagaatccatttgcccatttgaagtaattgcatttttcctcatgagcattggttgtttttttatattagctaaaaaaaaaaagaaaaaagtttggtactttagttacaccagaagaacccatttgcccaatgtgaagtaaatgctttttaccttatgagcattggttatgaaaaccatttgcccatttgaagtaaatgcatttttccttatgagcattggttattttttcatattagctgaaaaaaagtttgttactttacttacaccagaagaatccatttgcccatttgaagtaaatgcatttgtccttatgagcactggttgtttttttatattagctaaaaaaaaggaaaaaagtttgctactttagttacaccagaagaacccatttgcccaatgtgaagtaaatgctttttactttatgagcttggttgtttttttatatttgctaaaaaaaaagtatgctttcaaaatgtggccttttaaaaaagtggtgtcaactttgttaatctgtttatatttgggctgacttagtttcctctggttgttttttcatgtgggtttaatctgcagaggattttgtgctatggttatttttcatagtagttaaacaagttttgctactttatactcacaccagaagaacccatttgcccaatttgaagtaaatgcacagcattggttgttctttcatattagctaataaaagtttgctactttacttaagtttttaaaaagtggccttaaaagagtttgtggtgtagctcatcaaa

SEQ ID NO: 17897 - DNA, 4649 bp, Cannabis sativa
ttttttatggtttaagtttttggtataataataaaattttttaattatttaagcatataaaatcaaaatttcctatgtaattatataatgggcatgttaaataaaatttagaaagcgttgaaaataaaagattcagaaacagaacaaattacaagagtacagaaattcaggaacaaactccctcagttgttaattgtcaaaaattacaaatacaagtgctttaagggacttcttttataatttgatccaaattcagaatcctatctggtacaacaaaccttgcccaatcaatgcagaaagttgatccaaattccaaaaaagcttaaactcaaataaaaaatggagtccttggttggtcaatgtacttagaaagtcctcgagtacttgcgaatttcatacattatggaagatatggataccaaatccttgttgagtgcagagccaccgacgatcttctttatgcaatcggagagtctggtgtagtaaaggaggagctgagtcaatgcagccctcaatatttccataccacacaagaagttgctgaaagaggtgatgacatctttgtgcatcagctcaatggcaactttccatctactaccaaaatctttcaccagtggctcaacctcaccaacggttataggcttctcagtagtagcagttgggtcctccgctgttacacagtacaaaattggaaaatcggtaaatttatgtgatgattcaacagagtacatactagttgtcgattacaaacttacaagctcgagttttcacaaatttgatcaagtcattgaaatgctcgagaagcaattcttcctgcaaagataaacaaatgaaatcaagacaagctacaatgcgagtgaaagaacaggacaaaataatgcaatctaattaagaggtctcatagttctctcttgtgtgtgttttttctgttcactttaatattttatggccaaaactaaaaattgaactgttgtctttcatcattaaagatttctgtgtgatgttaccacaaacaatgcagtgttgctcttcaacaactcctcaaagtgcatttgaatttttccaccttctgggccagcttcctgaaatataagtgccaaagattgtgtaacgctggtcagaggccaaaggatatagaaaaattcttgaccaaccagcaaagtatcagataaaaggtatttttataaataagaagaccgaatccaacaaactcatcaacatgaatgccttgttcaattttatggtagcataggtcacctaatttaaaagcagaatttaaatgatccttttaccttcagcacagcaattgtcatatcatagttgttaatcaaaaacacagtttgtagcttgggtttcgggaatgtcttggcaagcttaatcagcaaatcatcaatagccattcgcaatctttctagattcaaatcaagctgcaaaacatggaggagggtattatcagaactgacgtattatcagaactgactatgaataattgactagcttgattagtttcttcaataaattttttcgacttctccacactaacctggccatctccatactcaacattgagatgaatcagcgaagctgtgaactcggcataacgcctcattacatagtgaggatgaatatcatcttcccacaaagttctcacgtttgcattccttaggctattgagatgcatgtcaaacaccattttaaatcgaggccataagacaatgttgatctgctcaaagtaaatcatcagttgaagtcagaatacacaatttaccaatccgacaattttaacacatcccacttactcaacacttgatgaatctatgcttttaggctataaggattattatgttcacacaaactattgaaggacacaaacacaggtgagtgacactgaaaaacaatcatctatgggtacttgcatgcagaaatatgaatatgaaacaaatattaccttgtctaaatatgaatccaagcatggtatccgtcgccttgacataataagctataaaaaaaaatgtcattatcaaataaagaaatagatataagggcttactcagagcaatgcttgtattacggtggctgctatttttacacggtaatacttgcattactagtttaggtgtatgattgaaataatacctgatgctggtgtatgatgcgaatcataagcattaagcctatagcatcataacaattcggaagtattgaattgaaatgctcatcaatgacagcaaatgggcctgatatccgagaaattattttaattagttatttaacaccatctctgatatcataattagttattctaatatgacagcaaatgggcctgacatcataattaattattcaaaaaatccaatttgaagatgtgaaagtaatgccacagccatattgtatagctttagaaattaattttgctgccatataaagttcaaacatcacaaattactagaactaatgctgttttccattgcttttttcttaaaaaaatttaacatctaaggtggtagcactccttaaagtagcgaagagtttatcactgacaaagtaaccatgcaggacacaatagaagttcagaaggaaccacacagatgacgctttcattttcaaagtacatttagtatttaccggcaaaaatatcataaaatatagattcctccccaaaaaaatcaccacagaaatgatacctgcagattttaaaccagaaaattagtgaacatatcgatgtggactatatctttgtctcttttctgaatattatacgtaaagatattaaggatcagggaaaaatcttcagtactcagaagtagcagtatccataagcagcttgtgcaagctccggaagaggacttcgtaagggtacttgctagagctggcttcagctatatgtgggattaaagctggttcctcaacttcctgaaaaaagaaaaataatgaaaactgagaatactataaactgcaaataaaacttatttgtcttcagtgaaaaactcacaaattattttcacagttttaagtgaattaacaaagcataaaaatgagaggaaaagaataacatgtttgaataacctttaaaattttacttctctctccaagagcaaaaacagcagaccggttcttcagtggttctcttcctcttgagaatagactagtatttcttgtatctacaccaatcagatcactcgatgtagcaatgtccaactgtagtttctctagggcctgaatataagcccggaaatgggcacctaaaacctgtaatcattcatcacacttcaatatatgcaaggaatattttttattacattaaaactaaatcttctaagaaataattcataattacaaattgaagtacaaaaaggaccttgttcattgtgtcaatatatgctccacgaacctcaacatacacctccttgccattttccttgagaaaggtaacaatatacctacatttccatggatttacaatatgaacaaaaaataaatgtcttagcaagtttagagttgagagatgttggaataagtaaacactgtataatatgataataaaagcatgagcttaaatgtaacaaaagcattagcaaccataaattaaagagaaacattaacaattcaggaaaagagaactacaggatgttaccagaattactcacttgtacttcaaaagaatgttctgttgaaggatctggatattagtttttggttttctcaatgcgtaaagcttctgaacaatgaagtcatacacctgaaaaaagataaatataataggctcactgagattttaagtactaatcaaaggtcctttagtaaccttctattttctgcttttcttatcaaagcttgttaaaagaaaacctccaccattttttttattgctcaaaactaaaaaatcaagtaaaaatgctataaagcaagtttcaaaacatgattaagttgatgaatttaacaaaaaaaaaataaaaaaacaaaagaaaaaaacacacttatggggctggctatgaatcttagcatcataattttaattaagacggagtacttccaatccacagcaactacgcaaccaaaagttctataagaagacatgtacataggtaataaattatagcagccagtatacatatcacatgcataaagtttgccaggatacaagtacagcataaacgttttagtgaaataattcctaaaacaaacgtgaatataaaagtaaacaatctatatcaggttacgctggtaactttagacgtaaataaaacgttttagtgaaataattcctaaaacaaacgtgaatataaaactaaacaatctatatcactggtaactttaaaaaactcacccttgaaactgctttctgtcgaagtttttcaagctctggttgaacatcttttagagcttttgacattttaaccatctgatccacttctacgaacttcaatttcttgctaagaatctcaagagttctcatatactcatcattgacctggtgtacaaatgaaatcgagtgcgttaaaagctgtagaatgtcagggtcagattaagttccacaataataaaacaaccagaaaataaatgtacaattcatcgtctatggacatgttcaatgtaactgcatttaagaatttaatgacttctttataaaaaaaacacaaaaaaaaaaa

SEQ ID NO: 17898 - DNA, 4516 bp, Cannabis sativa
  modified_base (26)..(27): a, c, t, g, unknown or other
tattcacgattttcaataacctcgtnnattagcaacgagctacacagtacatttaaaatcacgctaacacgcctttaatagttagggtgttacaccaggcgtcgaagaaacacaaaggtatgagccctttactagcaaacatacatgtgtccaaaagaataggtgcatgatcagacaacgtgattgggaaattaagaatcctcgcttcaggaaataaggcaatccaatccattgagctaatagctctatcgaggtgctctcgaatcagacctcctttaaacctcttattgtgccaagtaaagttgcatcctttgaatctcagatcaactccccctgttctaccaaaaaacttagacaaccatcttgtttctcttctagtgactctatgcccccgcttctcttttgcactactgagccaattcaagtcccaaaacaatctaaggctattaaaagtgtccaattttaaggacaaattattccagaaatagtttttttcttcttcttcataaggagtgccatatgtagcataaagcttccacattgaacccacttggtaatcccacacatcggcctctataatactattatcaatattaagaatattgattttaacttccccattccacattagacaaaaattccctaccaaaccaataacagggatacaaaccatattatagtagcccaaacaacgagatacttccaccattctttctttagccattcttgtttctatgagaagatacactccgatttgtattttctcacccaagccatcaagcttgatatgtttaaagcctatgacagcatggagtgggtctttatacgtagagtgctctcggcaaacagttttgatgaaaattgttgtaatcttatcatgaagtgtatcacgagtgtgtcttattcggtgcttctcaacgggagtcccataaagaaaattgttccccaaaggggattgcggcaaggggatcctctttctccatttatattcctcctttgtcatgacgttttattgaagcttcttcacaaagcaaagatggagggtcgggtccatgggataaaaatagcttggacagctccttcgatctcccatttaatgttcgcggatgacaccattctttttgggcgtgctgatgaaaggaaagttgatactttaattcaatgtttagctctgtatgagaggtggtcgggccaggtgtgtagtaaatccaagtctagtattttttttttcaaaaaacatgagctatggaaggaaaaaattgattttaaatcaccttaagattaaagattcgaatggggaagaacgtcatctaggcatcccatttgttttcaaaagaagaaaaagagatgactatcggaagcttgtggatggtatgagacaaagtttggaaggttggaagctgaaactattattgtacataggcagactcactttgatcacatcggtaactgcctctttgccaatctatgctatgtcaacaaataaggtccctcttgctacttgtcaaagtttggatggcctggtgaggaaattctagtggacaggtaatatggaaaaagaaagattcatgtcctttagatcgtgggatctcatctatcaatcaaaagtccatagaggtttgggtttgcgtaggtttgaggatatgaacaaagccttgctatcgaaacttgcttggagtatggtaatgatacctctaagccgtgggttcaatgtctcttgcaaaattattgtggatcacaaaatttttggtatgtggagcatagatcaaatgagtcgactatttggaggggtatttttcactctaaggatatcattctcaatggttcggtatccttggctgctgttggtgactctattgatgtatggaaccaaccttggatcccttggttggattttaaggacttccatgaactaatgaagaacttgagaggtaaaagtttcaccataaaaacaatggcagacatttcaactgataatgaatcaaattgggagttgatttcccaaatctttgggccgaatattggtaaaaaaaatccttgatatcccaagagttccattatcttttggtgaccaacaaatttggaaacacaatagaaatggaaaattatcggtaaaggatgcctacttggttgatcaagctgaaagattttatcctaagaaagatctgtggaagtggatttggcacccttctatgcatccaaaaattacaattatgctttggaggatcctaaacgaagcgctccctaccaagacgaggctgccgcttattgtggataaaaattgtttcttgtgtgatggattggaagagatttcccttcatcttttcaaggaatgcagttttgctaaagccatatggttctcgagtcctttcccttgccgtattgatacatttcctggagactctcttctgcaaaccttagaggtaatgactcaaaattctcccaatagttgcaaaaggcttatcatactctattttggttgtgtggctactgttatttggcagtatagaaatttgatttgacttaagggaggtgctatcgatttgggcactgcaatccgaaaaatcaacaacctcttcaatgaatattctgagctggttactactgatctgaagaaaagttctttgaccccggggtgcttggagaagcccatctgggatggtacgaacattgtgatatgtacaaatgtgtcttgggaggatggtgtggctggtattgcagctgtgatgacgaattgcagtgatggaacttgggcgcattattctcttcgaacaactgctgaaactgctttggaggctgaagctctggcaatcaaaatggcattaacttgggctgctgcatcttcctggagtaatattcatgtgttttccgattgtcaagttgctactcgtaatttttccttaaacaagtgtatccctgattggagactcttgcgtgtgtcgttttctattttagatttagttaagaatttcaaagtctataagttttctttcttgaatcggtgtttcaacacctttgcgaatggacttgctaaaagtgctaggatctctagtattaatgctggtttgatatttggggagggaatttcccctgtaattcccatcttttttcctttgatttaatgaactaagtttcttttaaaaaataaaataaaagcccaaacattcttacatggtcttcgttggtgtccaaatatgctttaggcttagacatggaagaaatttggattaggcgtagacctgtttattgtttattgtttattgtaccctcagctgattttcttcatactaatggataggtgataagacccgagaattctaaactcaagcacacaatgaaataacagcaaatagttaaaaataacagcaatagtaacaagagaatagtagcaaaatagtagccaaacagtaaaaatgtatgtattatatgtatgagtacatcaattacaattggtgggagcccttaggccctattcgatgcaaagagtgatttactcaatacattgcataccctcactactcccttactcacttatatatactattgcattccctcctaaacactacccccaatacaaagactcaaatacctttttatttaatatatgctagcccaccatattaatcctagggcctaatattatcggtcgcccgaagttcaccttgtcctcaaggcgattgatgaaatcacccatgagagccccatgttgtgcgcgacctctgtcaacgaactaggctagtaatgtggtattttgtgatgtcctggatgcatagtcagaatgttggtgttgtatttggcgccctctattgaaaatccaactctggaatggcattagtaaactacaaaacttccactttgaaacagtttgtgatgtccccaataccagaaaatagagccaaggaaacttgaatagctctcccacagcaataccagcaagaacaaatctgtcacctatggttttgttagagttgatggaccgtaagtcgcatgtcaaagcttcctttaatccataacaccccgtccagctagttacgtaagcaaactccaaccaagtgaccaccaaaaatttctttgaaatgcagaaaactcgacccagatcccacacatgaaagaaccaaatagttatggaacttacaaattttgattggtcgatagaagggaaaactcgagaaaaatgaagttgtttctttccatggctagaatcacggtagctgtcgctgccatgtgcgacactagaaaaaaagtgttcaagtttgagcttgggtccttccatccatggtagatgatgatggtaagagaaggtacctggaaagactccatgtcgtgatagaaagatgaagagggaataggaaaatgggccatcatattgggttgtacctttcttgcgtccaaaagggaagattcattaattgaaaaaaagtagaaattatactatatatataagaaaattataagagtttacttttttatggcataaataaataatgctaaggggttatgattttttttttttttt

SEQ ID NO: 17899 - DNA, 3192 bp, Cannabis sativa
  modified_base (2372)..(2377): a, c, t, g, unknown or other
aacttttgtaaaactcaaagttcaaagtagtatttatcaaaaaaaaaaaaaaaaaaaaaattatttaaccataaaaatgtaattctttccaaaaaaaaaaaaaaaaaaaaccttaggcaaaaacccgaaagaacatattgcacgtgcggcgcagtttagaaaataaaaaagattaaagttgatcaaacggcatagatgggataaaggataaggatgaagaagcaccagatcactccatctcactctccttatcctgcgccactctctctccactccactctactctcttatggccgatgacttcaacccattccaacccccaatcaccgccgcctcaaccgccacaattccaccacccaccaccgctacaccacccccacagctcacggcacctccatcctccttcgacaacccagggccatctttggcccctaaacgacaacgccgccccagtgtccgattgggtgagattggcgaccaaccagctgccacactctcctacgactctcacgttcggagggccaagcacccatggaggttctccagagactcttccgctgttgcggctacgtctaagtccgtaaaggcccggtctttaacaaacctcgtcaacggcggtgattcccaagaaattgcggaggcggaagataggaatcagaacggagacgctcttaatttcgaattggggatccgaagagtgaagtcgaagcgagcaacggcggttaaaagggtccgatcgaattgggtttcgaattcgaattctaagcaactggacgatggggcagatagtagggaggaattgggggaagaagggtttagggatttcgatcctgaattggatagtccaatgagggagcagagcccagttcagtcgttggataacgcgggcgtggatacgtggaatgatagtttgccggaggctagttgtggtggagtgaggtcgtggttgatagagttgggtttgagtaggtatgctccggtgttcgagatacacgaggtagacgacgacgttttgcccatgttgactttggaggatcttaaggatatgggaatcaacgccgttggttccaggcggaaaatgtactctgcaattcagaagcttggtaagggattttcatgagtttcaatccctttttttggtcaattataaatatttatttactaaaatagttaagtttaacttgatcatcatcaccatcatcataggattaaaaagaaaaaaaagaacttgaccactataagttatcggccttagctgtgaaaaatgttactaaaagaaaaaaaatgctggtctgagaagtttttttctgttttctctttacttacttctcttacaataaaactaatcactatgtttgatttgaattgaagtactcttctctcgaatgattttacttctattaattttgacattgctttgctagttagtttctcttttcaataaaccaagagctcaattaatgtatccacagaactggctgatcagataactcatcaaatccaatacagcaattgctatatataataaatctctatgctaaaagcaaagtctttgcaccataccaagacatttgttagtcttgaatctgtatcatgtatacaaacgtgaaatgatatttgataattgaggatcaaattttatggcagtgtagtttgcaatatacaatcagcaagtgttgtgtttagaacattgtggggttccagtttcgtaatcaactaaaatttggcttggactttgatattgtgctgcctttgaaatgagaaggatgttattaagaaactgagccttgagatgaatgcctcccctgcctgcataaccaactagttttgaccacaccattgctagttcttttatgcttcatataattgaaacactaatttgagaacctctaatcaactctttcccttaattattggctttgttcgttaccaagttgcctttgaatcttacaagatggttttgtgttattttgttttacacgatgaaactttacacacagtagtagacacgacatgatggataaaaatacttgtattccgtagtataaaaaacatgtgtatattgttgaagcaaaaaatgaaatatatatatgtgtatggcaattaggattttttttttctttcgaactttgacgtgtatcaaactatgttcctgaattttttttgccgttaaaaattttccctaaactattgagattgttagatttaaggactttcgtctaattttattcaattttactatttcattgattgtttatgtactaaactatgttctatagactttgatatttaccaaattatgcccctcgaagcttgatatgcactaaatcatgtccttgaactttcatcttagaatttttttactaaaattnnnnnnaagtccttaaatctaacaatttcaatagtttaaggggaatttttaacgacaaaaaaagtttagggggcgtgatttaatacatgtttgggaaaaaaatcctaattaacctatatataattaaattggataagtcatttttatatatagttgtctctttcattgtctttttacatttgcaaaaaacaatggatttttgttctctcatcttttgttttcttctatctctatatttctcaaaatctttgtgaagaaattggattacacatttattaaagaaaaatgctaaagagtaccagtggtgtctagcacctttctatgtattaatatcgctattggttaaagtaagcatcgagtttcatataatttaatataataacttttagatagtatcgctagccaatcgcgtgctaggcaccactaatgtctaagagcaatgctcttacttaaaatatgttgttaaactggacaggtaataaaatgcaccttttattaactaattggacttgaaatttagcagatcaataatcctgttaattaatgtaatttttctttttgataaattaatgtaataacattttagttacaaggaagtagcagcccattagtactcttagattgaaaatagaggaaattacattctatatcctttttatattgtgctcttttatttttactttctttttaaaaatctatcatttttacctatttttataaatattatatcaattttgcccttattatttcaagatattctccatgtgattctcttatgtaagggtattttgggtacaatacatataaaaagaggtatgttt

SEQ ID NO: 17900 - DNA, 4982 bp, Cannabis sativa
  modified_base (1022)..(1024): a, c, t, g, unknown or other
ttccaaacatatattaaaagaatttactcacttataaaagtcatattaccaagagtagtaaaactactaattgaaaaagaggaatgcaggtttaataatttttgcacatgaatcaaattattataataagtaacttagttgaggatttaatggaatttgcccctatttaaaaccccaaaagtgagtgtttgttggcaattaggacaaggaggcattatagtagtggcactataatgtgttattttcaagttaataatcaattaagaaatcggttgagattcccatcacatatcatatatacacattcttgtttcatatatgttcattaaatattatatatatgtgtcccaaaacaagtcaagaaaagcacattgtgtttgggaaaagcacttaaatctcttttaactaatctcagttttataaagactataaaggaacaacagcaaggcaatttcctaaaataactttgcttaaagttgcatatattgatgtgagacgcactctaacctaccaagctatcattaaaaatatatttcatttttcttcattctcttttctactattggatcatattgtccggccaaaagttgatctagctatttcaatttttcaaaagcaaactcttgagtgcattatctttcgaaattaatgcttaatttaaaatatttgtttataggaaaaataatttatttttgaataaaaataaattttattagacagaaatatccgctaagacaaaggactgaagagcaagaggaatatcactctcagaaaagagacgacttgaccaataataaacaccacgtgccatacagtgcgcggctttattagcagaccgtttaacatgaccaataaaaacattacttaaagaagataaaataacttgataatctttaacaaataatccaaaaatagaagacatagataccgaactaagaatagcttgaacaactaaattgcagtctgtctctaaaatgacatttgacatgttttttctctttatccaactaagtgcttctttnnnactgagaacttctgcaatttcgggtcggcagctgacagaaaaaatagttgaaaacgcctccatcactcggccatcgcagtcgcgtgctacaaaacgcgtgcctatctcatttgtagcttcaaaaactgccccatccacattaatttttaattgaccagcagccggtttggactagtaatctcttgtgtcagtgccaattgaaagccagagacaccaagcctagctgcttagactgagcactcgtccattgacaaagagtggtacgagccagccaaataacatcagcagcactatagcttctaccattccaaagcattataaaaaataattacttttagtaataatttttcaatcacaatataattttttgtgactaaatatgatttttagtcacaataaaaagttatttgtgattaaaatataatatttaaatacaacacgtttttaatttaatttagttataataaatattgtaattagaaatacatttagtcaagataaattgtgattttcatgattaatacatttagtcatgaacatttttgtcataacataggaataataatttataattagttacaatattttttattatttttaattataaatattattatgtctgaaagtaaaaaaatttgtattgtcctctgacgttgctaaagaaatatttatatattacattgaaagggatgttgttgtattgtatggtgggatcatattatagtaattcaaattgttcaacaaatttcttttaacaaatctacaattatgttgctggccaagtccttattgtttgttaattaatatattattattccaatttccaaatggcattaattgaattgaactataaaatcatgatccaatgataacctcttattatgagcctttttttcactcttcagaaattttgtataaagggtacactttcgtatcatggtcgtgatcattatgttgtatctctctattaatttctttttataaggtagtgtctctcctccattttttttaagtttaaataacaatattattatgttcgaacctaattaaattattatctaactagagagagagaagagaaatgtatatgggtaactctcatatcaccctcttcaaaactatatataataatgaaaatgtatagtttacaggtaaaaaacaattttgctgaaaaataaaaatacaaaatattttttcctttatacactttcatcttatggtaagtaatccatagcaatcttcttacaagaaataatcttcataaaaaacatatctttattgaatatactatttgcccaatttgtgagttggacttatgctcatctcttttttgattgtctttactcatggagagtgttacaacagattaagccttagttaggatgtcaactttggccaagttcatttgaagaactaatttttggatgattaagaggcctagaaaactcgttactaagattttttatgcagtattagtagaaactacatatgacattaggttaaatcgcaatttgtgcatttttgagaggaaatacttggcattgaagtgtatagatcgaatcattaaagagagtttaaaagttaaattgaattttgtaccggaaaggaaattatcaaattttgataaattggtgattaatagaaatattatttctttcataaaaaaaaaacaaaacaaaacaaaatatggcacaaaatgttgaaagattttatcatatagtctatacattttgcaactgtatttttagtttgaataaataaataaatttaaagtacgtttagtaatatttttaattttattttttaaattataaaaatgaaagttaaatttttgtcttcaaaaagtaaaatgtactttataattgtttttgttttttgatttcaaaaataaaaataaagtttgtaaattttatttttattttttattttggtgaggaatgagaaattgagatgaaaaaaagtgggacgatcgggtcgagctcagggtctaaatctagagtttgaggtccaaatacgggtctgggtctgaggtcgagggttagatctaaggaccaataaatttacacattattacatcactaataatgtaaaataaaaacctctccaagtatgttacagattataatatgtaatataaaattggtaatgtaataatatgtgtaaattgtgtttgtaatttgaatgggtcacaaatattatttcattaaccaaacatttgacattaagacataatacatctactaaattactatatattcctttcataaattgcttattaatgttttttctatccaaaccaaacatcaaattacattaaattaaccaaccatttttctttaatgataaccaactcttagagtaatgttagcttaaccaaagtggttcaccaaatttcctctaaaactaggacaaaacctatgtatcaataaatgtgacatttgcattgataaagttcattttttttgaaacaacattgataaagttcattcaaatatcaaaacatatcaacaactattttaattataaaaacatcacatcggctagtcaattaattaggccaagtctaatttactttttaagcagtagtattagatgttcaacaacattttctactaaagcaaaaactaggtccaaaaatattggatcaaaattgaaactttattgatatgcatattgctagaattacatgtttgagtcaattatacaaaccaaaaagttatttactaatttcaacttaattacataaatattattgcacataagaaccaacaaaaaaaaatactttaaagtataagcgttgaatgcggaatagatattcatggattcattgacatactccactttcttttcatcctcaaatacattttattaatataccaaaaaaatatttcgaatagaaacattctactttagtttaatttctttttttcacaaaaaccaatactgaaatgacaataccaaaatagaatataaaactgaaatctatatcaaaataccaaagtgaggtctctcattcctttaaattggttaatttataaaatcttcattaccgacacacaaactatattgttcattttaggctcatttttttgtaaccaaaatgggtacaatattagctagtgctactaattaactgcctcattaatactcactgcctagagcttgaagttgaagaactccaaagcttaaataatttcttcatatatatatatatatatatatatataaatatttataggatggtacatttttaatctattctttaaaatacattaattagtaattttttttagtataaaatttttatattacatcatacactaattatgttaaaatactgaatttttactttcattaatttttatttttatttattttattaattctaaatatatataaagtttattattgtaaaaataatatcacgtgtaatatttaattgatgtatgatactaacacaaaataaataaaattatatagaaccccatcaaagaggatagtttcatccaccgtcactcagtttggtatttgcggataaaaaattatcttattttatgtccattctgtgtttaggcaaggcattctcgtctaataagagagatttgtaaaatttctttgcttagtctttttctcttttactgaaaaaaaaaaaaaaagatcacgtgttgcagattttgtctctacctttcggtcttatgacaattctagggccatgtactatctcacgaaggttcatatctcaaagataattcattataagtcggtctttaaaggccaaacataatcggggttgggtcagagtcgaactcaacaaaggagaaggtcaataaaacttttctaccactacaactacacaagacaacacgtggtccacgcctattcttactcttgatatgtcaatttgttttacctcataacattcaaaacatactatataaactctagagacgacgttctt

SEQ ID NO: 17901 - DNA, 5565 bp, Cannabis sativa
aaatacagacaaaaacaaaagagaaattgagaaattaacgaaatgggtctatcaagattttataagctttataaaaaaaatccttacaactcagtaacaactcggtaatccccctgagtagagcatgtgaccccagaccaaggtggaagatcgccatcgccacaaggatcgtctccaatccaagcatacaccactctccatccgagtgaggcttttatctcattcaaagctttcactgcccaaaaaacaaaacaaaacaaaatcagacccaaaaaagatagagcaaaccgacaccaaaatagagatcggaggaagctcaccgtcgcgtttgagggttttggcgtggataagaagagggaatgcaaggatcagaataaatgtcggaatcagaaaacgcagccccatagtttatggggttgcagaaacacaaacagatccttttgttcttggaaattggattgaaaaatcaattttggttttgtgaatctcggattttgtggaaatggcgaaggtaatgatgagcgagagagatcgagtgagggtgagagggaatcgtggaagagaggagagtgagtgagtaggcagagagaaatgagtgtgaaattgagatgagatgagagagagctggatcgatcgagagagagagagagagtgaagattttatttaattgagaaaataaaaacaaacttattattagtcaaacagctgagttgtttatgtgaatgtaagtgtgcatttaattatcttctttgataaatttaatacacactaaatacaccatttacctaaatactaaaacgcgtctctacttaattattcatattgtatgcttgtatatgggtcgggtttttttgacaccaaacgaaaccggcatgagactggaaggtacgaaaaaaaaatataaatttaagcatgcatgacatgatattataaattgacaagatatgacatgatacgaaaaatatatctttaaacacgatacggcacgaaaaacacgaaaagcatcacacgtaaacacaaataaactaactcgaaaaacacaatacaagactaaaaaatacgatacgacatattaaaaaattttataatttattattaataataataaaatatgaatttattaattaaataaatttaaatatttatcagtaaatattcaactatattaataatttttttatatgattatctgtaaaatattatttaaaagttatatttatataactaaagctttaaaatatacttataatttgataattataaaaatgtatatatatatgaaaaagtaaaatataaatttaagctcaaatataaaaatagattgacctgtttaagaaatacgggttggcacgagcaaaccacggcatgcattcgagcatggcacgaatatcgggcttacaggctgtgtcaggcctaacttttaaaaatgttggcatgatacggcacgactcatattttactgtggcacgacacaacctgttttttgaaatacaggataaatacaagtcgagcgacatgcacgaacttacagcactagtatacattatttaactgaatacatcatacatcgcctctcgatatgtactgtattttgttcaattaagtatctaatccaatataatttaatttagaaagatgataaaatatatcaatagtgtttaattccgtgtgtatattaattaaattaattatcagattctatataatttaatttaataattattatgaaatattacttaccattcacaaaagtgcaacactcatagtgatattatgttggagggtatcgggaagtttttgggcaaaaaaaatctaattggtgaaaaaaaaaaaagcctttctgttaaagaatttttttttggtttaggtgggggaattaggcgtggccctactatcccacctttgagcataccctacaataggaattacttatgttttatagcaaatactcttttatttaataactattatagaatattggtaactatttgtaagataccatcaaaaaataatattaaatacttttttttttttattagtgtctaataacaatattcatgtttataaaatacttaaattggattagattaaaaaatccaattaattggatgtatttatttataaaaattaattaaaatgctcatgttcataaatatataaacttcaaaaaatctaaatacaatgctcacgaacaatattaattttttttttttttgtttttttaattttttcatttttacattttaaagcagtttatttttatattattacagaaattaacataacaactagagaaggtgttcattccacgagtttcatcttcttcattgttaagccagtggggtattcaatcaagaatgactgcaaaaagaggggttttttaattgattctgatacagagttttaggaaaggcaatacaatccaacagttcaattgggaaattccccaaagtctctattttccaactccaatggtgttcaaatctcttccctgttactcctctgctgttgctgctgcaaaggacctatctttatcagtctcctcaaaccataaactctcctccctttttatgccacggaaaacaccaaataaaccccaaacccctcaaaataacaaaacaaaacccacttcttcaaatcccataaacacttcgggatccttactacaaaacttactcaaccgcaactcaggtaatgtttctctctctgaattgcgtttatgctttgatgagatgattcgcatgaaccccactcctccagtgtcttcatttgatcctttgattgttgttttagctaagaataagcactactctgatgttttcaagctttataattggataaactcaaatgggttgttccctagtttcagaatgatcaatgttttgcttaattgcttttgtaatttaaatcgtgtttctgatggttttgtggcactgggaaacatgataaggaggggttataatccaaatattgtgacttatacatctttagttaaagggttgtgtttggagaataagattattgaggcaattagcttatttaagaagattttcaagttggggtgtaagcccaatgctgtcacctttggtactctgattaatgggttgtgtaggactggaaatacatctattgcactcgagttacatgaacaaatggctagtgggaaagatcatggagatggttttaagtgcacaccggatctagtttggtatggggctatcattgatgggctttctaaggaagggttgatagaaaaggcgaaagaactgttcttggaaatgaaagctaatgggatttgtcctgatgttgttgtttataactctttgatgcatggtttgtgtcacacagaaaaatgggaagaggccaaagctttgtttaatgaaatgacagatcaagatgtgcagcctgatgtagtgacttttactgcgtggatcgatgtgctttccaaggcgggaaagatgaaagaagcttatgatgtgctagaaatgatgactgagagaggtcaccatcctaatgtaatcacttacaacactttgttagatcgcttgtgtcatattggtaggcttagtcaagccaagaagctatttctttccttcccagctaaagggtttgaacctgatttgtttagctacacgattttgattcgtggactttgcaagaaatggaagaccggtgaagctttgagtctctttagggaaatgactgctaagggagttaggccaactgtagtaacatacaatactttaatatgtggtctattccatactggaaacattgatgatgcccgtaaactgttcagtgagatgcaagttcatcatcttgtaccaaatgcaagtacgtatgctgtgtttttgagtggactgtgcaagaacaagcatgtttcagaggcgttggaagtttttcatagtcttaaatgttctgagtttgagctgaatgttcaaattttcaatactctcatcgatggattgtgtaaatcagaaaagtttgagattgcttgggagctatatcagggatttatcaagagaggcctggtgcctaatgttgtgacatattcaatcttgattcacgcgctttgtgaaaatggagatttcgaaaaagcaaatggtatgtttcttgaaatggaacgaaaaggttgtgccccgaatttagtcacatatagcacactgatgcatgcttttataaaaaacaatgagatttcaaaagtggttgaacttcttcataaaatggcagagaaaaatgtgccgccagatgcttctacattcgccattgtgatagacatactatcaaaggatgaaaagtatcgtcaatgtctgagtttgcttccaacatttcctgttcagaagcaatggaaagttgaaacgattagtcttaagtcagaggcatgagttttagtttacaatgtttatctggaaatgttgtggatcttgacaaattttaagatctgtaaccggaagctacataatatgaagggtggaaaaacagctcaactcaagattcttgtgattgaggaaattgattttgtatggacctagctgcaatgaatctctagactcacctgaatagtttatcaatgtatgtaacacttcatttttttttcaatcctctttcttttctttctcctaccatttattaattgtatatagtagaggttattatcgatagaatcattgcttgttatgctaacatcatttttttttataaaaatcattcttttgttgtctaattctgtataatacttacatttttttcttgcattatgattccttgaaagaaaatacagattgcagatttgaagaagaaaaagaatgaagaaccccatatagtaaggacttcatatagcaaagtctttaacttgtcattggactgatggacccttataataatagcatatacaagtagtagaatggtatatgggtcattgataagcaagacaatcactaagctgttatttttcttcttgttaatagctgtatttcttttgtttctgttttagcagtaataattttctgttataacatttgttaagttgttaaactgattgttcaacaaaggatttgttgcctccaaagctgataattctctcttcacacgtggttctggtcctaatcaattcattctcttagtatatgtggacaacatcttgttgacaggtcctaacagcattcatatctctaacttcattgctgatttgcataaagtttttgttgtcaaagaccttggccattggactattttcttggtgttgagatttgtcgaactacttctgaaatgcatctttcccagtgtaaatacactgctgatctccttgcaaagctgcatatggagggtgcaaaggctagtcctagtccgaccagttcctcccacttcttgtctttacaacatggcgagccttttcctgacaacacactatattggagcactttaggtgctctacaatatcttacattgattcggcccgatgctgcatttattatcaataaagtaagtcaatttattcatgctccaacatatatttattgatgtagaaaataatgaatcgaattgtgtatgtatttcatagaata

SEQ ID NO: 17902 - DNA, 9594 bp, Cannabis sativa
  modified_base (4697)..(4702): a, c, t, g, unknown or other
tgattcaccacaaattgaactcaatcctgctgttcgtcccaaaaatcatttttaagtttataagaacaaggcctaaacccctgaaaaaccatcaagggtcttaaccttcagcttgaatcaaagatgaaaatgaaaaatcacccaccatcctgatacttctagtgtccctacctagccatcaaagcatctcccgatctccctattgctggataagaatccaagctttgaaacgggactgccaaacactcccaataaagcttttgtccaccaattctctttttatttcttataaaataatcaaatccggattaaccttacaaattgttgccttaatcgctcttcgttctctctatccccactgcctctgatattacggagggcgttggacattgtcacatgcctacatgcgctggtgtgtggcagagctggcagcgggtgatggtggcggcacgtgcgactttactgggcaccggagcttggggtttaccgattggagaaaggtccctgggccagaggtgagaatagaaaaccactctaaaatggttttttaggatttaaacccaaaagtaccaaaccctaatttgaaaaaaaggctgaggaaaaagagaagaaaaaatattgaattttgagcttctattattgctttgataccatgaagaaattgagaatgaatttattcttattatttcagtaggagaacaagggtaaaaatatacaaattaaaccctagaaaattctagaaaacagagatttcatcaaaaatataaatacagtttggaagatgactgaaactaagactagtaactagcttgaattcctacatgctcctgttaatttgatcatttttatttcgcaagatctactgctcaattcattacacaattatcatgcttcctttatttttctacttatactatcctttttgaggtcatccattatccatcaatacaataattacccacatacccctctactatctatattctattatcctttttcaggtcatccattatccatcaatacaataattacccacatacccctctactatctatattctattaatatactgggtctatcatttgcccttctttacttcttaaattattcttcttgatccattctaacctgtttgttttcaaatgattttgggttttattattgaatttgctttgactgggaatttaatgtatatattttatgggtgtctttgtaacttattaaatataatataatgcccaatgatttagatcagtagttttgtttctagagttcctgatttcataaattaatgtcgtttaggaacaccattattgtgattcttgtgtccatgctgtgttggtgtctagtggaaacgtttaccttaagtaaaatttcatcactccctgtcaacatcatagtgtggttctagcttttgtatgaagcgatttctgaagcatttctgcataacaattattttcaggtttcacttttaaatattgtggttgagttgaagaagtgctgcaatcatcccttcctgttcgaaagtgcagaccatggttatggtggcgactcaggaaccaatgagagcagtaaacttgagaggataatcttgagcagtgggaagttggttatacttgataagctgcttgttaggttgcatgagacaaggcatcgtgttttaattttttctcaggtttgttaagatgctattttgattgatatgttttttgacagattgcttaaagccatggagcgtaaagtgcaacacttgttatatacttaaactcccgctttgttttccccttgcatataattggctatgcaatgttaccatgtctcctactatattctaggaagtctagtgtctcatagtcataacttactgtaaagtaggacactgtctaagcatgtcaaaaagtgtttgtgaaatcaatcccaaagccataattttttatttttttattttattttatatttcaaaaaagccatactttttttgatgtaccatagttccaagtattagcaacattgttttctgttattttgtaataatattactaacataaatcaaaatgcttttcaattggcatgttagaccaatatgatttatgtgttcctagtattcttgttcctcactttatgttctcttcttgaaccatcaggtagttgtgtttcaagtacatggctttttttttttttttttttgtaggcatttaaggacttgtttcatttcttcatttgacatttagtagaagaatcctaaagtacattgttttttgttggtatctaagcacactgatttcactttttccgttcgacattcaatagaagaatccaaactgcttttttttttttttggtagacatcaaagcagtataagatttattttctttcgttctatgttcagttgtcaaaattagcaacacttagatgttatgtttcttgatgctacaacttttgttgataagtaaaattgagcatgaaaaaatgattttttggtttctgaggctattctgtgagagttctgatttatttatttaaaacaggcgagacttgtttatttactttcttcttagaaagagaaatataacgccaatatcagcccagatatttaaaaggcatgttgtcgatgttctgtgttgctgtatctttactagactgtgactatgtgcttgcagtatattgtactgataaaagtatttactgatgtctgatgattaaattaataatacttatttattgcagatggtaagaatgttggatatactggctgaatatatgtcacatagagggtttcaatttcaaaggctagatggaagcactaaggctgaactgcgtcagcaagcgatggaccattttaatgcacctggtagtgatgatttctgctttctactttcaacccgggcaggtggcctaggtatcaaccttgcaacagcagatacggttatcatatttgattcggactggaatcctcaaaatgacctacaggttttgcttgaaatgaaatctccatctaaatttttaatttctttgctattttatgttctttgttatggtattgcagaataaaatcagagaaaatggttttacttaattattttgctcattttcaggcaatgagtagagctcatagaatcggccaacaagaagttgtgaacatctacagatttgtcacaagcaaaagtgttgaggaagatatcttggaacgagctaagaaaaaaatggttgatggcattctcttcaaaatcatgacaaatcatgtgctttatatgtatttgcatttgtttgaggccatatagagtctaagggattttgttttctctcaaaagtttcacttacatctctgcatgtattattaggttcttgaccacctggtgatccagaaattaaatgcagaaggcagattggaaaagaaagaagcaaagaaggggagttattttgacaaggtatgggtcctgtgggagtgtgtaaattgctgtttattttcctaaattgattgggggtagctcaaatggagcatggggtttgctgccagagtttgcgtctctcttgggtaccacaattgctatagttttctggtccccagctattgttgggttaggcagggaagatagttttacaaaaaatgtaatgtagagtctctatactattcttctctccatgtcttctgaaaatttcattttctataaccattgtagaatgagctttcagctattttgagatttggggcagaggaactttttaaagaagagaagaatgaagaagaaagtaagaaaaggctcttgagtatggatattgatgagattcttgaaagagcagagaaggtggaagagaaggaagctgaaggagaacagggcaatgaattattgagtgcttttaaggcaagatgattctatgctaattcgtcatcatttttctcctaacttcctcattgttattttccatgtgttctttttcttggttacgtagttgatgatctaatactttcacgtagttgcttctgcttatattttgcaccgacttacagatttttgtgttccatatggaagtttttcatttcttgattatataatttttcaggttgccaattttggcaccactgaagatgatggaagtttctggagtcggtggataaagcctgatgctgtagcccaagcagaagtatgaatctctttgctttcttatattgtttaatcattgtagtttgtttggaggtttaagttgcttacttttagattttatttgtttgtttatttttatttcttatgaagttgttttgttgtgaatgattttactaattaatcaattatcaaaatttaggaagctattgttccacgtgctgcaagaaacactaagagttatgcagaagctcctcaacctgagcgaagtagtaaacgaaagaagaaagaatccgagccactggagagatcccagaaacggcgcaaagcagactattcagctcctgcagcgcctatgattgagggagcatctgctcaatcaaaaagatggtcctgtgggaatctgtcgaagagggatgcattacgtttttcacgtgcggtaatgctctgttgaattttgtagtattgtcattttcaaacttcgataagaatgatggcttttctgaatctgctaattgtgatgacttgtcctggaattttttctcataaacaaaatgttgtccgttagtgccatttggttctctctctctctctctnnnnnnctctctctctctctctcttcatttgaagcaaacctcaggcttatattaatgtagaagaactatattccaaaaaaaaaagttgtagaagatcttacttaaaaaaaaaatagaacaaaattgcgaagaattatgccaatctttgcttagatcagagaaagggaacttaaaacaactttttagcttggtttccaattcaatggtaattaaggaggtctattctattcgttggtattgcactacataattttgagtttctttagacgtctaaaccatagtctgagagaaaagggacattgtagaaataggtgattgttgtcttccctgctcttattccacataacacgccaccgtggggataagcacacagtagttttttttcttgctagccatgaacatttagaataaataccttcagcttaggaggcataggacttttcaagatgtttacccaagggaagtcttccctaatatacttctcccactatcatgttaaaagctgatttacaagaaaaggtttctaaggggttacccttcatattcttcgatcattgaaaacttgacataactttaagttttggattctatggattaaaccaatggagccggtaaatcaatggttcatactttgtcaattggaatttatgtttgtcctagatttcttgcgttataagtcagttcatactacctttattggaatttaggtcctgaaattcggaaatgagagccaaatcagcttgatagcagaggaggttggaggtgcagttgcagcagctcaaactgctgcacaaattgagcttttcaatatattgatagacggcagtaaagaggctgtagaagtaggaagtttggacccaaaggtttgtttgattttttgttttcttttttcacttatgatatctattgacttcaactatcggattttgtatgttcttgagcattatatagctttcattatgtaaaaggtttatgtggaattcatctatctctaggggcccttgttggacttttttggagttcctgtgaaggctaatgatgtattctcacgtgttcaagaacttcaacttttagctaagcgcatcagtcgttatgaagacccaattgcacaattccgtgccttgacttacctgaaaccttcaaactggtcaaaaggatgcggttggaatcaaagtatgtgttgattattttcttgaaattcatttattttatttgataaaagaggtgttttactatgtttattatagttgatgatgcaagattacttttgggaatccattaccatggatttggcaattgggaaaagataagattagacgaaaggcttggccttatgaagaagattgctccagtggaacttcaacatcacgaaacttttctacctcgtgctcctaatttaagagaccgtgctaatgctctacttgaaatggtaatgtttcccttaccatcataatgtcttctcgtttaagctagtaatcgattggagtggggcactcaaagcaattattattttagtccagtattgataaagtttaaagtctatcaaagttgtgtttttggaatctatgtatgtgtgaacttgcacttatgattttctaatttggccttcatcaatgctgactgcattagatatggtctgaaatttttgcactaacttgtctgtgtcatgaatgagttttctctagaaccagcaccatcatgtgctatgttctttatggatgattttattactggttctagctgctatgtttaagttgaagtccttcatgctgttatgactcttttcttttgcttttatattgctagtatttgttgactaggcttttctttattggttacatattagttggtttggtctttggattgcgtgaactcattttgggtgcatgtggatcaggaactcgcagcttttggagggaaaaattccagtgctaaaataggtcggaaaggttctaagaaagatagaggaaatattcttaatgtacctatatctcaaagccgagccaagaaaggaaaagcggggtctgttctgattgctggtaaaatgaacaaggaccgatctgcaagatcccaaaaagttgaaccactagtgaaagaggagggtgaaatgtcagataatgaagaggtatatgagaagtttaaggaagaaaaatggatggaatggtgtgaagatgtaatggttgatcaaatgaaaactttggggcgtcttcagcgattgcaaactaccagtgctaatcttccaaaggataaggtacgtattacttctgcatttcttgttttcttacccccgctggatactgcaactaatagaatgtttcttcgttttttttttgtttttgtcaggtgctttcaaaaattagaaattatttacaacttcttggacggaagatagatcaaattgttattgagcatgaggaggagccatacagacaagacagtatgttttctctcatgctttgtcttgttgatcttgcataaaagcaaatttgttgttaagtttcattttgtaattgggttatgtgtagggatgacaatgcgattgtggaactatgtgtctaccttttcaaatttgtctggggagagactgcatcaaatttattctaaactaaaattagagcgtggtgaggaggcaggtccttcccatgctaatgccaatggggattcaaatcctttcaggcaaagaggttacagaagtatggaaaacttcccagggtcagagccctttctgaaaggtatagacacagccaaatttgaagcatggaaacgaaggagaagagcagaaaccgagagtcatatccaagttcaggccccacctcaaagatctttgagtaatgggacccgaatatcagaccccagctcattggggattcttggggcagcgccatttgaaaatagacgtagcggtaatgacaggccctataggatgcgtcaaactggaatagccccaaaacaaggtttctcatcaggtgttcagtaggcatgagagtaaagtagtttgacaaaagcgcttacctagttgcatcaaccgcctaagtgattgacatattctcgggagattttttcaaccatgggaataaaattttgcagatacgtacggtattttgtgaccgaacattgtccagacaaggatgtgcattcttttataacacaaccatcggagaccaagtggctgaaataaaagagccaaagtccttgccagttgccacaagcaacactcgaggagtcttgcttccatttttcccccttctattattttttttctttttttctgaagatgagttcagttttaatatgtttacttgtatagtgaaagttaaggaaaggattactcgttactcatctgatgcatgcaacatacattgaagagaacctgtgtatcctaacggaaagtgtacattaccaattttgcaataattttggctaaatttcatttcttgttatttgtgttgccttttattgtatcgatgcatgaattttctttgattctgtgaatcattgtcctctgcatgttactgttacactaggctagatctttgtctatgacaaggtgaagggtaatgtaatctttcatagtttcattgatagaattttctggggtagggcatttactttagccactacctgtgaggactttaggtgaatattattggtgggatacaaaatgcagtatttttaattacataataataaaattatttaagtatttcaatcaaacaaatgaggaaaaatccataggaaaaattgcactctagaggcaatgaagcagcttgaaagggtaattctgaaaaaaaagtaaaacactagaagattttctccgcatcgtctgatggggaaagcaatgtgggtagactaattgaatttaataaaaaattgtgcttaaaaatgtactgctactacgagtctatttatattgtatagtaaaatttttattggtcttggagcaaagacttctcgcggatccctttgtttttcttttttttttttttttgaaggaaggatccctttgtttttttagttttgttcgtagttccttataaattggctagacataataaaaagaaaaagcaacaaggctaatagtagtagcaaccataatgtgctttaggaatacgaatttgggatgttcaaggttcttggtttttacttttgtttaacatttttattatttgataaaatattaaaataaaatgaaaaaaaaaatattatacaacattaataaaattaatcacctcctaagtctgaatttggtaataatacttttcttctgaaaacagtgagacaatttattattatccaataaaaatattgtcagtgccacttaaatttttgtgttcatgatgtatggagatgaaagtatcaaggtatgagtggagatggatttgtcaggctcatctgatagtcggcattgagaccatacaacaacaaattagcaagatatatgaaaattatcacatatatcatttattacagagttttaatttaatatattttttcattactacaaaattaacaattagtattaatttaatatattttttttcagtactacaaaattaacaattagtatcaagagctaattccacactatatatatatgttaaatattgtgtgagttttcttgtattatatatgatatgtgaatggatggttaaatgatgatcattatttatatggtgataatttggtgtgagaatcatttttaatattcttagaaattttataagccattattggcgcataagtatttttttatctaacttatttttttggaaatatagtaaaatatatattacattgtaatgcttacgaacatagagctcgaattcgacattgaatctatatcgtgaaccttgctggaatcaaccgcgctcgagttaataggggcatatttgttaatt

SEQ ID NO: 17903 - DNA, 8586 bp, Cannabis sativa
aaaagttattttaaaaattaaaataatttacatatttcttaatttgcttataattttttttgggataatttaaaaaaaacacaaaaatatggtctgtatgaaatttttaatattttatgatttttacgattttattatcataaaagatagtcttttagtgcatttttgttgtgtatttttgttgttttattgttaattttttattatttgtatattattttgatgttattttttgattacttttatgtcatttttttataattttatagaataccataaaaatattaaaacaaaaaactttaaacataaaaatataaaattttataaaaatcaatattttatataattatttcttttaaataataacaaaacacattaaaaatacttttcattaaaaaaatatattcatataatagttatttattcaacaataaaaaaaaacaaaatttaaactcattttatatttctagttcttactataaacaaaaattaaaacttaacgaaatcacttttgaaaaagataaattccaaaataacatttaccataaataaaaaattagaaagaaagaaaagaggaaactccgtgtacgtgtcgccacccatcctttgacttttttatttttaaatcctctctcttatttttctctctcatgtatcacagatactttaccaaaaatctctgttcaccgcttatctccagtcatcacgtgacacttttaccggtcactcttttaactcacttcttctctttcacctgttataaccggtaaccaaaaaccacttgtaataactcctccttcttcttcttcttcttcttctttctctctcttaagtttaactttacttctgtttctctctcttctggaagcaagaaccgcttccttcctttcttcttttccttcgtttcatacccacaaaactgtctcaaaccgtgttgaagtcaaatgtcaccatttctctaatctctctttctctttggtgggtttctctttctctctctctagagctatctctatccgccatttccctatctgaaaggttcgtctttttctttttctctctctttttcgtgcttctactgtcatattcttattctttcttctattgttcacataaaacaaaacttcatcattttgatttttcttccatttttatacatatatttattactttgccttatacatgttttgttttggctttggttcttattcttctgcagaatgttggactctacttgattaaagacttgttttttttctgcttctctatcttctggatgtgtttctctcaaatgggcgttaaagatttctgggtgattctccttgttactgggtttttttgcttcagagctttggctcagagctctgatcagaacctcaaatgtgacccaaatgatttgaaagctttacaagatttcatggcgggtttgcaaactaagattgatgggtgggacgccaacaactcttctaattccaattgctgtaaatgggcaggtgtcaaatgtaattcttcatcttctctgggatttaaggatgattctgatacgggtagagtggtaaagctagagcttatgagcatgagactaacgggtaaactttctccatctttgggctctttggatcagctcagaactctcaacctttctcacaactttctcaaaagtccaattccattttcactcttcaatttgtcaaatttggagtttatggacttaagctttaatgacttatatgatcctgttcctgatattttccatttaccttcaatccaactccttgacttgtctcaaaattatttgaatggttcttttccttctggtatctgtaatggttcatcttcactccggatattgaagatggcagccaactacttcactggtgctcttccagcaggacttggagactgtctttccttggagcatgtttgtgttgggatgaatagactcaccaatgtatctgaaggtatctttcggctcccaaagctttctgatttgattcttcaagataacaagttttctgggcctttaagcaaaggaattggtaacctctctaaccttgttagattggacatatgctcaagtgggttttcaggaaggattccagatgttttccataacttaaagaaacttcagttctttctagctcattctaatagattcactggtgttatacccccttccttgtcaaattcccctagtcttactttgttgaatgtgagaaacaataccttgagtggtctgttgaaacttaattgttcagcaatggttagtttggcttctcttgatgtaggcactaatcagtttactggccatgtaccagataatctcccttcttgccaacacctgaataatataaaccttgcccgaaacaactttactggtgaaataccagatagcttcaagaattttcagagtctctcatacttctctctttcaaattctagcaatactaacctctcctctgctcttagaatctttcagcagtgtaagaaccttaccactttggtgttaagcttgaattttcgcggtgaggagttgccttcagaccctacaatgcattttgagaagcttaagattcttgttattgccaattgtagactcacaggttcagttccacaatggttgagtgcaagcaaacagttgcagttgttggatttgtcatggaatcacttggttggatcgataccttcgtggttagggggatttcaagccctcttttacttggacttatcaaacaacacattaactggggagatccctaaaagcctcactgatttacaaagtctcattggtaaggatatctcattggaggaaccttccccagatttcccatttttcatgaagaggaatattagtgcaaggggattgcagtacaatcaagtttggagttttccgccaaccttggacctcagctccaacaatctttccggaccaatctggccagagtttgggcaactgagaaagctacatgtcttggagttaagattcaacaatctaactgggtcaatcccaagcagcctggaggggatgagcagcttagagactttggatttgtctcacaacaggctttcaggccaaataccaagttctttggtaaaactcagctttctgtctaagttcaatgttgcaaacaatcagttacatgggccaatccctacagggggtcagtttccaacctttccaaattcgagctttgaaggaaataatctttgtggtgaccatgctaaaccttgttcactaaatgggggtctttctcatcaatcatctggtagaactggtaaaaaaagaggtgttgttgttggaattactattggcattgtacttgggatggccttaattctttctcttatgttcatatttgtgttgcgaaagcatcgccctggagggattgatcctgagaaagaggatgatagcacaaatgataaggggttggaagaattggggtcaagattggtgatcctgttccagcagaataaggagaacagtaaagaactatcttttgacgaccttctgaaatctaccaacaatttcgaccaagctaatattatcgggtgtgggggttttggtttagtctacagagccaccctacctgatggtaagaaggtagcaataaagcgactctctggtgactgtggacagatggatagagaatttcgcgctgaagtggaaaccctctcaagagctcagcatcctaatcttgtccttcttcaagggtattgtatgtacaagagtgacaggctcctaatatattcctacatggaaaatagtagcttggattattggttgcacgaaagggttgatggccctgcttttctcaaatgggacgcgagacttcaaattgctcgagggtctgcaagagggctcgcttacttgcaccaatcctgcgaaccccatatccttcatcgagatataaagtcgagtaacattcttttagatgagaaatttgaggctcatttagctgattttggtcttgcaaggctcattcttccttatgacactcatgtgacaactgatcttgttgggacattaggctacatacctcccgagtacggccaagcatctgttgctacttacaaaggggatgtgtatagttttggtgttgttcttttggagcttctaactgggaagagacctatggacatgtgtaagccaaaagggtgccgagatttgatctcttgggtgtttcagatgaagaaagaaaagaaggaaagcgaggtgttcgatccattcatttgggacaaggaccataataaggaattgttacaagtctttgagattgcctgtctatgcttaagcgagtttcctaaagttagaccttcaactcaacagctggtttcctggctcgacagcatcggtacaaacatatagcttcatcatcaagtaagtgagcgatttctggttgtacagctagagatatcactttcaatactcatttaactgaaaataagttggcacctttttgtacttaaaaatcttaaggtcctggtgtaaatattcacctcataactgggttcttaagcttggttttcatccaaagatgtattagagaaaaagtatgaaaaaaaaattaagtaacataacttgttatgttcaacattgtaagtctttacatccgaattcaaattttgaagagaagtcttggctctcaaacgtttgtaaaaataaatttttttgatgttttttttggggggttggtttgtactttgtagtgatgatacataaagaaaatcattatttcatataatatctttgttttaactttggtaatttattatctctaactttataggttgataatgatatgatatgatatgtctatatacataaattaatctgttcaatgttgaaagttgaaattaaatgttgaatataaagttccaactaaaagaagaacaaagtagagttcaatcacgagagtggactataaagctgattttttcatcttcagaaaatatctttgatatataaaaaactccattaaagaaaacccagaaaagaaataatgaaaataaattaatcagttttgttaagcttgaatatcttcacgtgtctataaaaaagattagttaaagatttcttgttttttttcaccattttagtcaaaggagctggctgagttttgtttactggtttccttaataaattttgttttaatattagtccttttcaagctgactttttattcatgaatattgttgcacctaagtcctaatagaatagggacaatgaccttattagttaattatatcatttaattaggaaaaaggaatttgttaggtatacactatgaaaggtattgactttaggttttgtcatatgtgatcctcatttgagggagatgattttgctttttggttcattttttcaaaacccatcacatagttgaaagaaattcattggatctagaaccatgcaatgcatgtgactctacttggtttaaacttatctcaaaggactaaactttatgtttatctactttcttcaaccacaagttagtcatgtttagttttgttgaagataatattggcccaaagggtataatgaatcttcttttatctctctctttgttttttttttttgacccaaaagagaagagaatctaatgttttctttttttgtctttacatctaatcatctattacatggccaaagggctaatttgataattttcttttatttttgtatttatatgtaaaaaactaaacaaaataggtaaaagtcatattttcaaaacctaaccatgagtggtttatcaacttaatatttacactatcatgtttgatcatcatgatttttggcttggagttggagtaggggtagataaagaagaatatgatgatgttaatagtgggggtgggcgtctaggaccaacactagtgaatggtaaggcctaaatattgagattttgacataaaggtattgtgaggtgaagtaatatagtctaaataaaagattcaaagtagaatcaatatgcaagtgaaccaaccaaccaaattgacctaactagtagtactactagcaatagttgttgtactaatactagtaccattaacgatttataattgtatacataggtgctagggttaattcaacatcttattttaacatctttcataattatttaattattgaattaaatatattattaaataattatttaattaaaaaataataataaaataaaaaaaatttaactgaattctattaattataatatgatatttatatttgatttgaattataaatttgaatcaaattaattattaacgattgaataatcgcattgatatctatcaatagttgatatgcaatttaaaacctttatgatctaaaaaaactttaggtgaatttgtaacttttcatcacatagaaggaagaagaatcgttaaatagtattaacgattgaataatcgcattgattgaaatcttatccataatttcacatccattgttaaatactttacatgcttattttaattttcaaatttgtttcattgtttactatgaattttattatcaccaaatagaaatataggtccaatttagttagtattctattacaattctcttgggttcgatttcacctgtgtgagtactgagtactacttgtttgacatgtgcacttgcgtcgcttaaatatttcgcaacaagtatctttgtgggtcatattgtcactaaagatagaattatgatagaatcgggaaatatttaattggttagggattagtcaaaaaagaagacagttacagaagttaagagcttcattggtttagccgggtatcatcgtcgtttcgtggaagggttttccaagattgccacacccttaagagaattaaccaagaagaatcagcggtttgtgtggaccgataagtgtaaaattagtttccaagaattgcaaatctaatgttagctttaccttgagatcaaaaaaattgtagtttattgtgataccctaacctggacaaaattgatttcgggaaggggagtagtgttatgaaagcccaacaaccaggcccaatatcatttgacccaaaagttatacaagagaaattgaagaaatattaggagacttcgtctcgtgaagaagctaaagtaaatgatggagttgaaaagaagatcgagattcaaaggaaagaagccatttcgccaaagaagagggaaagagccaaaccacaatggctcaaagatttcatgatgcagctagctcattcggggtctagccttttttttttttttttttttaataactaaattctgttaatcctgtttggcttttatcatttgagtataaataatttcctctaaaaaaaactttggtttttgttgaatgaaatagcaaattcattggtttagagactagccttgtctcaaagaaggcttttacctatcatgtccagcttgcattgaaggtaattgatggcaatggcataattagagctcaagtgtagaacctctacatttgggaaacagaaaagtaattttggaagtgatcccattaaaaagttgtgggaaatattgagctgatccaaactgcctaatgattaagagaccataccctcatgtttttatctcttcaagctctatcttttacatagtgtcattccattaaataatttgtagaattcaagttgtcacttccataattgattcttgcaacagtagaacataaatggtaagtttacaatgattaaatcaactgtattattgagccaatcaactatattatacaaattatttagaaaaaaaaataaaaacaaattatctcttgaggcgacgaacgatgaagaagacataaaatatagtgaaatagaatgctgcgagtgcataattttcaggagcactgaaagacaaagcaccatttttagtctccataagtagactactcagctctttcttctcgtacaacaatgcctttgtacccgtgataaaggcaatcacaaaagaagaaatggaaagagagatgaatgacattgtgaccatagtaggatacctaaatttcctttcaaaaatcatggaaagcattgcaaacatgaagtggattaacaaagaccccgcagaaaaaccgaaagccaaagaattcgctgtcatgaagtctttgaaagtttcaaggccttttgtagttttgtatggtgcagcgaaaggcatggttatggctgcttgaaatgtgatacctgctataagtgtggacaccaccaagttcatgttttgcatgtgttgtacatgttgaccattattattattatcttctttaatatttggtccaccagattgggccctcatttgtatttgggtactatctcgagttgtttctttctcagtagtactgcttttcatcatcccaaatccagtgtcttgcaaacttaaaagagggtctttatttttggccaaccacaattttaatccaaccataaactgctaaaaagtaaagagaagatagtaaggatgtaaacttttagacatcattattgttttatctttgcatattttgttatttatgcaataactaaacaagtgaattgagtccatttaagtagaggacataccgttgcaatagaatccgcaggtgttgttgatttgagaagaatctc

SEQ ID NO: 17904 - DNA, 4196 bp, Cannabis sativa
tttttttttttttttgagctacagttgcattggtgctttataccttagataagattgtattaccaaattaaaaagagaaaaaaaaaagtagattggcgatattacaggctacagccaaagccaaacaaatattactgaggcataatgaagatctaatgtattttttttttcaaatgtaaagttgtactaattagtctaggctttgctaattagctcaaaatggataggctgtgctttcatgtatggtcaatttaatagagattacttcataattaaccaaatatatatataaaatgacaaattcatatatatatatttaagtgatgactttgggttctataagaatgtaataaaaaatttattataattcgtaaaaatattgaaaagtcctaagcactttgtataagaatctaatcaacttcactaaagtttgtttaaaattttatttcattttcatacccaacaagttatatatgaaattatatgcgtacattttttttaaagaataaaaaatatgcgttcatttatttagaaatctgacgaaaatctgtttctttagagtttgtgctttgagttgaatataataaaaaggtctttggttatgaataattacattataaatttactttccaaaaataaataaaatcgataaatttatcattaatgtcttgagatcacatatatgtttttctatttttagtgaattaaaaggagtaaggtggggtttgaggtaaggttggttggagctgataagtagtaacactcactactttacttaactccatggccaaacgagaagaaagacaagaagaagaagaagaacaaggaaaagtggaagaaagagcttcaattcattttcagagcaattccatccaataccatgataccctttaaagaggtatgcttttcccatgtcttcctcattttgcattttctctgttattgcctatacagatcttatcagaaacatcactcaattcaattcaattcaattgtaaaatgtgtgtgtgcatatgtataggaaaaagatgccaagaaagaagctttcaggaaatatttagagtccagtggtgttgttgatgctctcaccaaaggtttaattttacatttttgcgtcaaaatctcttgtgggttgattcttgtttttgggtttgtaatctcatatcatttatgattgttgataaacaattcttctatctatttggtagctctggtctctttatatgagcaaaatgagaagccttccgctgctctcgagtaagttctttcctatgaattgcaggcccctttttaatatgagtttagggttttttcttactttgattttctgtagacaattattgctccagttatgttaattgaagatctggcttcatatatgtatacttgattttttttctggttaatatatatatatatatattagtttgaaaaagacatacagtcaatctcaattattactcttaagagacgtttacctggtgagatggttttgtgagtatttaaggtggttgtttttcattgtgacaggtttattcaacaaaaactagggggaccatctgcctctgattatgaaaagttacaagctgaactgtcagatttaaaaactaagttcaaccagctttccatttcacatcaagaaatctgtaaagaggtttgcttgcattgcaaaatctgcttttttctccccttacttgctgttgccaatgatttcacaaataaaaagtcaagacccaattctcacatattttaactttgtcaaagtttggttgaagtagtagttacatgaaaagtaatgacttaagtacaattgagttgtggttggctgatgcttagtataagaaaataaggtgtacattattacatgatatggtcgaaattgaatgaatatatgtgtttttgtgtatgtctatggattgctattacaaccatctgtagggtcgatcttagcaaataacaggacacacatgatagagtatgcattgtacatgaaaatgtcagagcatgagctggtgatgtcttagaattaattatggtacatgtgttgtgtgtgttgatcctgaccttgcctcctagtaagagaaacttagttagcctcatcaccgatgttttaggacatttactttgcttgttctgatctgtatgtggtccatttcttatgattctttattgtctgttaccttgtctatttttttacccgcgttaaacatgttatgaccgcaaacctaaatgcagttggaggaggttaagagttcgtgcaatgaagaaccatctttgaccaaggagtcttctgatggtgagactcaaaaagataggctttgaaggtgacagagtttattacattgtcaaacaaacaataattcattaatgatatatgaatttacatttaggaagcattattccttaatagttgcatgattgtatctttatcagacagcaagacccattttccttgaagttgggctcctcgccttacctacattatttgatgagaatatgcagtgtttaaatgtagttcatttgaaaataaatacattgattatcattagtctttccttctagatcttctcgtggtttataatagatgctttctgacttattttgatataattttcctaataatgcgtttgataaaacaaagtaaataaatacacttccaacaagttgactaagacatgtcctaatttcctagaaatagagttattcattaaaagtgttactgttactatgggtctcatagtaaactttttacattgatctaaatacatactagtatgaccaaatttagtactggaaactcaacacatgtggttgaattttccttgtgtccagtcaaaaactgaaacccaactaacagaaaacagcaattagggaaaccaagatagcgactgagcaaattaaagcctgcaaaacatcatcatcattagccagtaaaaataaaataaaacaaaaccattgacacatagaaaaaccaaatttgaccaactctacaagacagaagctattttggtttgtgttgtttacttactgcaatggctgatgctgcaagtcctggtctttccctaggatctttaaggtaatagtttccaaaataaaggactgtagcatagtaccataatggtggaaatacaaaccccagtagaaacctgtacaaaaaaacatgacaggaaaaaaaatactagtagagaattaatgtctttgtactctgattcaaaaacatgatacagttgaattgaagtaaacaatggaagtgatattaatgtgatagtactcacgagaaccaaccaatcccacaaccaaaacatgggagagacttctcataaatcccaccagaagaagaatctaacaaagaaatgtcccctccttcaacatgaatttgcatttccatctctttattattctcgaaaatttcacctgtataaacaaccaccacaactgtagctcttaatcaattttcttcatttatctttatagttacatttccattccatcataaaaactaaaaaactgaccttgcttgtgtggctggtgttgctctgccagcgccgacaaaggcgatgtacgggtgatcccgaccgaggctttgtccttgtgcatattgaagtttgtaggccagattcttcaacttaattcctttagaacgtttagtctaataaaatttgtttagaacgtttagtctgataagaagtaaaccattatttgtgtaaaggaattgaataacgaatgaacacagtatgttaaggagaacaggtaagagaactaattggggttccttgtttgaaaataaactgttcctcccttttcttttttttttttttagaaattatacatccattttttttttaagaaagtagatttacgtcttaaaaaacaaaaaaaaaaaaaaaacaaagcagatataaatttatgttcgtatgtgtaataaacataaaggaagacgatgcataattttgcttcattagggttggtttgaattgtattttatgcaatatttttatataactatacgtgtcattaatttttatgggcacttaaatatataatgttttagtttaaattaaagtttaacatagtatttatattatctttggccatataaaaaaaatcaataattttttttagaattagaagtaaattacttaaagattatggtatatctatactagttttgctaaaattttttttatttaaaagtt

SEQ ID NO: 17905 - DNA, 2546 bp, Cannabis sativa
tgtacacatcaccaccggcgtcacggggtacgttggtctatttgacataaaaatccacgtattttctctgaaattaccggttgatttcctaactttcctcccctctgctcttactatctgacatcttttgcgttagcatttttttttttgtttttttttaaataaaattaataaaattttattatttaaaaaataaatcaaaattatttcgtttatttttcaaattttgttacaaaaattaaggaaaatgtgctcgatgccgttccggagactttattttaaatttgttgatgattataataataataataataatgatatttttaatatttccatgtatatggttaacaattaaaagaaagaataataattttgaataaggttgttcgaggttggggacattaaggtcatttaaatgagaggtaagatagtggaagttacgagaacaaagaaaggcaaacgtgtttgtagctagggagaactttagtcaattttattcattcacgggaaagagacaagtgagttcattgagttcggataaaggccccagacacaacacaacacaacacaacaacccaaactaactaaatggatgggcttcttgtagttaatgaaatgaactatttacatctcaaatctagggaaatataagttcaaataattttttttttcttaaaatataaaaaaaagcgatcataaaagtggagatgcgggggatcgaaccccgtgcctctcgcatgcaaagcgagcgctctaccatttgagctacatccccgttgtgcaattctgctacagtaactaataattataatgtttttgtttgattgggaatgttattaaaggaaaatggaaaacagagtgcaacgaggaaatcagaagagacaatattctgataaaagaaaaacaaaatgatgacgacgagtcatggccatggggccagctatgaaacgttgtattttggaatttgcttacaaaagaaaaggacatttcaagtcataacataatccgcccgttttaatgggtccatataaccccagttcctttggtataatcgatttgattcaatgaaactttatttatataatatgattcaaactacgagcctcttcttattataacataaccatttttttctttcaatagaaaaatttatatatttgtcttaacttataatggcttccattgttgcaagctccccaattagtgctatagcaactcttccatcaaataatgccacacccagaggcacagtttgccaacttaagggcttcactaacattgtaaacaatttattattgctaatcttcattggtatgtgtgttatgtaatgtatacttatatatgttgattttaagtattttatgttcagggaggtccagtggttaatgggctaagaattgctcctaaggtcacattcacaaaggcaactgagagattggttttattctcatctaattgcttcaagactagaatttcttgctccattaatgtgagtctacatatatctatttatatgcaccaactaaattaagcttaattattttagaagaacactgtgctcatatatatatacaggctcaaccagagactcttaaaacggttcagagcacaattgccaaacaactctccattgatgaaaatacagtcacaccctcaacaaaatttgctgatttaggggctgattcgcttgacactgtatgtcttttatagtttttgaccctattctcaagtcataataataataatgagccattaattatgtgcttgttttaatactaataatattaataaatgttataagggtctttggattgaaagtattgttgtttgtgacaaatggacaggtcgaaatcatgatggctttggaagagaagtttgacgtgtcaattggagaagcgggagctgagaatatctcaaccgtccaagatgcagctgatctgattgagaaagtgaaggcatccccagcttaattactagaccaaataacacctatatcacaaaccccatcaaggatctctctatgacgatcgattattgtgaatttttccttttcaagtgttttttgtttttgttccttacctaaattgttgtctctttattgattattgaacagtccaaacagaattacaaaaataactatttcccatggagttctctcaaattttttcttctaataaagactaaagtattcagtaatgatatcaaactccacttttgatttgtggtggatgggattggcaggacttcataaacaatattggcaaattagaaagcaatgtcgtaacaccacctaaatgggttatcaaaagtacttactgaatacaactaactaacttttccaaagctcttctattgagtttttcattgaaaggggattcaaaccacaacccatgtatatacacatattcaagctaaaatataagcccctgtatgtacaatacaagatgaaagaaaaagaaaaacacacacacacaaagaactcgatcggtgatagaaagttatggctatatataaacttactcctctttcccacaaaactcaaacaa

SEQ ID NO: 17906 - DNA, 4735 bp, Cannabis sativa
atcatatatgtttcaatttatacaaataaatgtctaacaatccgcacttagtgcggatcggatgcactatgaacaaaatagtgcagattggattggatgaacacccctagggccgatggatgttccttttaatagcagtgagcagtgacgaaaatttgggtgtgtggctcgaaatggtgatggtaagttggttgaggctatcttgggtagccggtttggctctgttagaccagagattgctgaggtgattggagtgaaggaagccttaagttggattaagcggaaaggataggaagatgtgatactttagtctgatgctttggtggttgttcaggcggtgaatagttatgttcaattgccttcttattttggtttgttggttagagattgtcgttctttgcttactggtctccaattctccataatgtttctttatcctttgttaaacggtctgcaaatagggttgctcattgtgtcgcaaaagagtcttattttatgtcagatggtgtctttaatgagctgaatgctcctcttagacttaaatatattgtaactactgaatgttattgaataaatgatatttcctttgttaaaaaaaaaaaaaaaacaaaagaaccactattgctttacaaattcgttgagttatttacttactgaaaaaacaaaataatgtggtatcactattgttctatgttgatttgataactaaagatatatatacaaagaattgtcaatttcatgcatctttatgagctttgactcattagtcctcaagtaccattatatcaaaatagctgaaataaatggctcgttattatgtatcttcagttacacattagtaaacatggaaagtttaaacattccatgcatataacttcttctggaagagggtgaaccaaccacttcttagttaaactattggattgtattattattattatttaatataatattatggctctatttagttaaacttttacttatagctagaagtataagagtaatataaattttgacttatttttactatttggataactattatatgaaaaaaaaaaattaataaaaagtacttttcaaagtatttggatatcattaaagaaaaatcttttacaagtaaattaagaatcatgtaaattattttaattttaaaaatagcttccgaaaaatctttttaggagaagttacaaatcctaacttcttccaaaagaacttttaagttaaaaaatgacttttcattttttatccaaacacccttagaatgacttttttaattctaaaagctaaaaaaaaaaaaacttaaaaactaaatcaaacgggaccgatgtttagtattgagttataatatatattatataaactagaccccaacatcgactacaagtcgagtcctaagtctaggtcccaggttcatgtttgaattcgagtccgagttgagtctaggtccagaatcaagttcggacctcgagtccaagtcttgagtttggatcctgagtttaggtccgagttcgggattaggtcccaaatccgagtcagggattgaaattaacctcgaatcctttgtaattattataatgcaagttaacttgaaccatttattaagtattaaaaatttaaatcgtaataattaatacaatacattactttatccaaacataatattattaattatttaatacaatacgactcttacacaatgtacaaaacaagcccttactgttttttttttaatgtttacgtttatttttatttatttgttataaaaaggaatgcttcttgtagaatttaaacccttaagcattatagcatagttatgtattagtagagttctaaatgcaaaaatacaaatttgcaaccacaagttgaagcaccaaacaaataaaaagaatacacagaaaggttgttatgtaagcatatgaagcatgcactgattggaatagaaatagaatccatggcctagaataatatcaaggatggagtttatataatgctacttctcgaactttgccaggcaaaaagcaaagaaataaaggtgattaataactgaaaacataatatgagaaatcatcgtatgatcataacattttagatcatatatggttgagtgactcattatttgcaccatgtccgcctcctaaaagtctggaacaagctaagccttctgaaccagtctgcacaaaagttgagttagaaagtcaagctaatggaaaacaagtcggcaaggaaggcagtgctcactactagaattcacttgagagctttaggaaacttaccctacaccacctacggttttcggcctttaaagaaagctgcctttatagaaaccaattccatgaaatctcttaaccatagatattggaatcaatttgttggatatttggaaaactttgtctcaaaatagtagaatagttgggagacttagcctggaatgtgagaagcacgatcaaatttaaagcaatatgaaattaaactaaacagaattaaaatggaaaattcatcaaaaattattaagagactacagagagcaacccataatgaatgcatagggaattaaagagaattgttaaaagacattactggtgcctagcaccttgctttgtgtcacaacgctattggtgtaattaagtatcggttctcatataacttaaaaaaaaaaatttaaagagtatcgctaactaattgcgaggtgtcacctatagaagatactgggcactattggtgctcaatagcaatgctctgaattaaaataccagcataagaaaaactaactaaaccaataaaagatttcgccatataaaatcattggtgggacagtggaaaggttcagtgaggtatttaacaaagcttcatttgctaacaatgaactttgaaaatgcaaatcaaagcaaatgatatcagtagatgaggacaatcatcaaaattcagaatgaaagcaatcgacaatgtaacaagctttatatcatgctctgaagaatttaaatcagtcactatgaaagtagacatacacatggattgttttcaaggtagatcgtaacaagcttatctttcgaaccagcaacagcgtcggcaattgcatcaagtgactcgatttggttgtcattcaaccataggtcttccaatctatcacaattttcataacagcagaagtggaaagaaagtcaggatctctaatgtcaaattggtagaagattgtgggttaaagaaaaataaaatatcaacatcagagcttcaggaaaacagaaatacacatactgtgtcagatttttaatgtcgtccacagaagttagcttatttgatgatacatccaatacacgtaggttaactaaggtagacaagccttccattttcgaaatcccattgtggctcaagtatagttcttctagagcaacacattcctgaaacaataacacattgaaaacaagtttcgttctcaatcaaacaataaaaatgcacgtctattctagaaaaatgggttcgttcacaaatttagaagacatacctcaaatcctttcatagaagttaatctattactttgcaagctaatcttctttatgcatttcagcccacatagattaactaccttgatacgattcctcccaagccacaactcttgtaaattattcaaagtttccaaattttcaatcacctgaataaaccacccaaacgcttagacataaacaaacactttaaaaacaatactggacaagtttgaattgaaggatatctaagcaatgaaaaaaacttacccgcaatctgttggagccaagttcaagaatttgcaattcatgaaagtgatctatctcttctatcttaagaacttcatttttagacacatacagctccttgagggtgttgctgaccttagataatccatgtaaagcagtaatctcattgaaagaaacatcaaaaattagaagactcttgaatatgctgacatcaggtatttttgtcaacttattatccctgaaaaccaattcctgataaacaaaaaaaaaaaaaaaaaaaaaggaagagctataattaatgcaataaattaacctaggaacagtgaaaagaaaaggacatgaaaaccctaagcaagaaacaattctacatagcaacaggaagggattggataacctcaatatccgacaaggcgtgccagctagagaggggctcgacagcggcatcttcaatgaggttttggcgtagagagagcttcttaaggttggagaggtttgcgattcgagggtccagactcgttaaccggttggccgtgaggtccaactccgttagactcggaggtaactcgatcgagtcgagatcgtggagctggaagctgcttagatcaagaacatcggaagaaaggtcaagatcgaccgtttgatcgtcagacgccacggaattggtctccggtgaagctgcggtccggtcggtcatcggaaaattggttgtgtaggctgttttttcctggcttctttcttttgattctcacgctttacaactttcggccttctgtagtcttttagcagatctggatttatgggcttcgacaaaaacatgggccttggcccttaactgcatatgcatacggatttttacaccatagaaatttgagaaatttacatggtataacttttgctatttttttacaaaaatactgccaggcggtatttttttacttttttactgtgttttttagatcggaagagcggttcagcaggaatgccgagaccgatctcgtatgccgtcttct

SEQ ID NO: 17907 - DNA, 3514 bp, Cannabis sativa
atgagatctagacccaaatctcaagaacactgaggtttcaatttcatggtgttctggtttggttttttgtggaagataatgccgagatacagagatgatcctccagctgttcgtgtttatacagtctgcgatgaatctaggtttatctcttagtccttttactttacgaatttttgcttgaacaacctttgatatggtgaaccctaaattcctaatatttattcacaaattgatcatattgagatgatttttaagtatcttcactctttgttgctgtatagatatttaatcgtgaggaatgttccagcattgggatgcggagaggagttgctgaaactattttcaacctatggagacatagaagagtaacttccgtcagatttaattttgttttttttttaatattttcgaacatttccttttgttgttgttgttattcttagtgccattgtaatttgtaattcaggtgcaaaccgatggatgctgaagaatgcgaagcttacactgatgtttactggataaaatttcgtttagtaagcaatgctaggtgactagtgttcgttgtgcttcttgttctatggttgctttactactagccatatattgtgtctaaacaacttgcatttcaggtttgcaaaaagaaaattggatgagtatgtttttattgggaacccattaaaggtttcttatgctcctcattttgaaaccctctctgataccaaggaaaaactggaatgtaggaggagggaagttttagcaagaccgaattgtaagtgtttatttttgtgtgtgtgtgtgtgttcaaaagcattttcttttgaactttcttgatcatgttatgtaatttttctgatattagctggaagatccaaagattctactattagaaataggggttcttggaatgagaaattatcggaagcaagtccttcacaggccagtcttcccgaaagggtaaacactggtcaaaggtaatgagcaatcaagttttgacattttaacaacatcaagcaattgtaattgaagctccttttgtttgttgtatgtgatgggtttatttcttctataggaacaatggaaaacgagaacttatttctcatgttaataatgcaccaatcgcaagggtttcctctgagaaggtttgtttcttattttaaaggaatatattgagtttttttttgttttccaagtcatactcaaaatacctgaactcagtgaatcttgttgtgtttgtgaacattgaacatgatgcaaaagaaagaatgataaacaagtaatgtttacattttgttgaatacttgcacaatgttggtataaaaaataaactgcatatgcatgtagataaaaaagtcatattctcatagttattgaaaataaacgtcaaatcaaatactgttttaaatacagtttccatgtatctagccttttgtggattaatctacataagctaacgtatgactctgttctaattgaccaaaggagtatttcccatcccaatcaatgaatcaaactgtcaggtctgtgagggacaagctcaataaggtaatgaaccattaacaactatgtttattttatggagtttcactaatggtgtttgatgtaattcatgtaataaaatattttgtttttgttgtagattcaatccagtggtgaccctttacaacatgggtctatctccaagaaaccccgtctggacaatagaagaagaatttgaaagaataaaaaggtatacaattaagtctagaattttgtgaactctatatcacatcagttttgttagtatttacctcacccttaactagtgatcatattcagtaaaatgtgcaaatttttgttttcaatgcttgattgtaaatggaattcttgaatcggtgataacaaagtgacaattttgctttacacatttaaaactcctcttactcattacttacggttttctggtgtgtttgaaattggttgtatgcagtaagacttaatcattgccaatagcttaaggcttgtttgtcctttgttacatcctagtatgcattacacgattgtacttacaaaccagaactgtgttttctcaatgcaagcgtaagtaaaagagtgcatgatgaactataggcgataatttacatagaagaaagactaattacaataccagtcaaattaaaagttgtgttttatgattacactttctttcttctttaaattatatcaaaaagctatataaggaccgacaattgccaccaaaaggatcggtgatgtcctcatgctctagtctagtatcattttagaaatctactagttctataagtgggatgaatgatgaacctatcctttgctttcttttcttgattgctatctaaggagtttgctagtagctctagaaggccatcaaccttcggaggaaggcccgcctggagaagtaatattttaacctcatagcagttgctgaagtttgatccttagatggccaatagaagagtcatagtattagtaggttcatccctggctatcatgtcatcttaggctccttatctgtttcacatactctagaagagtcgtgtatgtattgagacttctctctgcatcaaggtccgaaaagaccactatctttttcggttattactttcccttttgagaaatactatgagaattgagaagctatgaatgaactagactttccttctgttctgtgtgatattattctggagttaactgttctattgctacttgtttttctgttactgtgaattcttaggtggaggattggttcataacatgttactgtaaattttgttacttgtttttctcttatttgctcaagtgatttccgtaaacattatttgaaaaacattgataaaaagtttagaaattttaaccaacacactaggttcactaccgaatcatagaaaacaactaccacaagagtctaaattggtactgaacacaaaacaggagaacttgaaatgaaaaaaaagacaaaaaagctggaagaaaacataacacactgttggcgagactaaaacaaagtccacaggcaaccacagagtgtcaagcagactaaactggaaactattgccacccttgtttgttgtttactcttgtctcgtagcactcatattaaaaccacccatttaatctttttattttcttattctcaaacacttctcatagtcataacaaataaaacactaccttacataaggtccaagagatgacattgaataaaacaacagacacaatgatcaaagttaaaacatgaaattgcgacttttttgttcactcagtcgagttcgtgaacctctccctgattcttttcatatagattaagagtctgtcgtaatcaggaaggctctccttgataattggaagttgtttgaaatcttgaacccacgtatggagccgaggcaatgtttttgggtccaagagtttgagtcctacaagttgttctatacattcaaaccaatgaggtaaccatccatgtgctatgtccaccatgtttatagtctctcccccaaagaacttg

SEQ ID NO: 17908 - DNA, 3186 bp, Cannabis sativa
tttaaaaaattaaatataatttttcaatttaataattataaaccaaaatagtagaatagcccccataaaattagataaatttaataagagtattataatgtagttataaatatttttttatgataaataagccacacaaagtaaaaattcagagtccgtcactgaatacgatacgataacacattttaccacccctacttataatccaaattaattttgcatttttactatccaagaaaaaaaaaattcctagttttactttaccaaccttttaattaaaaaacctttttaaataaatgaaaaagacagctctatttactaaataaataaataaatccccaaatttagtggggaagcgctctttatttatttccaattgtcttccattttatttcttctctgtaatatttggccgttgctccaaaaccagaggaagaaaataaaaaattcctctgttttctcagcaatggcatctcttgttcttcttcttcttcaatcttcattgtgggttaccttggttctgctaatctcacccgctcaatccctcacctgcacaacccagaaatttacaaacaacaagctttactctcaatgtttagaccttccttctctcggttcttacctccattggacctatgattcctcaaattcctcactctccatcgccttcattgctcctcctgcgaaatccgacggttggatttcgtgggctattaatccgacgggtacgggcatggttggatcccaatctttaatcgctttcaaacaatcggacggttccatggttgttaagacttacgatatcaaatcttacagctctcttgttgaaggaaagctctcgtttgatgtttgggatacctcagccgagtactccggtggggttatgaggatctttgcgaaggtaaagttgccggagaaagcttcttcggtgaatcacgtatggcaggtgggtccttccgtggcttctggtagaccagacgctcatgagtttcagggtgccaaccttaacgctaaagggaaattaagcttgaatgggtctcagattagtacaaccaccacctctgtagattcaaggacgaagaagaagaatgtgagtttctttttttggggttttttctttaaaaagttctaaactttttgtgtgattgattctaattagggtgaaatctaaaggggttgataaagtttgtatttttatttgttttttgtgttattagattcatgggattttaaacgctgtaagctggggaatattattcccacttggagttatcatagccaggtaccttagaacttttgagtctgcagatccggcatggttttatctccatgctttttgtcaaacatcttcttatgccattggagtagctggttgggctactgggatcaagcttggaagtgagtcaaaggggattgaatatacaggccatcgtaatattgggattgcccttttcagccttgcaactcttcaggtaaaaatctcagcctaattctatagttcaatgccggtttgttagtctgtttcggcatttaggagaactttttagtacaattttttcatgatagactacaatttttttctggatgactaaacagaaacagaataggagttttaggtaggtgtatgtgaatttctgatttgtcgttgttcttcttcaacctcaaaatcacaagaaaattgtgtcaagtttgtgtttttaaatatggttctattttgttgtttgtagatttttgctctgttcattagaccaaagaaggaccacaagtatcgattctactggaacatataccatcatggtcttggctatgccatcattgttcttggtatcctaaacgtgtttaaaggtattaatatactaagtcctgctcagaagtggaaatctgcatacattatttgcattgctgtattgggtggaattgctttgttattggaggtaatcacttggattgttgtgttgagaaaaaagtcaagaaggtctactaaaccttatgatggttacaacaacaatggtcaaggctcccaaagaccacttggtttctgatacaattttaatggtagatagataccagtgaagaaaagggtttttgccacggctacacaacaacacaacacaacactcattcgagtttgtattattcttatctccttaattagtcctcaccttgttcttgttttcatgccctttttaatctatcatgtataattaaattggcttgatttcattctagatattatttgttcagaagaatattatatacacattcagcttatcccactttgtttttattatctcattgtgattaggttaattaaatatgaagatgagagtactcaattttttgttttgtttcttcagtctattttttttttgtatttatgattttattctatttggattcattctttcactatcaaattgcttaaaaccattagttgtattatatggataaagttcaagttcattaacaaccacaaaacttaaacatgtcaagagccaaggacaaccttgctagctctggatagtgttccaaaatttaaggaacttttttacttttcagttcaatgaaatcaaaactaatttgggggtttgaaaacaaagttttatgattctttatcaaagacataaggtatcttaacatggtttgttagaagtgaatgattcatggtcaaatgtttaggtgaaaaaacagaccacactattattgttcttggtatcgaaatatgtagagctttaattaaaatataacatggtttgaaaaagacttgccatgatgggagacaacctatagtgttagtatgacttgtcactttagtgaattaggaaaaagaaattaaaaataatactaaaaaaaaagttagtagaataaacacagatgtgatgcccatttttgtatatgtttgttaggaaatttcttgaggctgctaggatttgtaatgagttgatttgttaggtatggctttagttatgataacctatggccaaaggtcccaaagtaacccaattatacattcaaaataagagtcatttccacttttttttggggggtgtctttataagaggagggtccctattatggtgcaattcttttctttttggtcccttctttcactttcactacacttgcttttttgttgctttccctaatttcattttggttcataagattctccatgtgatgcatgat

SEQ ID NO: 17909 - DNA, 3113 bp, Cannabis sativa
ttggctatatatatagtagggttaaatccctcaacaagtgagtcttgaggtgatgcttggtattgtggggctgattggctctgataccaactcaaaatttagaataaacgtgattgtaaatgctcagctccattaagctcaatcaatgctgtgtgagtgatttttcatttatagagaaaaggctcaaaaagtcattatgcataagaacaatagctcatttacagctgacaattaaaacaaaaaatgagaatattccttttacaatgatactctcatcattacatttatagcaacttttatcccttacaatttttcaatttctacaggatttacacctacatttatatatttcatttctccatatcaaaagtcatatatatttagcatatgcttgagaaatgaagcatcatgcccttgcgtgtcacactcacacatggtatcaacttgatgttctactacatttttgtatatttaatatactctccttgatgaatgatgacattgatgaatgatgacagtgatatatagttgactattatttatattaattagtagttaattctttttatttagtaatatatatatatttatatatgtttacgctatgtagataatatccctttgattagggtaatagtttattatctttagttagttgattgtgtaattatctcattgatatatagtcatgtactgtttaggaataatataacaattcttcaatctttaattcttgattgagtgatcttatgggtttatgaattaaaaaatggtgtctgattaaggaacgggtctcttttatatacttttgacttaagattaaatttctatatataaacatattaatattagttttttgctctaattttcacatctgtccctttctatatatatatatcacacttatgtcaacatttgtctagattaatgacatttttctttcattcttatcaattaactccctaatatatttacattaaaaatttaatcgccaaaagtggcattttgtttttatttcctatccatcgaaggcaatatatatccctgaatgaactttcaagagaataaaaaaaaaaaaatacatgatacaaaaattaaacagattagaaacgaagaaaaaaaaaagatttagttacgtacgtaacatgcgtttggtcattttattaattcttattatttttttttgttagaaacgacaaagaaaaattctcaaacaacttgagaaatctttcttgcatttcaatatatacagacaatagctgagatttttctcaaaacaacaatgaattaagaaattccccatgcacacgcagaaaatcaaaatgaaagtgttgacaaacacatcatctcatgacctgatcatgatattgataatattaaattgaaggatatgatcgatcaatcgatcgatcaagttactagtattggtccacaaacgatgctaacatatcatatggtctctggccattccagttgcctggtggatcatagttgcaagtaataaaagagccccgattattatcacaccgaaccttagcacacccaagacgaaccgagttacgccacaccacctgagtgtagtgtccgcaaaccctaccagcccgacaagtattggagttgtagtcgtagtcagccttctccgccacccacatcctcacggcgttgacgcccgaaaggtcaggccttccccaggctatgttctcgccgtaaggcccactcgagtgaacgagtctgcagtcgcccttgcgctggttggcgtatcgacgcgcatactcagccaccgtgttgtcccatctgatcggccccacacccacctgcgcgcgcgcagcgttgtgggcgttgagaaagtcttgtggagagtcttgggcatgagtggtggtttggagaatggtaaccgtgcatgtgaataatagtatcactagtaatagtgacattctattattattattatgacctcctaatagctccatattttccttttttttttttgttgctatatatgtgtttttgatactatatttattgcttataggaaggatctatgtggtggattattgattcataatgtacacgatatttatagtgatggagtgtggaatttttttagatttacttgctattattataacaattttaatagataaatatggcagcagccggcggcggataaaagataatcataatggaaaaaaattatacatacggatcaagtcacgcatattatttatttatttatttattttttaagtagtgagagattaagctaaatataatactttttgtgttcaacttaacagtcattcttctttaaaataaattagttatcttttatgattcaaaaaaacaaaaattagttatcttttcataaaaaaaaaataaattaagaaaaaaagagacgagtaagttgaaagaaacatttttttgtagtattttaaattattaatctatttgtatttgtatttaatcttccaggcttaaattttggtgataaaataaaacttcctaaatgactgaactgttagtaaatttactctaacgattatataataagacgatgtctaacttaattataaaatattagtatgtgagtatgtaatatttactcgggatataaattattactcattgtatgaatatattgctccacatacatataagttagttcctgaaagtctaaatttactaaataaatgagctatattaaatgagtaaccggtctgaaaaaaaaaatggtgagagattgaatccatgacaaatctcataataggaaaattatgcatcgtacgacattttgcaacttttattctatttttacgttattattttatatttttcactattataaaacatattttcttattaacttataattaacctaagcatatgaccaccttgactatcattcccgtacgatataaattaatgtaccattattacaattaaacttactatgtataaataagaaagagagcaataaatgcttatatattgatcaatcctatgagtcaaatggataaatcatatatatacacgcaatactatcatcaataatatcaacagtagtgggttaggcctgatccatattaagaataaacaaaaaaatggcttagccc

SEQ ID NO: 17910 - DNA, 6627 bp, Cannabis sativa
  modified_base (6481)..(6490): a, c, t, g, unknown or other
ccaattttgacctctacagctatcaaagcccaataggcccaaatcagatggctaaaccccttccttccgtcttcttcactgtctatcaaaaaccctaactcgagctcggatcacgcgctgccatggccaacagacggtgtctccacactctggcccgccactcttcagctttcttctccaaaaaccattcttcccttcattacctcaccattcccacacagcaaccgcttcaaaccatctccaccaaattctcattgctttcaaccaatccatgctctgctcggcgcgatcaatggtctcagacttgccatttctcatcgaaaaccggcaatgaagacaccgaagacgaaaacgatgatgacgatgaagaagattacgagagtaccgatgacgaaggagtctcggggccgagcactggtgtgaaaagagagtatacgccagaagagaaggaagctgaggctgctgctattggttacaaggtcgttggaccgcttgagaggtccgatcgagttttcaagccttacgaacctgttttcgccgttgttgaggttcaatctggtctctctttgctaatatttttgtaataaagtctgtggttgggagctgttaaattaggtttaacgattgaatgtggtttgtgtagattggttcgcaccagttcaaggtcagcaatggagactgcattttcactgaaagattgaaattttgtgacattaacgagaaggtaattatacaattatctttttctgattctatgcataaattgtatatttgatatacgtatgtgatgattgttttaaatgaaattgctttcaatgtcaaattattatcaatgggtagagtgttctactttgttatgtaagttaccatttctcttttaaagatttaagttttcaattctgcaaaggtgagaggaagaaatatttatgtatttgggttgtattttagaattgtgtatggcatttaggattgtgaatttgtgatacagtttgactgtgaagttgatttggactagaagatgatgttctctttctaatcaccttgtctagatacttacacccgttattttgatcatctagagatagatcatggtttctttttatggttctttgtttacttttatgtttaactaaactgcagctgttctctgggaattctagatgaagtgttggtattaatgagttcaataaggatgtagaactatatcattgattgtaaattcgcgacctatgtgttttttcatctattccaaagtccaatgcagctcaaactaccgaaacttactgttaatgtccttgtctcatttctgttagtgttggccttttctttaaatctgtccttgttttgttctatttacatttaaattctcgccgtgttgatactttatagtgtgatatcttatagggttatgttaattactcttccttttatgttgcagatcattttgaataaggttttgatgctgggatctagtacgcagacaataattggtaggcccatagtgccagatgcaaatgttcatgcaattgttgaagaacatgtaagtgtcaccgtcttcgtcttctctgttaaaacaacttcattctcactgatattttttcaaatttgaaaataaaatcacctgtgtttctatctagagatcatacaaatcatcttgttttatctgagaaacatctttcaattcgaaaacactagtatgtaaaattttgttggatgagaaatagaggagcattggaatatgatttaaacatggtattctccaattgcattggaaatttggaatatgatcataaggtgtgtaaaatgtaagtttccttaatgatttatgtatacatacatatatatatatataaaattctgatttgagagtttaaaggtaatatgttatcttctaaggaggatcctacatatgtttttttggaattttcatattattgtgacagttgattccttattccattcggatttgcaatttatttaaattttattttctctttcattcaggcattggatgcgaaagtacttatctttaagaaaaagaggagaaagaactatcgtcgaaccaaaggacatcgccaggtacattagaagccaaagatagtcggtgcagttaattaagtaatgagctgttcttgattcatttatcgtctatgtttgcaggaactgactaaattgaggataatcgacgttcaaggaattgagaaacccgaaatcacagaagagccaaagactccaaaaccacccggtaagaagcaagaaatggttgcagttactgcatagacaaacttttctcgtaggctattttggcattagtggcatttttaaggctactttttcttgaaccacatgatcatacatgttatagcagaagatctttccatggaatatttgaggtagatgtcatagggggagtcagtttgcttctgtaattcattttttcgcctttttgtaatttagaagttaaaaaaaaaaagaaaattatcaaaagcattctgctgaatgaataagttttgttcccaattgggatgagttctttagtggggtcttgaagaaacttaaaaatcaccggccttttctcttatatgattagaattaagccttaaaaagcacttgtttcattatttttcattggtctatttgtgaccattctaatgaaatgtttggttaaaggcataaagccaataatgtgacattattgcctaaagagtcaaatggactttcagtgcagtgtggagcaacaccccaagttttattaaattaattgtttttgttagtgctcaaattggaaccaatctttctttgattttctttttcaaattggtttttgggttatactttgaaagtggtatatatataatggatgaacccctttgagaagagtatgatttttttgctacattcattcattacttctttgctctcaactaaaatctttctgaaaaagcaaaagaggaagctttttctttcttgggtcttaaaaaagcctatcaattttttttttttctaagttaatattgaaacattttggataaagacagatcatttggatggatagaaacaagtcccatctgaatttaccccaccaaaccaaatttcattatgctcattttgtacatataattgtaaaggttgactcaaaaagacttgattagattaggattaagtctttccctttcggccactacatatatgtatattaagtattgctctttttgggtattgagtgttgccaaccttattggctcaaattaagccctaccattcccttattgagcaatttggcataataaataatacatataagattttattatagacacaatggatgcatgacacctatgctattacatcttcaagattttatatgtatataattattcaattcaatacaaccaaaccaaatataatttaggttttgctttgaatagttctctttcataattggaaatagtcaaaagtttctaagcattatcaagcaaccaaagcattacccatgtgctttaaaaacataactttttttttctttctctttctacaaaataattataaaaaataacaaaaaaaattttctctcttggaggattattacactaaaaaaatttatattgtcattagttactaaaaaattataatcattcaataataaatggcaacaatattgaaattacacttacacaaaatatgtttttttttactcattaacacaacatgtgttttctgaaattatttgaaatatactaataatatctatattgttgagaaattgacagtagaaaataaataaataagattacataatatcataggatatattaggatctatcttgctatgtcatcatcatattctcatgcatgaattaatttgcttctatttcactataatgaatggattgaattgaattgaatcatagaataataaacatcatataatgcttgtgacacacctgtaatttgtttgttgaccccatcacatctattttttatttatctattattattataaaattttacgtttataatccgcataaattaaataatttttttaatgatataaatattcaatatttataaaactgtaatttttgttcagttttattttattttaaatgtactaaaaatatatttagatataactcatattacatattttcgtcaaaactcaatgatttagcatctgaattttacgtgtcacatttaagatattaataaagtctatataatcgaaacttgaagaaaattacacttttactaatactaagtgtttatactactaaaaaattattaaatttatgtcgtttataaactcaaaactttccatacttaacctttattattattacaaagaaaaaagaaagaagaagaatagaagtctaatctaaatactataatgtataaacacaaagtggttttttagtggactctctttatttgccacctctcagtctctcatcaacagagtttaaatttactttggcttttttctaaaaccactttgtgtgcttccacttcccactttcaattttttttaattttaattttaatttttaatatatattttatttatatgattattaatgttaatggaattctttgtcataattaaatagttttctccactttgatcatctctctattttcacacaaaccaacccttaattgtattataattagtattaataaatctccattaacaacatcaacaacaacaataatactacttttatattaaattattataaagaaatatatatatgtataaaaagtgtgttcaattttctttactcaagtttaacctaatacatataagtcataattaataacagaagaagccttccctttctttttaaccacacaactttttacttacatttttttttttgttatatttaattatttatttttgtaaatatattctaatctaaagtcttgaaaaacggtggccactaaataataaatattattggagttgaattttgaaataaaaatgatattattctcctcaatgcattacagataagttgatgacgtggcagttctatattaatttttttgtgtgataattaagaaatggtaatagtaatcttacattgcttttgggaagaaccctttaagcttattgattatttttaattactattattattattatgaaaaaaaaggtatggttatctatttcatgtaatggcaatgcatgaaaaattattagttgtttcagtagtttttatgtgggttgctatgtagattttagttacaatttaagttattttgttagttgctatgagggaatttatgtagaattccgtaaaaatacgaaaaacaactattttgaagtgtaaaaatgaaaaaacccctaagatatatatagctttcaggtccgagtttgaactaaggcgaactaagtccatgactaaagcccacccagcccaagtgccaaaaaaaaaatatttttcctttaaaaatactacattcttttaaataaaaagccaataatttttattttttaaagacccatttaatttcaaggctaatcttgatagcttttcaatatgatctcattaattttcatggataaaaggttagtttattttgaaagcttgttcatatatgtacattgttattatgttatttaatttttcaaattaataataattaattagttgcatcaaaaaatgagttatgaaagactatattataatgatgaattataagagtatttctcctaattatttagaatcaaatttagtagctttaagtagtgtctcttattattactattatttagtcataaaaattaatatatttatatatcttttacaatatacatccatacacaatattatatatatatatatatattgtagaagattgattgacataattttaataaatacacaatcaaaagtaattatgaagttttgatatacaaaaatgtgtacaattttttatgtctctaacattactaataataatatgatgtggtttatatattaatgggtttctcaatcattaattcactaaaagattttgtgaatatatatgggacacacacactctctctactaaaacatcatcacaaggtgatttcatctctcctttccttaaacaccaagatatatatttatataatgtgcttagctatgtatgcattatttttttcttttttcttctttattatattattaatcaaaaatgtgtttcattatttattatgaggcatatttttttctttttgggttacatcaactaaaaaaattataactaattgtaaattattatttttatattgtgattaaaaaatttatagataaagttattagtcacaaaaattataatttgttgtgactaaatatgtttttagtcataatacttattgtaactaatactaaattagcgacaatttgtatctaaatactattttagtgacaaataactttttgttgtgagtaaaattaaaagttatatttagtcacaaaaaaattannnnnnnnnnaaaaaattatcactaaaaatagttgttttttatagtgttgtgtgattcataaaatttatttttgtcaaatataattttatttttttgaagcattattgtcaaatgtaatactatcatattacatataatattaattt

SEQ ID NO: 17911 - DNA, 2228 bp, Cannabis sativa
attttcaataaaatgaatgataattaggagttaaattgggtactgaagagttcaccccgatattgtatcctattagagttatcctatgatgttatttagcaaatctcttattgattagtttgtgttattcagttagattattaattgttaaataagactagatgatcgaaagaaattttttatgcttatgaataaattcccttaaaaaattgactgaattaattgaaagcattaaccagatcccaacttttccatagcattttttaagcttactcggacattcattcgtatatatagggaaacacaaaagctctaatattaatttattcaaaagaaaaaaatgaatattattattttattttattgtgtggatgggaacaaaagttttattggaaagaagataatagaatgaaatgagttaaattaaatgatatcataaactaataaagattatgccaaattgtggtgtggaatcatcctggtatttcttcttcccctcttcttaatataatcatagtacttttcttatatggttcctaaaatttctttcccaaaaaggcaaagaaaaacccatcattgaaattcatagtcccaacaagatatctttcttgatactgtcttatataaaattatggttttgagattcaaagtaagccaaggagaagcaaaaatataggcttataaattaagttaggtagccccaaaacatagaatattttcagcattgtaaattcaatttcccaataattcttatgttttcaccaaaagattattgatgattcttcattcttaagttcttataacacgaaaataatgataaaaaataatgacctaggacaataaaatcatgggtgttgtttgttatttatttttcttttttttgaattaaatgggtgttgtttgttattaagtgagtgaggacagttcaatttaacttaattttttttctttttatagaataattattatatttaaaaagaaagaaaagtcatttaatatagaattcaataattaattccacgtgtcagttatccaccaagtagctttttgtgtgtcagaaaaagctttcagcttcagagcaatataatgttcataacttcatctctcttcttagattccaaaccccaaaactgatgtgaaagaaacttcttcccccataagctctctgatctaaacctcatttttccacaaacccatttcccaaaactttcttctctctcaaaacacaccgtctttggtcgccggttagttgactcacctcatcatggatgttgacttctgggcttcaagggttcactctgctaaacacttgtctgctcgccttcactctggtacttgatgttttttctttgcttctttgattatggaatgtactacttgtttatggactcttctcaagtttctatctttgtggtcctttgtttactttccttttcattaagtggggtttagctacaaaaaaattgctaattgggcacaaagtgatttgcagtttttccttttccctttctgaaatgacttgctagaggtgggaactgattcgaagaattttattgcctttctgggattttttttaattttttaatttttttcccttttctggtttgtttgttattgcttcttcaaagctgcaaatctttctgagatgtttcataactcactcataggtttatgttttttaattctttcccttagggtaattcaatttcttttttatctgtatttcctagatgggttatgggtaataattcattcatgtttgagaccaagccagtggtatggtcactaattttcatttgtgtttttgtcattgaatgttggaatcataagttaaacacttgttcttttgaaatatatgtaacagatcggagctttgccttggatgctactgatgaagatgaagatgtaaagccttgtttcccatgccctttctgttatgtggatattgaagttacttcactctgcatccacttgcaggaagaacattgctttgacttgaaaaatgcagtgagtgaaattcctgacctataattactcctctcattttttctatagttcaaatacataataaacagagaactgggtttttgaatgaaccatatattgagaagtttctgactttcacaccattgataagtgtcatttatgctaaatgtaaaagtcttgtgaaacatcataagagtgagatgtatttggcttttcttgcaatcaatttacatgctctggcc

SEQ ID NO: 17912 - DNA, 3149 bp, Cannabis sativa
  modified_base (26)..(50): a, c, t, g, unknown or other
gtcaaaaaagttcagggggcacgatnnnnnnnnnnnnnnnnnnnnnnnnnaaaaattactaattagcctaaactaaaatactattttctatttttattttagatactctttttataaaaaaaaaaaaaatagtaatagtggttagaaatatagcttttttttttttttttttgaacaaaatgcgagaattatattaataaaactaaaagacgagttaaatcttccatttgttacacaaaaggttctttgggatggaggaaggatcaatcattttagtaacataaatagtaaaaacttacttagtaatattatgggtcacaaaattataatttcttaaaataaacgaaaaattacaccagattaaaatatggctaataaatcatttttttatatatcaaaattgttattaatattataattttttttcttgcacattattcttatatgttatgatatttagtactatccccttttttatacgaacaactaagaataatatcacaagaaatttatgatggtgcatttaattaaagttattctttcatattaaaaaaaatacaactaataaaaaaaaatatgtacaattatatcctattcctattcctataattggagttgcagcacatgtgttataaatgcaattgacaataatggagctaggaaggataggggatggcctttcctaccccatctatccatttaatattttttattcttttatataaataaaaatgaattttgaaaaatatattatttttctttttttgaaaaatacattactacccttactccaatctttgattctgactaatttttttttattattattttggaaagtattttgactttttttttctgaaatggagtctgactcagattttcaaaagtgatatatcatagattatcacttttaaaaagtgtttccaaaaaatcttctaaaaattgtacttcttccgtccaaaattccatgagcatgtttctatagttttaacaattcgggaactacatgctattatagaggccttgtatctaaatcggtcttaattgagttatcattaagaagtgatatggttacagcaaactaattatccaaagagctaatatctatagtgaaattcaaactctcggcaaagacttttctatcattacaccacacaaaatgtgatttgtaattgtaattattcgaaactcaaaagtaatactcaataatactaatttttcgtgacgatacttcaaatatataaaaaaataaaataattacttgtgtgaacttaattgtcaagtcatctataactgattagttaaaataactatttattttgatcgaattgcttaatctcgtttgtttgttgcgaatatgttttgtttcaagattctttatattcactagaatcttatttttattctatttacttcgatttttttgataaaaaaaatacgtatttgattgtagtaataattgtttaaaagaataaattaaccatataaaaaataaaataatttcaaagaaaatttacagaatttgaaatagtatttttttatataaattttgttattttatggatggctgttttttcaatttttgtcgaccatattatttttatgttatgaaaacataataacgtaaaattaatattttaatacaaaaaaaaaaataatctgcatttttgttacaaaaataatcaatagaaaaaattgtatattttttttaaaaaaaaaaaaaaaaccaaaccttttatggttatttacaaaataatttttaattttaataagtacccaaaaaatctttatttatacaattttttttatttattctattattgttaatagcaatttttattttagatccttatttttagagtatgtctggtttttgttgtattttgcttctgatttttatttgggtaaaagaattatcttcttgtacttttttttgacttctcattaatacatttttttgcttattttatttaaaaaatactaaataaataaaacaaaagattcatttttattttgatgaatttattattttatagaaaagcatcgtgccacctacgctatgacctctcccccatttgagaattaatatgattggtttggtttggttgttctaaagtcatagctgactatagccttccattccttgtatttgactacactttttccacttaaggcagctaccttatcttcttgaaaaaaaataccctttttttattaaacattttattttccaattttgatgaaatatatttggatttaacttttatgaaacccaatctcattatacacgccatttaaaaaaaaaaatgtacacgttgtggggctgctggtgcatataatattaaacaatttgttttataactgtgattcactaaatcaatagtccagtccatatcatgtgtttacagaacaaaatattcttaagaaaggcttttaaataagtcaaaaaaaaaaaaaaacatcaaatttagaaatagaattgaacataaaaaagtattaccacaaaaaaaaaaaagttagaaagattaactgtatcctaattaacctatatgagaatttagctgtaaattttttttttttattatttttttaaaaataagctataataactcaaatttatctcatttaataaaatattttaaatgataaaataaagaaatgattaaaagtggtctaacatttattatatactctttttatattttaaaaaataaccataaactataataacttaagtttatctcatttgattagatgagatagctctaacagttttaattgaaagggtttacaactatgcacaagaatcaagatacaactaataatgagattcaatgcagctcatttaattttgtagttaggaaaaatgccaaatgataataatattaagcatattttaatttaactattatttttttaaaattgaaaattattataattaagattggagatccgatttaatttaatattttttcttattcgatttaattttaattaataattgaatttgaaaaattatcattcgatccaattcacttagggctcgtttgatatgccgtataatgatcgtattgtattaaataataaataacactatgtttggataaagtaatgtattgtattaattattacgactaaattttttaata

SEQ ID NO: 17913 - DNA, 3796 bp, Cannabis sativa
aattattaaccatcccattatggtagtgaataaatattggacacatagttaatgattgtgattatggtattatattagtccacaaataaataattctaacaatcatatttcaacttatctactaatcttttgggttactcttctatttttctcccaaggactttataagattccgtggcgtgacacttataattatttaccataaatgcatcgatgaatattaattagtaagccaataaggatatcttttaaaaacatgtctaatgcttgccaatatcagtttatgtgataaatttgaaatatattaaacttcatttaatgatgattgggattaaataattttttctcattgaatctttctttgttttaaactcttaggaaacctcaggaacagaactggccaataatagatcgtatcaagctgcagaagacttaaaagatcctatatcgtcatcagttgaaggagagagttcgtctttgaaatccacaaagactacaaaacagagtgatataagtacctcacaggaaaaaactttgaaaaaccagacaagataattccatgtccccggtgcaatagtatggacaccaaattctgttactttaacaattacaatgtcaaccagcctcgacatttttgtaaaaactgtcggagatattggactattggaggaaccatgaggaacgtggatgtggaagcagggcgacgcaagaacaagaacacttccgcttcacactatcgccatataataacacctgatgtcctccaaaaagctcaagtgtttgctacaaatggtgtacacaacactacattaggaagcaatggtactgttctttcgtttggctccaattctccgctttgcgaatcaatggcttcagcactgagccttgcagatagaagaaaaaactccgtttcaacaaaagggtttcacggtcctgaaaaaagaatgtttgtttcatctggagtagcagaaaatgggggaaaccaatcaagcggatcttctgtaacagcttctgccccgtccgataagggagggaagccaatggtggttgattctcaaggctgtcctcaactaccatgcttcccagggccaggggcctcttggcagtatccatgtaattcagcgcagtgggcagcagcattgcctactggattttgccattcaggctttccaacttctttctatccaacacagccatattggggataaaatgcagcagggtcctggaacgtaccatgcttctcaccatcatcttctacaaaaaccaactattctgtaggaactgttccaaactcctcaatacttggtaaacattctagagaaggagaaattcttaatccgactactggacaagaagatccacttaaagagaagaataatttttcagaaagtgttttgataccaaaaacattaaggattgatgatcccgctgaagcttcaaagagctccatttgggcaacacttggaattaataatgacaagttaaattctggcaatgggggaagtctccacaaggcttttcaatctaaaggaaatgagaaaaattatggagttgaaacatctctaatactgcaagccaatcctgcagctttgtccagatcactcaactttctagcggcacataattactactgaattggaagttgtaaactgcagctaattgaatagtgaaggaaggagttaaacgtcactcactagactatcttgcttttaacaaaattagatagcattttttaacatatacggtgttattctcttaatgatcaagaccactgcaaaaaccagttcaagtggaatctactctttaaaagaacaaggagaagatttgattcaacctgatttttcctcgcaggcgatcattagctgtttctctatagttaatttagttttttcttcagtgatttttttgtctcccacacccttgtaaatcatatgaacaggttctttttttctcctcagaatttagtcacatgttcatgtaaatactaatatattatattgtggaatatatagataatgaagtgaaatgtttggaacaaaagaattcacgagaagttgaataaatctgtactcttccccacatattatcttctacttatatcatattttaacttctgttttcattgaaaggagaacaaataaagtattttcaaaactgcttagtgattggattttcacttttagtcaaaaagtacaagatgcatagagatattagttatggtaattgtgcgcgtggggccccaattgaagcataaatacatgattgtgtgataagggaagtcgacaatatcaggcaaatagattgcagtatgttcttccccagctcaacaaaggtacccttttctgacacacccgataaggttactgcttaatagattttttgcaaaaataaattgttaagtcaattaagttaattataatatccaactatatgcttagattcaaagatagaaaagttagcgtaggcggctctcattttgtgcagataaacttgaatttatatatgggcaaagcatctttctctttctcaactctcaagcataaaagaatccaaattgccaatatggaaaggtggaaaaacaaaaagttgatgttttccatttcctttctttcgtttccctttctcttttctctcccttttgttgaatattctttcttttcaatattatatgtaatcactattctgattatgacttttcctttgtttttacttaatttagttaattattatgtgttcatgtacacattttatataaatctgatgcaatatatgtgtctgtaatccgtctgccaaaaaaaaaaaaaaacaatcagattttttttatttgtttgttggtacgagttattattgtccccaaagcatgtgcttctgttcattccatcacttaaatcttcattacgaatcatttcttttgtttatgatgtttctgttctattcctgcacgaaaaggtaacattttcttttcttttatccatatatgtagcaatttaacctttctaatttaatttgtacaatcctattaatctaatgtcatctgcaaaatgtgtgatggaaaattaaaactactcaagatcaaattaaacaatcaatagataaaataaatcaagaaataagaaactaaaatgcaactcatgttcgattaaacaataacagattataaagcacaatcaaaacacatattaaacagttaaacatcaaggcaaggaatttagcctggttcacatccaatgtttagtgtgaactttggtcctgctcctgctaagaacatgatctcagattatttatcggatcagcaacaatttgagtacattacagttgagaaaggattctcaatctcaggttctcacaagtatttcagtctcttactctcttacccgagcataaagattcatacattcatgtagctcattacaacaccctcttagaatcctttaataatactctctcttgttgacctaaactctaagtctcatcgtttaaataattaataaatattttattattatttgttagtaatgagttgttgattttgtaacacaattgaagatagtaattttaccaaaattcttgaaaatgtcccgaagttgactccaaggctcaaggaattcaagacaagattccatgaaagtttatttacatgtcctagtcttgtatagtgattttcaaatctatacttaaaaatttctaagtacgaattttagtccactaacttgtgagataaattatttcacaaaaatgatatctaaactttccaaattaatttgtaagactccatcactacaagaatgtgccctta

SEQ ID NO: 17914 - DNA, 6742 bp, Cannabis sativa
  modified_base (1122)..(1129): a, c, t, g, unknown or other
tgaggacataaactaacaaactaacatagttctatgattttctatgatttggggccatttactataatttctctagaatatttaaggcatatataagagagatttgggtaaagttgaaaacataagagattatatatgagatggtaaggtttaagaggaagaaggttttccattgatcctctttatactcttttgtgttcctgtgatcttggacaactagttgatgattttaagtggctcatggaggatcattgatcctctttatactcctttgtgttcttgtaattggacaacatgatgattctaagtggctcaaggaggatgaattaatgcccaataattaatgtatgtttattatttagtttaatgttctaaatagaatgtgattttagagcttatgagcattgtttgttttcattactgcttattatgtatataatagttaacatactacagtcatgaagtgatccctttcaatttttccaaattatctctaaaagaattaaagaaaattttattttgcttagttttattcataattgtgtgtgcttggttcgatagaacctataataaagttaaaagttgtatttcattgcttgctttgaatagtttgtagtgcttttttattgtaattatattatttccctactaattattggaataactattgtaaaataacacttgtaccttttaatttttcaaattaataaagctattaattataaattaattaatatatggtttcttttgttatgagactattaatttattatattccattcaaaaatacatcacagaaataaattaaaaattagaatactattcaaatatattatattccattattaataatactattccattaccattataattacattacttataagaaccaaatacaggttgttcctcctccttttctattacattaattataataaaaaaatatatatatatgatgtttgattgtgtttgtctggaaaggaaaatgctttgcatataactttactttgagctaatgtgtaaccatacatgtaggatgagatgttgctttatcatgagctgaaacaatcctatcaagctgattctattttgattttttttaatatattattattattnnnnnnnntattattattattattattttgctcaaaatatattaatggctcatatttctagtagtgggtttattatacctctcattgtctttcctacttgagaatcctcttagaaaaggccgattgcttcttgtatttttttaagactaaaaattgttggagtgtgagattagagcacattcttttaatgcaattatggttgttgctacttcaagctttgtcagcgttattgtatataaaattaaaagtggaaaatatttatcaaaacagtagagatctactttctctatattgggcaataataggttttcactacatgtacatatttgcatatcttagctagtaggacttattatgaataggacatatatatttactaatctgtgggccttattatcttaaaataataatctaaattatttgattaatttctttttccttaattgtgatcatagatttttcaaattgaattaatgtgctacctaccgtatcatttttcatgttgacgattgggtactgtattgatattggcttaaaacaactttggtcaaagacaattaatatattaatttgtttctatagaatttttgttagcaaagaattttgttatgtcatagatctgaattaaaatatacatgtatatttgtttatattcagtaaaattatttatgcatatatatatataaagtaaaataatatctagacttaaggaaaaagtaaaactaaaagcaagaaagttatacataagaatataggctataagaagctttcttctttattagagataattaccaaagaatttcctcactctaaaatttatgtttcttttcttagaccccaagttttgaaaatcaatacatatcactagcaggaaaagtgtagtaattatcaaaactatgaaagcactcatacataacttatcataactatgaaaacaatcacaagtagttatgactaagatttgaaaattcttgaaaaactaattgcagcacaatatcacagggaagataattgctattttaattaacggtttggctaattaagttgcagcccattcctttcgaatatcgaaggtgtaattgatttccaagtagcacttgttatcatcatcaaggaactgcaaaagaataggaaaatgagaataataaatcatactggttaaaaatttaaatcatatataagtgaaatattatactctttattggctcaatcaagtatgtcatgtgacaagttgccccaatagtttttgttgggattttaatgtataaaattagagaataattttgcaagtaatgtcaaaacccagaaaaagttattacaagtaatcaacataattagacagttcatcatggggccatatgactcttacaaaaagggtttcaaaaacaaaaagttcgtttaaagaattgattggggttcccaccaaataaagatgacacattattgataatgagctttgttcaaagataataatggatggtaggttgatgcttttatgtttaatcatgtattgaataggtttaatctcacacgaaaggaaaattttaatagtgtgggaatatcgtaaatatattaatttacatatatatgacattgccatactagctaatcaatgtttcattttcattaattaactttcaagatagagaccaaaaaaggtgtaaaaattaataatgatttcagacaatcagaatatccatgattttttatttgaaaaaaaaaaaaagaatatttcatagtaaaaggtcatatgagaaagggcaatggaatatttgtgtttgtaatatagaatttcacagaatataccattcagtaatctgatcatttgattgtagcaaaaacatatatcagtagtgcaaatgtctcctatacagttttaacagctcattttatatttttgtcaaagtgtgatataagttgagttgatccactttatatgttcaagataaatatgtatttgtctagtttaaaaagttgatccagggtttagctagacagtagaaactctgggaaagcaagacaatgaaagtcttctatagtctttattaatatctctgtttcataaatttagtaggtcccctaaaatggaaaaggaaatgctaccaatcatgagtcttttgggccaagtggtttctatgatataatatgagagataatatatggtgttttaggataatatctatctatctatctatacatacatatatttatatataccttagatttagcagaatatgttcctctggcaaacatgccagatggagtggtctcctctggcatcacatgtgtgtaagcctctggctgaggactgaaagttccaatcatctcttttgtgttgtccactgattcatacatacatgtacatgttatactgttagttttgatatatctaaatatatatgtagatagtaagaaagaataaatggagcgatttcatctatgtatgtatatatatatagaattatatatatatataccctttatagcagttttccaaacagtgttggtgtacttgagaccagagacaatgttattgctgacattaaaggagaatttgaggttataacggctgccttctttcagagtaaaccataagcctttgggctttccatcttcagggattggaagaactatgtcagatctcccaggtgagatgatgcacagttcaacgatctttacttctggctcaagtgtttctgcatttatgttatatatatatatatatatgtgtattgtaaaaatcaacaaaaagtaacactacactttattcttatgcatgcagttacaaataattaatcagaatagaccattaaaattaatgtacatccaaaagaaaaaaaaaaatctttctatacatgcatgaacttttctttttcgtcacatgaactttataatgtatattgtattaataattaaatcatgtaatccatgactatgctatcagcaaaaccatctctcattttttatatttacgtaaattcaaaatcatgtatcacaactcagcaaaaaaaaaatcatgtatcacaagacagcaaggtattttgtcatttaaaatgatatgagggtttatatatatatttagctaagtttgactactaaatatttgtttctttattctgttaataatagtataattgtgtatatagtttcgtatatgtgtcatgtgtgtgactagtatgcattagcaaattatattcaagtatatatgtttgagagatcgtatatatttataataacatttttttatgataattgttaaaaaattataaaaaaaaacatagaataattgccatttatgaaattccagagaaaaaaaattaccatttatgaaaaagaatctacattaataaagtaataaattggcatagcaaaggcgtgtttgacattgatactatatatacgtgaagattttttttctttttcagaaacaagtaaattaaaatagaaaataaaataattgggtaatttataaaaaccaattgttaatgtatgtatatattatcaattcttctcacattattttatttgttctcaccttctccctcatttatctcatcaccttctcccttattattttttatcatttatctctcatttctttttatgaatttttgctgttttgttgttcaataaagattattataaagtaataacacatatggtgctttaataccaccaccgtacatttttttcaacaccaccatatgtgtacatatggtactcaacaccacccttaaccatatatatacacaagaatactcagcaccatcatatgatactcaactatgtgaatatgagtattattatttgacattttatagtgtccaattaataacattacatcctataattagttaccaataaataaccgtataccacctatatgattctttcttagcacaaccatatggtactactttttccaaatatatttatttcacaattggttccaataattagagaggctggtaaaaatcaaccccccattttttctaaggcgagtgtggatatgtagcaaccagcatggaccacatgctatgtgttgattggttcctaagattgtgaaatcctagaccagggtaaatgtttgcccaaaacatgacacgtctaattcaaaagataagaaaattaatatatagttgatcttcttcttcttctcgtgccaagttgttgatgcaaaaattaaaaacaatgaaaaaaaaaagaaaaattgaaaacacgtccctttttttattcttttcatatataatgtaggttgttaaacagaaattaaaattctaatcgatggcaatgccataatattccttatatgagaaaaaaaaaaacaaaacaaattgatggagaggatattatttaaagtcaaagctttcattctgcatacaaactgacagttcattaaatataatatattgcttatatttgtttgtttgttttttaattttgaaatggataaacatgtatattttaaaacatacatttgttattaaaaaggaaaacatatagttgcatgagcacattatgattaaaaaaaatgaaaaagttacgtgaaatctcttcaattaaaaacaaagttaaactttccggagtagaagaaagatattaattaatggatagaaagacatatgtacctccaacattgtcgaaatccacacttccaagaagctgttccttccacctcctcaggctctcatcatcctgtaaattaaggctcacaattaccaagaaaaattaagaaaagaaaaacagtacgtaattgcattgagattcataatatcaaacacaaaccttgtctttttcaagctgctctttaagtgtgtactgaggacccaattgtaagtcatttccatgatgatcatcatcttcttcctcatgatgatgttgttgatgatgatgatgatggtcatgatcatcttccttattctcttctccattttcttccatcttctgcttttctttgagatttttgttctcactgctggtctctcctctatccttgttttcatcaacaaaccccataatcttggaacttaaaacggctagctccaatagccaaagatttcaactcagccacagtttaatattataaggaggatatatttattgtatattaagatttttatatgtacactacaaattaagcccaaccaaactattgaagcaaagaaagttgagagaagcccagcaaagaagaataaatatatatttggtcaattaattgaaaaggtacaaccagaaaggaaacaattgtttgagttggagaaaacccaaaaaatgaaacctaaaaacaaaaggatccaaataaagacaaaatgaaaaagaaaacttgatttgtccagtacttttttgaggtgtgagttgttgtagaaagtctcaaaaagaaaaaaaaaactattgaatgacaagagagaataaagagagggagaagcgtggtttttggttttgttaaagtatggaacgagaaatggtcatattagctgtgaagttcacaaattttgggtggcgatccgaaatatatgatgttataaaggaaaaagaaagagagagagaacgtgagggtcactaatatatgttttgagcttagaaacttcgcaatagattaagggagaacatgctctctctct

SEQ ID NO: 17915 - DNA, 3246 bp, Cannabis sativa
aaaaaaaaaagcatggccgggttgggatacttctatagctattattattattattattattatccatgtacttctatcttactattcaactcatcctatgctgacgagtataataagccattaaatttaaatcacgccataatccttgaagaatatcagtaactcccatcagctatccccaaaagtatagcatactcccaattcttaagagagtttttaattattttttttttgagagcataagtaagaagagattaatagtattacagcaaagcagaatcactatacaatgcaactaaaagaatgtattctgaaagacagtcattgaatagtatttgaattgataccttccatatttctctatgtgtcaaatgattttggtcaagatcaaaaatctttgcataactgacagtggattgggagaaaacccataaattacttccccaaaaccaaacagccatggtctacaaaaattgaaaccatttgaaaacgagttagtgaaatgatcaattacatatgtcatcacaggacacttcacctgaacagggaaatacacagcttaccacaagaagaagtggattgtaatataaaaatgcctcgtatagaaataaatctctcaaatccacactcattctcatcacagaatcccatccaatctgcaaataatgcaattaaattaaacattcccatagcccttgtccgtgttgcaactaaatcagaattatcatacaaatatagttttacaatgagaaagtatagtcaccttgcaacaaatgaaaccccagataaaaaagaataccacctggacagcatttgtaaagcatatacgcaattagtatatttcaagaaaataagattgaataagttcgatgaatattaaatcaatcttcattgacaattacagtaattaaattcaaataaagaaattaaaagccccttttgttctttataaattatggagaagcaacatattataagactttctatccatctcccaggtcaaaattataaggtgattaaaggaacattcttccatgaaactgagagcatatagatattataaactaagaaaagattgaaaataatgcaaccgaataaatcaacagaaccttgattctccacaagaagatgggtgacggcatcattgcaccagtactaattggagtacttgaacccttcaaactatcagtctctgctgaatgcaggaaattttcatcagcaccattttctacatcagtagttcctgaatgataaattgtataaagtataagatgtcaatggactaataaacaatagcatttgtgaccatatcacatccttgacactcaaatgtgtacatatgtatatatatcaattaattgtacccagatcagagaaaacgggtctgctaccagactttcttaagtgaggactattggtaggaaccgtcgcaagacccccaaacatagataatatttgcaaaaaccaaaagtatttgcttcacttagcctaacaatgaacctgcaaagaaaaatcactggtcaataaatatcacttaaaaatcattcatggcaactaattgggtagacaattagatcatctacaaaagaaatgcgaaatttgattcaacaagcaaaatcattaatagatttttttttagaaaaataaaactaagcaatgtggttagcatagaatagggataccacaaaaaagaaatgaaaaattcaacttttaaaaacatatggacctccagcattaaaagaaaaactaaccaagatttctttgtgaaacgaaagaacttaattcaataattaatggcatgagcaaacaataatggtcataacgaatttgaaagaaggaaatcacctgagggtacacgctacagaagtagcctctaacaatagaactcaaaaaaccctttaaaaaactttaatcgacccaaatgaatccatgaaactctagttccaagaaacaaggaactcacacacaaaaaaaaatgcaaagaaaaacctgtaatgaaaatgaatcagtttcaacagatgtcagatcggagaaaacttacccagaaaaaaaaaaaaaaaagagaagcgcgagctgttcttcgatgcggcggagaagagaaatgttcatacacagcttaattagcgcaatggcgaacctttggtgggttcggtggatcttcaacctgatctgacgctaaagttgatgggttttgagtaaaatacaagaatgccaatcccgtagaatatcatgactttagaagggtcattcttaaattttaaagactttggggggctttgattttaaattttggacatgttgtctttaatttaattttattttttagagaagacatattcagaagcattcatacacacataatattttaatttcacattgtcaaaaaaaaatatattttaatttcgtattttagttaaatatatattatatactactagaaaattctttattttaaaaaaaagggtaataatttattattttacaaaaattgatcatgcatctggagaaaaaaaaaaactttattttgttttctcgtaattaatataattgaattaattttctatatatttaattttgaaattaaaataataatgaaaactaaaatatgaaacaagtaaatttagttgagtatccaaattaaataaacttttatcaatttttttaaaatataaatggataaatctcattgaaaaataaattaaaaaaataagtagaaggtttttttaaaaaaaataataaaataggtagaaggtcaattatgaaaaattataaaataaaattaaaatcaaagtgtaattaccgaaattattctaaatgaagtaattctaaataggaagacattacttagggagggttttaaaaggccaatcatgtgtttggaattatttgaggcatttctaatggagaccaataaacatgagtaaggttggagagactatgtgactaggtagaaattgtttagataatgttaaatttagagttggatatggtcataaatataaaagtggtagaactaggttgatattggatgatattgaactaggttccttattggatgatattgctagtttgatttctagttttcctgaggcatccttaatttatgttcgacgtacagccaacaaagttgctcatgaattagttgtgcatgcacttagggtagatggtgaattagcttggattgatgattttctttcttttctcattgatgtattaaactctgattgttgttaataagagtttaat

SEQ ID NO: 17916 - DNA, 3943 bp, Cannabis sativa
cttgttgtccttattaaatcaaataaaatttattttgttcttctgaaattgtaatggccactcctccaactccaagccccccaagcacgaggatagcttgctaacacagtctaccaacggaggagccttcgaatctcttctcttccttccaatccaatccaattttcttctgttttccttttcttttttcttcacaaccaaacacaaaattccaattccataatcaatccaacaagttcccctctttcatctctctgcctcactaattcccctattttctatctacccgattcgctgcagctaagaaagatcaaagctttctttcttttatgtaaatattaacgttatctataacatatattactattggaaatctatcagattgtggcagtttttggatgaaaatcgccattgatgcacttgtaactttaacgtatggtcatatgttttagttgaaaggctggaaaattagggtttagaaattgagctgatcgaacatgcttccatggggtggattaagttgctgtttgagtgcagctgccctataccttctcggcaggagcagtggcaggtcagtcaatcactgctaatttgctaatgctattctgaattataacgctgcaaaaaatttgaaaaattctagagtaatgctacaccttgggtacctaaaatttctttgttatgattttgtttcgtatttttgacaatttgcagggatgcggagcttctgaaatcggtcactcgggtcaatcagttgaaagaattaggtattgtgcttttcattttttttttcttttgtatacaagttcattattgtcattattttgttgtaatgactaggttggtagtactgtaactaaattattcacatataagttttgagtttcacattcatggcaacggcatataaactaatgttgttgatttgtgccttacatttggttgtttaagttctttgtgtttgcttgctttagcaagcctgctattaatcgggtgatatgtggaacattgtttgggaacttattcattttcggcagcagacttgagttgtagtcctggcagtgcatccacaaattgcatatcatcaactttagaattcattgcattttggatgtaaacagcaaataattgttcttcttatggtggtcttagcttgtatacaatttctaaatcattatttttgtttctcagcacaattgctagatgctgagtgtgtattacctttggttgttgcgatttccgggagagtcagtgctgaaagccctatcaactgcgagttcagtggtttacgtggagttattgtggaggaaacagtaattacagaaaaacaacacttttattacaacatatgttctcactttggtattttcttcagtttaattattgtatcactaacagtctcattcatatcttaggcagaacaacattttttgaaacacaatgatgccggttcatggatacaggattctgctctaatgttatccatgagtaaagaggttccatggtatctggtgagaagctctctctttcactcatttctcattcctctatgtttgtgtgctttgcttcataattcattaaagtagtgttgatagatggaataattttttttttcttccatcaattttttggaccaggatgatgggactgctcgtgcttatgtgttgggagctcgagctgccacaggttttgtgttgccagtagcgagtgaggtgtttgaagaatcagggagatcccttgtacgtgggacattagattatctccaaggcctcaaggtcttgtttattagtaattgtctacttaatttttcacatacacacacactcagactctcttttggttaactgaactttctgctatttatgtgcttgtagatgcttggagttaaacgtattgagcgggtacttccaactggtacttctttgactgttgttggcgaggtatgcagtagggtaatatgaaactgttaaaggcttttccttttcccttgcttggagtgaaacttaagttattgtatctttttataaaaagattccatagagaaccaaaaaaaggaaatctgataacaaatttgatgtcttgaacagcgttaatctcttaagaggtgatctttaatctttgttgcctttttccaaggagtgttacatttcatggagcagttagtgcattataccaatgtctttagtgctaacataaaaattctagttcaagtttttctgcttggtgtgatatcccttgtgctgttgattgctactgagcatatatacattcactcaatatcatataatataacatcgaggatgtccatatgagagaaattataagtatttcgacccaagaggggtagttcaaatggttaggcatgtgacttgctcaaggggtagttcaaatggggatcttagtttaaaaaataaataaaaataacaataagtattttgaagattgtaatgtttgttaaacattttccccaaatctgctcagttatattataaaacccctttagtgaacttccatattttagtttataatctaagtttctgatgcaagtataccttaatcaatgtctgcctctctcttattcaatttattctattatcaggctgccaaagatgatattggaactgtccgaattcagaaaccccacaaaggacctttttacgtatcacctaaaacccttgaccaactcatcgtaaacctaggaaaatgggcaaggttgacctttattcattcctctacatacctgtactaagtactattatgtatcggtgtaattaacaaagatgcatttaccaggtggtacaagtatgcatctgtgggtttgacggcctttggtgcttatctaattgctaagcatgccgtccaatacattatggaaagaaaacgacgctgggaactacagagaaggtaagttcaagtcatgtttattaagagaccaagtacttgttaaactacatttttttctttttgtggcaatgaatctggttaaagcaactttaatatggttggaaaagtaaaaaacttataatttataaatggacattttctaatgagtatctaacaagtccacagcataccacaaagttgtattatttcttttgtagaccatcactgctgctactctttatggaatgaaacatttatgtctgtcatgtcagggttcttgctgctgctgctgctaaaagatctgcgaatgacgatgaaggtagattgactagtgtcttccatttacgaatacttatggtatatgcttaaatatttctactaaaatgctgcaactcttttcctaggttcagaagacaaggctgaaagtggatcggatggttctaaaaaagatcttctaatgccagatttatgtgtgatatgccttgagcaggactataatgctgtttttgtcccgtaagaactcactaactcagtctgtttctatctagtttttagtaaacttatgttgaaatgacattttgttcatggtattccatttcttctctgtactatcattttcgcaggtgcggtcatatgtgctgttgcacaacctgctcctcacaattgacaaattgccctctttgccgacgcagaattgatcaagttgtgaaaaccttccgccattgaggttctgcttttcactatttgtacccttgtagagagagaacatctagttttggtttaccactttcaaaatcagagtatggttgtatgtttaatggtttcgaccaccattttcgtttgcctttaagctatcaaaaagtaacttattacaattctttctggagatattgatttgatgacttctgggttgagaaagcctatcatcttcaggacctttaattgtagattgtttgtaaatatttaatagttttaatccttatccttgtaaattagcgtggcttattaaattagttttttttcctccaaagttttatatgacatttgcttctttgtcttt

SEQ ID NO: 17917 - DNA, 9305 bp, Cannabis sativa
aaaactcaaaattttctaatattatcctaatacccattaaaattacacccatatatatttattgaataagaataagaatataaatttcaacatcagccattagaactttaggaattaaaaaatatagtatgttgtattattattacgcaagaattttacaaatctgtattgaatgaagtttttctttattcttaacaatttacttatataccgcacctagcagtgttgttttatttcttttccttccacttttggtgctttccaattattaatacgagttttggtgcattatataacttttgaatgaaaaattatggagtcacatgcttgacacattcaagtatcacaactctcacatactgatgattaaagggtgtggtaaagcaggacagtactttgagctcatgccgtttaggggtggaaaaagaatgtgtggcggattaaaaatggtaaacaatggcttgtgtttattctgtgcttggacactcctttcacctacctttagctgcagctggagacgaggtgctcgggccactcctgtagatggcttagggctgagttgctcaactttctaagactcccaaccaccccgctctttactgatatggttggccacttgttagccattcgtacctatttccagtgtaagcccaagacccatgaaaatgtgaattccgggtatgagaaagtaattacaaaaactgaccgattctcgtgcatcattagaaagaaatgcagcactgactactacaagactacaagtttgaggacaaagatatgtcaaagagtaaaaagtagatacaaatagattaatcccactgcataacagatcacataataacactggaaatgtaattcttataacaaacttatgaaacagtaggtcaacaactttgcaaggaaaaaaaaaagatatttacatgttcactcgaggaaatgttcaaccaatgcactcttgaatcttgataatacgtctgatttctggtatacaaattgacaactgtaacctacaatacaacactattctaatttcctcttttagttctattaaataactaacataatcagattattagtaccatgatttcaaacctaagaaatacaacattaccaggtgaacatgtctgaaaccataagaagtatttaccttactgcacaacagaggtccacccattgccctataatattcatattattgctccaagactctggatcataatgacgattcactccttgtggagagtcaaccttcaaatgactatgaaaaaagtagagtgattttcactcacgtggcctggcaagccaaagagaactaagagctcgaagacgagaaaaataatcatttattgcaagtagcgcacgagctgattgtcgggttgtcaatatgcgatgcatttgttgtagtgtttgttggcgcagattatcagccttgaaagtagaaaacaaacaatcacttactatgacattataatttatataaattatcacaaatctgtcagttactgtagagttgagagataattttaaaacttgaaattgaatggaccttctatcataagaaaggagatacctgaaagtatatacatacatatatatatatatataaatatatataatcatttcaattccagcacaatttggatccgaatggtaggaaataggtataattatgcaaaagctatgaaattgtccttggcatcaaaagtacatacactaacactttgattttctttttcacaagattcatttatggggggattcaaaccccaaaccacttgcaatagcctagagtggcaatacactaaggtggcgtttggttggagggaatgaaatgaaatagaatgggaaagaaacaacttgtattcgattcctttgtttagttttattttaaagtattaaaatgtcattcctattctaattatgttttctttccttccaaccaaacatcatctaatggggtttttgttatgtgagtttgagtcagagagagtagagcagaaaggagtagacttggagggaatatgaaacccatgtgtttgaggggattagcattaccaccattttaatttaaaaagtgagacctacttggaaacactaatcccttgtcattcaaatttaatttaaattttacattcccattccgatcaaatctaaacctcataccaaacgccccataagatcattatattcatcctacactctaaacaaatttaaataccctactcagttctcagaagtacatacacttaacacttttttttttcttttccacaagattatttatggggattcataccccaagccacttgcaatagagtggtggaacactaagaaaattatgatcaccccacactctaaacaaatttaaataccctattcagttctcagaagtaagactaaataaccaactaagatatggaggacatcatcaaaatccactttgctaacaatcctatatttaagcaaaagctttaaaaaggactaggaagtaggaatctgaaactgccatttatacccatacattgtctaataatttgaaccttagtttattggtgatcgactgaagttcagctatggaagttgaacttgcaatacaaagatgaaggaacagaaattacctggcgaaggaacccttctagagttcctagctttcccatggccattgccatttgacccatgtagtttgccacgttccctgatgctcctgatggtccaggtgaaccattagccaatgtttcggccagagactgctgcagtgcctccattccctgtgacagagcatcttcagcttgctgggatgattgctgcaagttgcagattcccatcagctgctgctcagttaagggctccaattgactcacaagaagctgcacccgttgccaactcaattattacaaaagtccaaaggagcatgacacgtgaaagaatgcttaagaaaggaaacaagttattgtcatgcaaaatggattgtcacttttggaaaaactaatgattcttacaagttgaggtggtgaattatttcatctatttaaggaaaaatttctaccctttgcatgcataataatactgccaattagatttggtgttctgaatatgacaaatgtgaattttcgacttaagaacaaacagtaaccaaaaaccatgaatgcatgtttagtcgaaccatagaaaagtgtatttaagtaaaattgaatagtagagtcaacattataaacaccaacctttacatggaacaaataataataataataaaagaaagtgaacttggagagggagaggaagcaacctgtgttaatagaaatacttgataatagtctaaaggctacaagatttgtagaagagaactttgttctgctttaagttttgttcgaactaagccaagtctacttcaaataactaactttgaactaaaccatcgcgagcttttctatcgaaatgttaaatttgactagtactatttcaacagtgaattttgttagccaatttacagaataacttggacaatttgcgcatcttacttatcacaggttagaaagctctgaacacaatttaacgaaaaattgtaatatctagaaagtatttatcaaatgctaaatataacggttgaatgtgtcctgatataaaacttatacatgaaaagtacaatatttttggccatataaataatcttcttgcaaatgaaatcaggggcatatgggaagatatagcttcatgtaaagtgctagcctacttgagtactacgtctgttagactaaatacacacaggttcttttagagctcccaactccaaagaactcatacatattcccttttaaccttatcaattgaactgaaaggatggagcataggatttactctcttctcttgagggactggattgtagtcaaatcagaagactacattggtgctagcttctgttaacgaagcatattgtcttcccttgcggagaaatgctcctcttcgttttgtgcttctttttcatgtatcaatctatgtaccaatttcttgtttttgatcttttgatttattatttttttaggaaaaaaataagcaaatagtgcacaaatgaaaagtttctaccacatcaacatctttgaaatgagggcagacaaatcatggaaaagaattctcaccttcaggagctctgatgagcggaaaccaccaatccacatgaaacaccgttctgctggtgtcttccacattcctgaaagaatgtggaaaacatcagcttttgctgcaatccctttcaacctgaatatgtcatcaaaatgtgtagtgacattttcaataatggtccgaagttcgccatctccagcatgtgaattaactgcagccctcaattcatttatctgcctattgtgttcctcgagccaacgagcatattcaacatcaaatgccaaggcacctgaatattgatgtagatgcaaaataagaaaacttgtcaccactgaatttttgccacggaaagcagcactaataaataaacgatataataaatagccatgtgtgatttatgatatatatatatatacatgtaaaaaaattaaaggttgtttgtacaataataagactaaggaatcctaacaaacaaaccaaaaagaagagagagaaactagcttaacaaagaagtctttcagcaaagaacaattacatagggaggataaacaaaaatgccaaaaacattaaattacacaaaaatgccaaaatcaaagtcaagaataggtacatttttaattgaacagatttttataaagtttttttaatttaatacgtaaggttttcttagagcacgtagaaaacttaattaaagaaaaggaaggggtaaacagcaccaagctttaaaaatcaaggtggtggaaataaactcaatactaaaaaaaaattattatagtaccaaaccatcaagaaacgtcacagagataccccagatctcatgatatcaataccaacacagtgacatccattgacaaacatttttgcataatgtaaattgttaattgagcaattatcattgtacattttatgatttaaaaaatcaggttagaactaccgatgcagcctaaaactaaaagcatgtggttagaatcctaaatctttcattttgcaattaaggaagtcctccaaatttgatagcattgaacaattgtaagcaatggcaacttataatagaaattaggctataaggttataataccatttccactcattgaatgtgattggtctcctgagcttgaaataaatataccctgcataaataaaacagcatcatgagtagttcacaaaagccacttattctaaatatatacaataatgaaaagacatatctaaaagatgagtgcaatgcaaatcggaaacctgttggcgggcgcgctggagttcttgttctagctgagttagctttagccggctgctttccagctgttgtacatacgcctgaagataaagagataaagagttaagaccttaaaactcaaaaaaaaaaaaaatagaaaagaaaagaaaagaaaaagacaactaccatcttatactaaaacacaactaacaatagcataataagctgaacccaacatataagcattggtcaactacaaacacagcttgtgaagaataccattgacaaagcacagcaaaattcaaacacaaattaacatacctttttccgtaatctgcttttccttgcagcttcacggttttgcgcaagcctgcgtaatgtctgcagaagtgtcagtttttttttaaaaaaagtacacaaatatagatctataatgtcaaaagtatggttacaacatgacaagaaccttttgatcccctgctttttcttttgatttgtcactggaatcagaagctccaacaccaagcaattgattcctttcatgctgcaagagaaaacaatgctatttagtatctaccatccaccactaagcagcagacaaatatttaattactgtaatagtattatttatatattcatgttttgcatgagaaacaaagaaagtaatgttaagtcaaagcataaacaatgcacaaatgagataaacataacatatgaaacttcaacaatataagtattaccctttgattcttatcatcagtgtcatctgttgatgtgtcagttctaggacttccctctgccatactggactcaccccaattttcacgatgactaccagataaagatgctagttttgtttgcgaatctttaggtaatgacaatggttgagaccccacaattgcagcagacagatttgcatctgacaatgcaagagactgaatgacataggagcatgcacagtaagaggagtcactagtgaaactgagcagacactgaagtagtttctattgaattttctagcccagcaaaaaaacaattaaaagcttaccttgcttaaaacatcaaattcgacatcattacccaatgccgagctgcctgacttaagttgattgaatacaggatctaaaagatacaaaataatcaaaagaaggcaaacaagattatattcaactacaataaatttcaaaattacagaacagaatgcagttccacccatgcaaaagctccagcttccactagaatgctccccaaactaacatggcggattcagattggactttttcaagcatacaagcatatatagttgtcctagtgtcaatttagaaattacacatccataaagaagaaaaaggtaaccgaaacatgaattttgaattgcaacagcttacaaggaaacgcatcaataaaatgaaagctcatccctccatcacttatattagtaacttatcatagaaatttgtcctaaaaatatatatagccatgaagataacagactatactgagttgtgccatacaaaaaagcaaactgaaaagatacaagaaaacaaaaactaacaacacaacaagcaacatcaattagtatgatagcaaaatccaaggctcgtgcagaaaggaatttatagaaggaaaaaaaaaatgatcatgtctgcatttgagaaagaccaaggatttatttgcatacttcggccaatatcaacagcatcctctaagcgaaatccaagagattgctcaagtgttccaaaatctgaaattcgagaagaacgggtggtgctaccttcggtgccactgaaaaccacaaactattaaaaccaagatttacaaaaaatgatatgcatttacgtactaactatgcaccctactttcctagctaaaacagaaaatccgtaatagggtacttttatgttataggaagaagaaaaataatatagaagaagtctgcaagcaaaatatccagtttatatataaagttaactttagaaatagagcaacaacaattacttaaaacatttgttatacggcacgctgagaaatatgcaaaaaattacaaaaccaacaccttgaacaatttcagagtaatatccaaaccttaacaatcaatgcatcgacaagataagagttgttgaaagtaaatgtgtggtgaaaggtctgaaaatgataacaaaaaaaaacactggaaaactaatgcattctatacattattttccctccagatattacgtaaaacctgacaattaactgcagatgacccacctttgtcctgaataatgaaaaaaaaaaaaaaaaacagaggtatactctatgtctctttctagatagttgtaaaagcataagattcagttccagcaagaagtgataaatcagcatttccaggggtaatgtttacatatttatctgaagaacaccgcaactggacatgacccaactaagatacgaagggggcccacatagacaaaagtaccatctcaaagaagacaaacattaactaagcaaaagacaaatgcggtctctaagtagttaagaatggcaacaaaataaacactaaagtgaaactccaatcaattgtcataaatataactcaataatacaacagagagaaaatttgtagttacattggattaggagacgatattggaggaacgtagctcggcatctcgttcacgaccttgttaccatcatgggcacctattttcactgttctactacccattaatcaccatcatagccacttccaagccaccgccagcctataccccaagaccggatccacacacccaaagtactcagaggcagtcctacaaaacaccctaagaaacaaatatctcagtaccacaaacaaaattcaaccttatgttatgtctgattcctgccctatggcaatttccaaactgcaactttagattgaaaagaaagataaagacgcaaaacccacgtcataaaactgctaagataaccaactaaaccttctgaacaaaacctgaaatcatctcatggaacaaaaaccccaaacccgtccgtacagaaattagagccgtagcaaaattcgtaagttccccaaaacccatcaaactaaataaacccttcagtaagaaaagcttaagtttgaagtaaaaggaatactaaccgaaaattagtcggtgacgaaacagagctttgaacactgaattggcacagccagagctaaatctcgaagctgaagttgataaaactgctcgagaaaaccctaacccgtgaagcttcttccagataaatacaataaattttttttttttttttgacttttggacagtatgctctgttgtattatatattaatattattattattatatatcatacatacatctaattctctccgtacctctttcttctttgcttacctctataaaaggctagcaatttcaactggcccacctcgaattttggatgattatttatttatttatattttaattttctcataggttttagagagagagaaaaagagagagagagggagaaaagacgaagaagaagaagcgtgacgttcagaccattccaatctccgccatacgtctttttctgtagaaatacattttattttaggatcattaacaattttatctctaaattttccacaatatagattttggcacttcaaatataaagcttcttcttttttagtaaaaaaatacaaagcttttttttttttttagccaaaccatgagcagtttgattagcatctcaacgaacgaacatgaaatacacaaacattagagaaattggataaatgatttttaacatcaagagctaaatctttaaaagatggaggacaagatgctaagttgataattgctttgacaagcatcagagaatctgtctcaatttgatccacacgcaagttcatttgcaaatcccattgaagagcatggaacaaagcctttgcttccatttctagagacttgaaattgcccacaatcggcttggaaagagcagcc

SEQ ID NO: 17918 - DNA, 3031 bp, Cannabis sativa
atttaggagcttgggctacttataatagtagttttaagatgttttctggtatgtatggaagtggcactttgttgccactgctaacttttgtctgtagggcgttgtttggttttcaataaaaattggctacgatctattaatcgataaatttgctccttctcgaaactttacatctcttggttttaattgaaacttttcttcccaaataataataataatatttcctgtacagtaaataataacaacaatatctaattcaattattattacaattatttaaatctacctaacttttcagaatgtaacaaagcattcaattaatggcatatatacaaatgaaagaataaactattttctacctaatatttctacaccattcaaatctttccagatgtgtacatatatatctctcgtatatatatatatatatatatgaaagcattgtaattgtaatcactttcatgtggctaacgctgtggaagatgacataggactgattactaatttttatactatttattaaattaaatattatatagaagctgatatttaatggcagtagtgtgtcgagcaccaaaaaaggcacggagcatgtcttaactaatattattagtttttatttcttgatggcactaaacctttatcatcttgttttttttatataaagaaaaaacttatgatctctaacgcaaaataataaattaacacacaagtactttttatcgtacaaaatacaaaattcaataaaataaaacaaacaaacaaacttgataaaagtcatttcatttgtctcactattataaaataattaacctgaaattagaggacaattcattactgtctccatttctctctcactattatatgactgactcttagcaacgcaaggtcacatattaattttttaatatatattttaaactcgaaaagatcttcacttttattcatatcaatgaaaccactgaatattatttattattggctcttactcttagcaaggaaatagatagatcactattctaaagaaagtaaatggctgaccaagctgttcaatgattggtatgaagaaccgccttgtactaagcaactgattgacttgtccttcagcttcaaggctcggcatctaatctcttctccttcattctccttcattaattttctaatactttgctctatctcacctctttcaaatttcccattttcaagttgaattccaaccttccaaacacggctaacataggcagcattcaccttttgatctgagaaacaaggcatgcaaatcatgggtactccctcacatatactctccaacgtagaattccacccattatgagtccaaaatgctcccacggctacatgacccaaaatttctttctgtggcgcccatttcactatgtgtccacgcccacccaactcctctacaaacccttttggtaacgactcaagccactccgcaccattgaccgatgcaggtcgaaccacccacaagaatggatgcttgctattggctaagccccaggctatctctaaaaactgggcttctcctataaccgcaaggcttccaaagcttacgtaaatgacagatttgggcgcttgagtattcagccatgagattgagcttttgtcttcaattaacaaactactactgcttgaagaagaggttgagttgtatttgtgaaacggtccaattgggaacattggaatattgagttggttctttaaggactccaacgatggctgttcaagatcttcaaatgtattccaaatgattccagacgaggccttagctgcattgatgatagcttttaggaattcaacaaatttctcttgattcggagtattcattgttggtatgtcttttactttaagcggtggaaactctatcacttgctcctccagccgggattcttatgaaaaacaaattaacattaaaagagtaaaataatgcataccaacaaacattattcaaaaagaaatagatcaagggtaccttgtattggaaggtaacctttttcccaaagaagtgggaaagcagcaaaaacgacgaaagaggaggcaccgccagttcttaaaacgaccgtgggaagattaaggctacatgaaacagcttgagtgaaattcaatagaccatcgtagatcaagcaagtataaggtttgacatccaaagcagcttgagatagtagtgtagccaaacagtccttaaagggttgaacgcatttggtgttgagatgcaaaagaaaagaaaggatgtcattttttgatgctgaggcctctgttggtgataggccatcgggaaaagagtggaatgtgaagtgagggtagtttgaagggttgagagagttaaaggttgtgtggatgaaagtgatggagaagcctcttgaatggagtatgttggctagttctaacattgggttcatatgaccttgtaatggtaatgggaataacaccaatctttggccattcttttgttccattatcacactgctcttctctttctctcaatcactccttagaaatatattttttatgctctttgattgataaagggctatatatgtaagtctcataactaacattcatttctttcaaaattgcttagcacgtgtcagaatttatatcaatatatataaatttaaactttggagatctaatattttgtattaataagagcatctccatgctctctaaatatattttttatttaaaatattgagtgggttttaaaaaaatgaggttcaactaactagagtggttgagattagacatggggaccaaacccttatgttctttctctactacaaaacaagtctcttaagaggtgtttttttatttttgaataaattaataaaatttttataaaaacacctacggagtcgattattttgtaataaccgactccgtaggtgataatttttttttttattttattgaaaaattctacgagattaatggttattttgtaataaccgactcctatgtgattttatgatttttataaaaaaaacatatatggcgtcaattattttgtaat

SEQ ID NO: 17919 - DNA, 5463 bp, Cannabis sativa
aaaacgaaatgggagtttaggtagtttagccgccaaaattttaatttttgtggttaagtgttacaaaccgtaaaattcaggtggtttagccgccaatatccgtctgtttaaaatggttgtttaggttctttggacttagtactttattcaacatatttatcaaaaaaaaaaattaacgtgggaagaacgtacagaattagcgcgtgggagcatattatatttggaataaaaaattaaaaaaattaaaaagagccacaaaactaactcaaagctccaagaccaatacgtttactccccaaaaaacaaaaaaacttcaatttttgagacttattcaagcgccaaatccaatcgtgggaatcacgtgagaccactagatccacagattgtggggcccatctggaggcagacccactaatgtcgaagctccttccgacgcggtagtgaagcgcgtgggaacatgttagttcaacgcgctgtaggggtgagggggggactctctcacactctttgccctaatcgcctgcgaacaagaactggcgctcttatcctgaacaacaatgtccttccctgataaattcatatatcaaccatgtccctcttcatcttcatgatcttcctccaactcggatcgtcttcgatcggttgactcgtttcccatactggcacctcttctttttttcccgtttcccctttgtaactcggtgagtcgaatatccgattctctccctttcaactttttttttttttccttgagaaataaaggaacatctttcgatctgttcgtattttcatcgatgtaaacatatgtatatgtaagaatatattttgatacatcgattttcgttttttgaaggttaatgatggacccgatggatatcgtcgggaagtccaaagaggacgcttcgcttcctaaaggtatgtttaatttttatgtatttgaggattttagtttaattatcttcttaggattttgtgttgtatgagtttttggatgtataggttttgaattagggtttatagttttccctttacggagattagaagaacaaagatggtcaatttgaggcaatagaaggattgcgtgaaaatattgatgacgaagattttagggattttactaatttttgtgttatgtgtaaaatttatgcatttagatgtgatatcaactaacacggtgattttgtacccagaagacataaagaaatgataacacatgaatcttgttcgaatggtatccttgttatttttacttgctacttgtgtttctgaaggaaaaaagaagaagactgtactacttggtgttgttttctatttaggtgtgtatagggtttgtttttcttctgagaagtagaaaaagtagcacaatctactggaactggtgaatttaaaatttctgtttgatcctttattaaaaaaaattcaatatgaaatctgtttgaacaatccaggagggggattgtgaaattgtttgtttcactcctttgtcacaagtaattttctcctgagctatactcgtaatgttgcagtagttgaactggttcttgagctccatgacttattatttgccatctgagccaccaaacgttattgcagttttcttctgcattttgcaaaagaaaaataaaagtagattaagcaacagggcataagataatagtttatttcattattttatttgttacattgatcactcacttgtgatttttttttcagccactatgacaaaaattattaaggagatgttgcctccggacgttcgtgttgcaagagatgctcaagatcttttgattgagtgttgtgtaggtgagcttagtatatatgattttcactttctctttgtctatttactgtaatataacatctgcgcgtagtctttactctgttactgggattgaacttgtcagcattcatggtgtcctgttattttctaactttttttttaaaatatattaagtatagcagtttgttaatcccaatttgtttattttatgtgttatcctgtgccatcttaacctatttgttatcgatagtgtccacgtagcttaaaaatttctactcctaaaagagaaagatagttcaataaataacgggaactatgtccattagtgatatacttaaattctctacaaatcaatggtgttatctactttttttttgtacccacttgctattctcttggaagtaagcctgaatggttgaatctaatcatctttgtcggacataacaatagtgtttgtatattgttgtgattgatttactggttggaacttggaagcttggacccatggtttatctgtgtttatgcaatcatatttaagcaatcaagtttagccctgaggaggggacataagttctctcaaagttcatatactttatttttataaattcaattaattgcatacactatgatgttggaaagtattaaacgccttaattttaataaaatgcatactctttactggattcattgatgtttcaagttatttttctttagtactgaagaattcttttatgctatccgtgtttatgcagagtttataaaccttatttcatcagaatctaatgaagtttgtggcagagaagaaaaaagaacaattgcaccagaacatgttctcaaagctttagaggtatctaatgtatcatccctgttgcatgcgcacttctgcttttcaacgtaatggtttgagttcagatttctagcttacatttcgtagggatttttatgcatttgtacttaacgtttcagtattgtttaattgctggatatgactcggtaatttaatacatgttactggcacccctgcccgatgctatggacaatcttttagttgcccttgtactgttcacagtatcattttttctggaattttctctagattcatgtatttacttatgaaaggctttactttcattaaaaaaggattttctgtggatttgttggcatatatgtatggtataaagttgtcccgttaaaaaataaaagatttctgcagcactaaggagctctacttaatttgatgcagaagtatcttaatttttagcagaccagtaggattggatcaaaacttaaaagccaaaattttgcttcttatattagaggtaaaaataagaaaaccactgttttcagcttccgttggtgtcattactagtcatccagttgtttttaaacataaacaccttcgctaccaaatttttgtgaaactaggattcttgcctaaccctaaaatatttatagcaattgctatgtaggcgcttgggggattcaaacctctaaatcttgtgggagcaaagtacatgcctgaccatttgaggtggccttccttgtgacaactttactgttaattgaccctctttctcaaaatcaattcataacagtgatttctcacccccataaattattgattaactttaattgtctatatctcactgggtttgaaatgaattatcttctgttcttgtgcactttaccagttaacaatgataatgagacggtgtagaagacatattttctatattttattttattttattttctcttatatgtgctcagctgttaatttgtaatactagaaaagaatgttttttttacccttaacccttttctgttggattcgactatgttgttccattctttcttcactttgtattaaagaagtgtattgtaatttttactgttgtgtgtctcccatataaaatctttatgggggaaatctattttttaagtttgccgtttgtgcttggtatgattattgtgaaaagaattatatagcagtttatatgtttttcacttggccactcttttcactaagataaaattgattgtatttattgcgcttcacttttaaaaatttgaattagtgatttgaaatgttatttaattctcaggtgcttggctttggtgagtatatagaagaagtttatgcagcatatgaacaacacaagcttgagaccatggtaattgaaaatgttgtgccgttgttttgagtatgagactttaggagggtagccattagtcagcagtttattaccgctggttttaaaatagatcttgttttgcttctctctccatctctcttgcacacacacacaaatcaaggtttttatttattttttattttttaatatcagtgaaatgtgaatcttatgaaagaggcccttaactgtggagtcaaattgtaagtcttcatgcagttttatactgataacaccgtggtcctaccagcaggacttaagaagtggcaaatggagcaacggagccgaaatgacagaggaagaagcattggctgagcaacagcggatgtttgctgaggctcgtgcaagaatgaatggtggcactgctactccaaaacaaccagaacctgaccaaagtttagagagctaactttaggatctttagtttcttgaattgtaggcaagcatctgagacatccattttgtgcttctaatacctcctaatattgtgtacaaaaacattgactagtttgctggcctatgttaatatgcacttgaatatgtattctctttatggatcgatgtctataagttaatgtaattaattagtaagcgattgtccagatccacctgcccgaaatgtaccctattatttgtttattctgttgttgttattaatcagcattataccttttcatcttccaagcatgtatcagtatcacggtgcctgtgctgtcagtttgtattgtcttcatacgaatagggacagtgtttggttgagtattagctcatgtattatttaaattgcatcttttttcaaataaaaaaaataagctatacacatctatgtaaaattaaaagtgcaaagtaatgacctactcataaagcatagatagggccactttgaggtgtttttaaaaagtgttggcggtggtggtctaagctaaggcacatatcttctaaatagagtctattagtagcactaaactaaagatggtatctagttgcatgggacaccgagcctgcaaaatgggaaatgcatacgagtatgaatgtattaaaaagagtatcaaattattattgtggtaaggattaaattggtttgacatggcggtggtggaggtgggtggtcgctttagacaactgccaaataaatgcaaatgacatctggtggaaccagttgcactgcgggtgttacttcttcggtagctaccttaaccttagctatcggtaccgttaggtctttttttaatgtataaaacaaaataaaacttgacaacgccaacagttgactaaaatttcttaccttttttttttgtctttttttgtcttaacactactaataagggtatagtttaaggaaacagtgtgttaatctattagttttttttctaaatcaggttttctactatgacaaatatttttcattgccattattataagttttagtggtgagttgaacttcttcttattttcacattaccttacaattatcccatatattatttttta

SEQ ID NO: 17920 - DNA, 5457 bp, Cannabis sativa
tgtatgcttttccacactacagtttcgaagctttctcccctgcctgggatctaagcttagaatctaagagattgtgtgtcccagacaacatgtcgcctattaggtggcaacacgtcgttacataagcgtcaacgttgcccttgggtcctgcgacacatttcctgaattttgacccattattcatgcccaaatcatcccaaaattgccaaattcctcccaacatgtttagatatgtttatatacctcaatgtattcatccaaactcgaattttgtcaaattttgaagccaaatactaaaaattcaaaatttaatttccttgtagcacaaaatttaattttcttaataacacactacttgtgtattatttctattttgtatttagccaattatatcaaatacaacataattaatttcaaccacttacagctttactaataatactagataatgaagatgcattttcaaaagtagttcaaaccttatatcgcaagtgctcaatatccaccaggttccactgtcgtctgcacttttcatagctccatccatttccttctcttgggaagtcaatccactcgggatgaccaaactataaatttttttttcaggaaaaacgaaaaatgaggaaaagaacataaatcagaaaatgaggtttggcatgcacgttaagacaagaagaagcacaagttcatagaaaaaattatagtacatgaatttttatgtccttttaaaaggtttcagaactttacaaaatatatcttacacttgaggttacttgttaatcatatcattacgtatttttacatagcacaccatactattagtcctgacaaaattgctaagcaactgataggaatttcctgtcaatttggtaagagcagtagcaaatagatcagagaaaatagaggcaaacagctgatacatagatattagaagataaaatgaaatgaacaatggacaaatgggtattcgagagacccagcactcttccaaaagctattgcttactcaaccaaacaattcttcacccaaatcccttttactaccgtcttatatatactatctcaataccctgtaatgacccatatactcttttttttttttattaaactccaatcctaagggctaagtcctaacagcaacattcctttcacctaaaacataatgaagtaattaagaggtttcagaacttctcaaaatctatcttacacattaaacttaaggttacctattaattacatcattacgtatttttacatagcacaatataccattattcctttcacctataacatcaaaatttaaaggctaaaatttatcagtagtaatccaaaacgaattacatctgaatatagtcaaatcagctgcagtattgatgccatagtttagtagacaagaaaataggctagagcgcttacttcatttcccataaaattcagatagccttcccctcccaatgccattgttatgaagtgtatcatctgcagagtgcgaaatataaaacatgaaaaaattaaactttcaaatcataaaatttataatgtccttgtcatgctataaggacaaataattcatggtctaatcagtaacaaaagataaccattcataaaaatcaacccgttcactaataaagtagagaaaaacatgcaaacgattattactactatatggtaagacaaaccttgtgaagtgctatccctcggtcaacagtaggagaagcttctgtcagacaggacatgcctgaatacatttctttatccatcagaaagaaggcaatagtcttgtcaccgacaattgcctacaggggtagtaacaaaaaagaaattacgaaagcaaagaacatcattttgataagacaaataacggatgccgagggaaaaggaaaacagataaccatggtttacttttttctgcaagacagataagtaaaagtattgaaaaatatttgcaagagttataagacatttactacccaaaaaagttgaaagtacttgatgaagtgatcctgttcatgggaattcatatcaacaaaatcaaaagaaccaaatacctggtcgtgactctcagcataagatatacacttctcactatatctcctattagtcaaactccatgagatttccgtcattaaccactccatatcactcttgttcttcaaataatcaatccacttatcagggacagccattgccaaccggtagtcaaaaccaacacccccctcagagacgggccgaccaagtccaggcatgcctgaaacatcttcagcaattactgttgcatcaggcaagatttcatgaatcagatgatttgccagcatcaagtataccacagcatcaacatctgtggcctcactaaaatactcattgtaatttccggaaaatcccatattgatcccatgatgatgatacaacattgaagtaactccatcaaatcgaaatccatcgaaattatactcctcaagccaccacctcaagttggataaaaggaatcgaagaacttcccaattagcataattaaagagtttgctatcccataatttgtggtaacctcgttctccaatgtgaaagtaggaatcatgtgagctttgaccaacatcaaagccatttagaccatcagtgacattgttactcgcatggctatgaacaacatccattaaaactcgcaaaccaaggctatgggctttgtcaattagatattttaggtcctctggggttccagatctactgcttacagcaaaaaagtttgtaacatggtagccaaaggatgcatagtaggaatgttccatcacagccattaactggactgtgttatagttgtttgcccttatacgaggcaaaacattgtcagcaaattctctatatgaactgacaacaggttctgagctactcattccaacatgagcctcgtagattctcggggccagaggttttggaggacgaggatgtttaaagtgatatctgcagaagaggaagaagatattaccattattaaccacatttcattctggcctttggctatgcaacaacttgggtctataacactctctattgtcataattgtagaactggtcgtatattcatcatatgcaaattagggcaatagaaaagtgaaaaacttgtacctttctgatgagggtgggttccaatatacaccatcgtatggtgctccaaaacttgatgggtcaactgtggcatatttaatccaagcagggatgcgatccgcccaaactccatcactgtgcttgaagcggaactttacacgtgaattatgaggaatggctgacttcccatcagagtcaggaatcttgatactccaaactccaaattggttcttctccatcttgtggttagaaccatcccatccattgaaatcaccaataagttgtgcttccctatatttaaaatcatgactctttgtttaccaaaatggttcacaaagtttaaaaacctgtaattcaaaagctaagaaacctactgagcagcaggggcccattcatggtacacaatgccaccttcttcattgttaaacccaaatttcaaataacctacacacagggatacaaacatgaattttaagggttttaacaaattcaatctgaagataactatatcacatagttttaactatttaacatagttttaacaaattattaacctcttgcaaattcctcaagccctccttcatgtttggtaaaaagctttatctgatctacatatctgctcattctatatttgaagtgatctttatattgttccaagcttggatcagtgctcaatataccaatatgttccatttcttcttccgctgttattgatgagttgtcatctgttaaaactgccgaggtataaaaacagcaatccacctgaaataagtaagccttttagagcctcattctacacttaaaagttataaaaaagggcaaaaaaacgagaggaaagcaatccaatagagaaatgctaaaagacacgtgcctatcagcctcctaggtgttataacattgttagtgtaattaagtatcgagttacatataatttaatatagtaacttttagggaatatcgctaaccaatcatatcttctaaggtgattggcactgcccaataacaatactcaatccaataatgtgttgcgaaatgaaagaatctcctttcgggaagataataatgagttgggaaccataatgtcactgtgtcacaaaaactgtccactccacaattctatctttgagactttttaacattattattgctcaaataaagcttagaaccccatgaaacttaacaaactaaaccaaaaaaaagaatagctctaatggccaaatttagactgagaacttcgaaaacacttactttcccattaattgagttccttgatggaaacacaactctacggtaagctagcaacggctgagatccagagctcccaactccaggttgcgcaaaaatccgactatttatagcaacctttgtacaaaaatcaattaagattaaaatagcataaaaaacaaaaaaaaaattgaattgaaattgaaatagaatgagagagagagagagagagagagagaccttggaagtttgaagagagagtgtgggaagacgaagaagagtagaagaagcaatcatggtgtcagtctcactatcactgcatcgccattagagaatggtgaatgaaggcaattaatgataataataataataataataaaagtgaagaaaataaaagaattatttaggaccgttggttggagtttgagctgagattgagattggatccattatagtaaagtaataatacggaaaagcactgagattgattgactacttgctttttcttccacctgtgaaatgaatcaaagaaaggaaaagaatttgattgcctctgctacgaaacaaaccaaaccaaagcatcaatcataacatttaatatatataaatatatatattattggaaaataaataagaaattttcatgttcgtccatttcttctaattaggattgaaggcttaaatttttacatctatcacatcatatttttttaattttttttgaccgttaaaatttttttctaaaatattgaaattattagattaaagatttttctcaaatttcattcaattttactaatttagtaattatttatgtgttaaatcatgctctccagattttgatatctaccaaattatacctctcaaattttaacatgtaccaaattatatttcataaactttcatccatgttagatttttcttactaaaattggataaaagtctttcaataatctcaataattcaatggagatttttaacagccttaaatgttcaagagatataatttagtacatgttaatatttaagggacaaaaatactaattagcttatactttattaggatatttgtagcaataatactaaaagagtattgctacgaagcacccatagtgcttagcaccagtgtcgcctta

SEQ ID NO: 17921 - DNA, 5318 bp, Cannabis sativa
tgggtagtgaaggggagttcggctggagtgaaatgggatgagaagaagagagaggggaagggggtaatgtaatgtgggggtaaaattgggttttataaaaaataatcccattttacaaatgttacatgctattagtttagaataataatttttaggtttattaagcatgatatttaaaatttcccttacaaaatcagctgaaagtggaattgaaactgttataattccaaactatatctatatctgttcctagagcctttttagctaaagtctgtgtaattacattgttgtgtcgaggaatgtaagagatcttagctctaggaaaagaagataaagattcaataattttccaaatcatgtctgataatggagatctgtccttcgaacggtggtttattttatttaccaagcacaaacagtcagagtgaatggagtgcactggacgatcaacatcgatgcaccattgaatagcttgaaaaagagcatgagcctcgactagaagaggagaaagaacaactatttttgaggaacaaatagcagttgtagtgtggcccgtccagtcttgaacaacagccctaaaacccatttttgaatttgacgttgaaagtgctgcatcagtatagagcgtgtacctgcctaatgggggtaaatgaggttgatgatctaaagcagaggaggcagggcagggaattgcaagatgttgttgacaggtagagtattcttgcaagagattaactgcataactttctacttcttctgttggaaggttcttggattgaaatagagacgaattgcgcctgttccaaataatccacaaaattgtaaaacaaagacacagctgatcctttgacaagccttcataacctgtaagaataaaatcttttatatcctgaaattggtgatcattataaaaatcaattaggctggttttcttccatattttccttgctctggagcatcctaggagagcatgaatgactgtgtccaaatcagaagaacaaaaagaacagttaggggatgggataatatttctactgaaaaggttagaagaagtagggaggatatggtgataagtacgccaaataaagtgctttattttgggaggaacaggaagatgccaaagtgttttccaccattttttagattggtccagattggaggatgaaggtgcagaaacattaaaagaggctcgagatgaggctaggtgataggctgtgttaacagttaggtttcccgaaggatgagaactccaaataagagtatcatcttgggagggatcaatagggatagtgagaatggcagtaactatatcatgagtgaattatgtatgaagcttttgaagatcccaacacactaaatcatttatgaaaaaggacacagtggcaacaggaggaggggaattaattttgaaattaagggatttgagaccaggaacccaataatgctgaagagtagaaaccgatttaccattaccaattttccaaataagcccctgatatagtaaatcccgaccccataaaatactactccaagagtacgaaggagtgtgacccttagaagctgtaaggaagtcattattcttgaaatacctggctttaagaagtctagaaactagagaattaggatttgtgaagattcgccaagcttgctttgcaagaagggcttgattatgaaggacaaagttacgaaatcctaagcctccatggaacttggatacacaaagagagggccagcttttccagtgcatcttagccttgttgccagtagacccctaccaatattgagcaataagtttatcaagggtcttacaaatggagacagggatgcataaacatgacatggcatatgaaggaattgcttggataactgctttaataagtgtctcctttcctgctttggagaaaaatttatgactccaaacctgaagtttagcactttctttctggagtatgtaatgaaaggacgagtttttagatcgaccaaagcactgcaggacgtgttatcaatgctaagggcttgttatcaatactaagagtgttaaagaagaaatctttatcagaaacagccgtgtttggtgaaaaaagagtagaagatttagaaaagttaacagattgaccagtagctttatggtagagagaaagaatatccttgacaatcctacaattattataagaagtgttagtaaagagaaggctatcgtcagcaaaaaggctgtgagagatagaaggagcagacctatagatagagatgcctttgaaattagtattgctagagtgaactcgaatggcggctgagagaccctcagcaaccaggagaaaaaggtaatgggatagtggatccccttgcctaattcctctggtaggggtgaaaggagggagtatagtattattgatagaaagcttgaaagtgacagaagagagacacctaatgataagagaaaccaaggaagaaggaaaaccaaaatgagtaagaatagcttgaatgaagccccactccacacggtcgaaagctttttccatgtcaagtttcaaagcagcccatcaaactttaccacctttacggtgattaatagcattaatgacctcgttggcaataagaacattatcaaagattattcagtcacaaagcaaggcactttgattgttagaaatcaaatcacacaggattaacttaagcctatagtgatagccttagcaataactttataaggagtggtgcagaggctaataggcctaaaatccttaagagaagaagctttctttctttttggtattaggaccaaggtagtatcattgatggaggaaaaatcggattgattgttgagcacttcaagaacagcctccgtgaaactgttccccaccgtagtccaattcttttgatagaattgagcattaagaccatcaaagccaggtgctttgtctcccagaagttgaaacaaagcggaatggacttcatcaggagtgaaaggttgactgagaagttggtattgggcataattgagggtgtgggagactccatgaagtatcgaattaatagcagtggaatcagtaccctaagaagtgaaaagggagacataaaactctctgaaatgatgacagataaggttgaagtcatgagtagtagtaccatctgctagagtaatttgagaaatggtattatgtctacgcttagaagaagctcgatggtgaaaaaatttggtatttttgtcaccagccttcagccaggaggcacgagctcgttgtttccagaaaacttcctctttatgaagagctacatcaagatcgttttgaattgccttagcacgctggagatcactctgagtgagctcaggggaagaataagtattttccaaggcaatttggaggttttgcatggtgtttttgaattgacgtttattttttccccagtcttgaagtttgttgacacagtgggactgacaggcaaggaaagaggtgaggggattgttgttgttgttgtgattttgagagtaccaattggtttggacaacatgaaaaaaatcaggttcagagagccaaaaattttcgaatcgaaaaccagggaaacttttgtgagtatggcttgaatcagtaaataagacttttagacatctgtgatccgatccaaaataagggaggtgagtgagggaagccttatgaaaaagatcaagccaagatttgctaacaacagcccagtccagcctttcaaacgtatgaccatgcttgtaagtgaattggttaccaatgtgaggcatgggggtgagggaatacttataaatgaaggattggaaatggaccatagcactaggagatagccgagtactagtggatttatcattaagaccaagataatcattgaaatcaccaatgataatccagggagaaaaaggagcaacatcatatagtctattaagcaaggtgtaacaatccaatttaccagaaacataaggggaaccataataacaagaaagatgaaaatttatatttcagtcatttttacaaaacagtctatatgactactagagtacaataagatattaatattaataacatctttccaaaagagaaaaagaccacctcccaaacccttcctaggaacttcaaaagcaaaatcaaaagaaagttgagtcttaaaccgagcaatagaaccgaccctaagcttggtctccatgagaaaaagaactttaggttgatgttgtttcaccaaaatggagaggtttcggaatgctcgagaactccccaaacctcgagccttccagcttaaaagactcatttttctgggcggggttgcaaagcaacacccgcctgttcttctgagattgcaattcaaggaaccacaactacatcttcatcatcagtaacagctctagcacgtttcagcatttccctaatagaatttccaatctggacattctgccttgtgaaagatctcttgacgccagacaaatccatagatgggggagataaaatgaagtgaggacattcagaaaccataacagttttgcctttgtcaaaactggagatcacagacgtggtcattatgggggcagtaggcaaaggacatggaagacttggaattccagcaaaaaaggctgttgaggacgtcactgaaagaccagaagtggagtgatcagacccattaccatcagataaaacatccaaagacaaagaggtattcaccatactaggaaccaggaactggttgatagcatcctgaagactctgattagagactgagtttcgtgaagacgattcttcaaatggtatggaattggaaagatcaaagatactctttttgtaagcagatttggcaggtgctcttaaaatatccctataagataaggatggacgaataggggaagcatcacagaatttcagaagcttttcacacctgttaaaagtgtggtcaagcataccacagtaataacagtagttttggatcccttcatacataaatttgagccatttaacagagagaagggaacgaaacttgatattcatgccacaacgcaaaggcttagtgacatccacaagaactcgaatacgaatgaagggtaagatagtgtcatagagagaggttgtatggacttcatcaccaagttgcactgacaggaatttgtcaaggtcagtggaccgtttgccaaatgggataaggtgaacctggacccagaggggaacatagttaacttgggaggggacagcagtgtcgaattcatcaggaagggcaaaaagaataagattgcgatcaaagtgccacggctgtccttccataacacatctcctatcaccctcacagcaaaaacgcacaagaaacataccaga

SEQ ID NO: 17922 - DNA, 5583 bp, Cannabis sativa
gacatgaaatgaattttcttttattaattgaagaaaaacagagagatactgatatcatattttatatacgtacaattgtttcagtgcataaccaaactgctactatacctagtattactgtcctccaatcaacatcacctaacatattcgccacccactatgcacaatacaccacactaggaaatcttactctgacacaaatctaacataatgaaactcatttccttcaactccaaaatggcccttttcatcataatacttaaatctattctataattgttgatttcagttgtatagaatatagatacttcatgctttattttatgtaattaagttcaaaataaatgtatttgaataggtttccaatcaaagcatggttacataaaactaaacacaaagtatactctaaatacataaaatcaagctgaaaagcacataaccaaatttgtcccgaagagttgaaaatccaaaagcattaatacttttagaccgtgaaaaaaaaatagtagttaaaaagccaagcttaagtatttagtttagtattttatacacaaaattaaacaattcaatttcattcttggccgataatatatttgctcgatccgatacaagaatgattgacatgaatactatagacaaattataacgctttttctttttcatctaggcttgcacttgcccaaaatgcccacaaaggctatacttactgtgtgatttaggtatctatcaccagtcacctgtgccaaaatgatatcaagaaataaaacctgagagactagaccccatcttcacaacatactccatccaaaaggcatgactaattttggtcaaaaccaaaaacatgtatgcaagtaactaaatattctagcctaaacattacagcaggaaaaagaaaacaccattactatgaagtttcattgtgaccctcttttgctccggctaccagcaccagacaaactagaacttggtgaaacacttccacggggaccatgtgatggaacttgacgaggagatcccgaacttaagttgctcattctcactgtctcagcctctaaattcttggcttcatctttgagtatcaacatctgtttcagcaaaagagggccaaagaatgagtgcagtttacatcatattataaacactcagttcatcagattaggtttctaagtcattaaaaaaaatgatgataacgaagacagagcatcctattgaagaaatgtcttgaatttggtactctacccgagtttcattctctcttagacggtcctgcagagcacttatggctggactcaagctgcatagattgaagacaagataaggacaaaaaagaaaagggacaacaggaagggaggaggagaaaaaagtgaaacagtaatgccaggtaagagttatgctgaccaatattcaattaatttgcacatggaagcctgatatgttgatgtgtgatgtacaaaagcaagtggatgaactttccaatccctaagtaagaatacacaaattcagaatataaatcactttctagtttaaagtaacatgtgatcatctttagcacctcatattttgcaagatagcttggttatatgctgcttgttcctcttcgtataatacacgttgcaaatccgtgaatgaagtcaaaggagaatcaagcttaataaggcttgacgtaggcattacataaagaggaacttcctttctgacatactccgcaccgctgccaccaaacataacagtctgagttagaggtcaagagttttcttgcaagaataaagagcagacgaagattgacaatgtgagaaaataaccaagaaaaatcagtaaataagaaaataaaacaccatagctggagtggatcatagtagatgtgtcagtagcagataataatgtaagaaataaaaataaactcatccataataactgactatttgatgattataccaaaatgtaaaatgtaaagaggatgcatcatattcaaataaacaaaagagtttcaataaaatcatattcataaccaataaacaccaaagttttaataagaagattttagacccaaaaaaatgctttctaaaatgattgagaaagatcttgagtggttaagtacatactcatgtatacctaatgtccaaatttgaacgatgcattgcttcttgcatactctctgacatatccatgggatctatatcaacaaaatcatttgaatggttcgtattgtagcttcctccaaatctatctttttttacagagcttgcatcagcattagcaaagagaacccccaaatcggaagatcttcccccaacctaatcaataaaaaagttgtaaggaaaagctagaagcactgaatcaatatatattaaggactaaatgaaactatgctctctctctcttgagtatccaaccaaatgattgtatatcaattactagaaattcaaattgtatcctatcatctaagtatctctgcagtagacaggtagaaaaaaaaataaaaggaaagagtgagaaaagaagagaagagagaaactttgatgaattcattaacaatctgcccatgtttgacatagctatacgaaatagattactttctaaatttacacttatgaaatagattagtaatattcccatcaatatactttcctatctttaacccggtctttagtactcactttgtgcataaactaccacctagctatttccacttcaataaatgaaattcataccttattacctccagccattctagaatcactgatgtcttgttcagaagtctcaatgacaccaccagatctcactggtgcaatttctgcagaactagaagatgattcaagatctattactgaatttctatttacaggagagagagaaatcggtcttgaaatttgagattgctttccatctgaggactggaacgctatgacttggatcctgccaacctgaaattcaataaaatgggacccatgtacactttcatggtgctactaagctactttactaataaaattaataataaataatttcaacaaaccttgaatgaatcctcactgaaacaggaaaaaatcagtccaataaagccagagtcaaggagttggtacattccctgagtacgcacatctacgagcggaaggcagttgtaaatattagttttcattactaaacaaaaataacatgtctaaaaaattgcaatcctatcagcgcagtaaacagccttttgtaaaatttgtattgctctttttagcttaaattttcacatcagatcttgcacaatcaaattgaaatgaaataattctaattgagaaacactcaccaacgtgagaaggaagaacggtaatatgaggatgtgaatggtaccacccaatcactctagttgttcttcctgttgaagttgtcattctgtgctaaataaagtcaaagaaaaacaatgtgaccaaaaagcaaaggcaaagagagctagttatacaaccttaacatatcagatgtagtaagcctgcatgagaccattatgttaagagagtaaattcattaaaatctagggtcaagccccatactttttaggtgtggaagaaaactaattacttcgaagtctagaaacctagaaacaggggattaggtgttaggagaaaatcacaaaaaagggggtaacctaaaaaaatgagacagaaactctcttaacattgtgcatcaataatgataatacactatcctgtattcctgtgtaatacatacaaaaaaataggatgctaagaaaatgaccattgtaataatagtagctagtattaaatgaaagcaataaggatatttcagcttgagctgaagcagcagccagctgttcaggattggtctccacacgatcctttcttctatcagatcgagtttgtggtgaggctccccaaattagtgcaattacattcccattcttgtactacactcacaaaaaccagatatgaaatattgataataaaaaatcccaaggtcaaaattttttcaaggaaaattaaaactacttgaaatatgttaaaaaaggataatacaaaataagatggaagcatcgtctaaataccatagttttaattccagacaagtcataccaagaaatcatgtacatcaagtatgggcacacataatttagcgctttaagatactagttggtttccttgcatacataaattgcagtcatctttcaagtgcctaatcttctggtgtttgctcttcatagcaagacaaacaaggaatctgcgagacctatatgcatactcgtacatattcatacataaaaatgcacacacatacacacctgtatatcagtacataaactaaaattttcaagtttcaaatagcgttaacaaacttcaaaactaagttacacaatatgaccagtaaatttgagaactaggtagaactgaaataaagaaataggagaaccactaaacttaacacccaccgattctgaaacacagataatttcaagaacccacatccactactataatcaaacatgtgtgagtattgacttaattgaatccactttcgaaactactaggaaattaacatgcaactaaaaagcaatagaggcacattgcttaacccccaatccaatccagcaaggacgctacggtttctgagaaccgcaataccctaaagcacaaattagggcaacccaaaatccgttgcatgaaaatagttacaaaactccattcagaaatgtaaccgaaaagattcaagatcgaaattgttgacaaaatcctccaagaaataatgttgagacagaatgaacaaaaagataggggaattgaaagaagaaaaaaacctcgatatcaccaagaagaagtcccatgatctcttcggtctcggtagacaatgcgtgagttagacaagtcaaccagacgtcctcagacattttcacacatgttaaagacatcttgttcctcttctttctcaggttttggttacggactttgtaccaaatctacttgtactcgtactctttctttctgtttctgtagaaacaagaaaccatcaaagcaactgtgctaagagctgtggttgaggatggagtgtggagagggatctgagttgtaagaaagccagaccacaccaaccaacaaagcccctcagtctcagtctcagtctcagacagacccgttgcccttcccccaaaattattacttttcttatttctaatatgaccccttcaaaacctcatttttctttagcagacccctcattaaaaactatttattattattattttgtgtttgatcatgcaactggaactagggctgtcaaaacgggtcagatacgatgacacgactcgaaatctgcacgagaattagtgggtttgggtttaccttaaatgggttcgggtcgtgttcaggttgacttgtctaacccttttaataagcgggtcgtgtttgggttgacacgactaatacgaaattgacccgttaatgacctatttaaagttattttagtagtttaatgtgtcataaatggcttacaaacgtgttgaatacttcataaacgtgttattgattgacatgtttaaacaaaatatacttataaacgggttacacgggtcgtgtcgtgtcaacccgt

SEQ ID NO: 17923 - DNA, 14756 bp, Cannabis sativa
  modified_base (225)..(227): a, c, t, g, unknown or other
aaaagagagagagagagattgagagatatatatgaggcatctacacatcaaaaatatcaaaaatataggtgccgtttgttaataattttattttctaattttttaatcacaaaataaaagtaaattttttgtttttaaaaaataaaaatgcgtttggtaaccacttttttgttttttcaatttcaaaaactgaaaacaaaaatgtgttctgtaaagtttattttnnnttttatttttttattttaaaattagaaaaaaaaactatttaaaaaaatattaaaagtgatttttttttttgttttaaaattttgattttcaattaaaaaattgaaatgcaaaaacagttttatagaacatgtttttaaataatattttcacttttctatttttaaaacaaaaaactgattaaaaaggtgttaccaaacaccaccatagtattttataaaattatagtatgtgtgcacacttaaattaatatatatgtacattaattgtgataatactttttcgattatatgagtctattattaaaaacattatcataaattattgttgaggtattaagaatacacaaaaattgtcaagtgtttcacttagtatgtaatgcttttttaagaaggtgttcaaaaacaaatttgttagatccaaagtcaagttcgatgaatggaccaagctgagctagtatagtataatactttatattgaaaagtcttgatatttgatatttgtggtagtttctcattagtaattactaccactagagatatagagtcacacattgaatatttagaatatataaatgttctatttattttattagtatgatgtatgatactttttttaaaaaaatatataagttaaatttaaaatagaaattattatgtgaaagttaaattaataaaaatgcaacccaacaaattaaatacataggaatcccaataactatgtatagtattttgatctatatatattttacgtgtacgtgtcattattcttggtataataataatggtatggaagaggtgagccaaatttcattttcattaagcacacgcgtttgtattttatttatatattgacctaacccaactaagtatatatgtattaaaattttataaatatatacacataaatcatattttagaggtaacagattatgacacataagaattatttggtatatatagcttttacttataagtaggtgagatgatcggtctttaacttaaggcttattgtctcttgtgagttaacaacgacagacattcatgaaagatatcctaataatcatattcttaacctccttaaaaccaaaaaaaatttactttttaattttttatttgagtattattattggatattagtatttttaaaaattattttttaaattatatataactcgatatttaattacaccaataaatatataataccgatcttttaacaattctcttcctatttatgtgttttattaacttttgaggcattataatgaagaattagctcagataattagtttcaataagaaaacaaaactcacaaaattaattagtaaaaaaagtagaaaaaacaaatatgtggatgccaatcaactaatcaaatctctttctatatttaagtagacacttctggctacccaaaataatagagacatgggttggaaacttacttaataattaataaaacttttatattattgcatagtaagagtagtggacatattaaaaagaataaaaaattattttattactagaaaatcatgtcttgtaaatatatgggtataaataatatatctcataaactttagttatcaaaaattagtattatgttatcttttgtaaattttttcagtcattttattaatgtggcataatattgtctaatttagttttttatccaaataaattataataaaaattaattttacaaaattttatttaaatttctttaatatgttatatgttttaacttttttctttggtaataaattagtttaaaaaaattagtttatatatataattttttatgttaaaatgagatttttattataaattagttcgaaattagtttattataaagttttataaattagtattgttcaccatgtcatatcttatcagtctaatttataaaaagttttgacataattattattttttactaattaataaaattaaggaacatttttaataatgttaatattacaaaggatacaattatataagtaacaaagtttagaggtaaaaataattttgttctttaacaaaatcttaatttttattaataaggttaagagagtatttttgacaacaattatattacatgggcacaattatataagtgacaaaatttggggacaaaataattttatattttattaaaaataaggtaaataaatactattttagactaatattttacaaaagttactaattagactttattaactgataaattagatattgtattttttaaaataatactaaataatattttaaattaatttttaattaaaataaaatttaataataattaaatataaatatattacgataaaactgtatatattttccgtatctgtttgtcttaaaaaattatctttaaattaattatattaaaaaaaattactaaaaattaattttaaagccttacttatactattttaaaaaataaaaaatttaagcatttggttattaataaaataaagtcaaatgagtaaattttgataatccaagtcaaaaatagtattaacccttcaaaatatataatttcttttaatttttattaacaagcgtgactatatgataaaaagagtcactgtttcatttgagtacttatcaggtagagttgaagttggataataattgtgtcagtcagaccaaaaagaaaaacaagaagaagtaaaaggttgagttcagagattaacgtaagaagttaaaagaatttcagctgagcattttccactctatttcctattttgttttgttctttttcattcttcttcttctttcttatttctcatatcgaaaagaaagaaaaagaaagaaaaaaaaaaaaaaaaaactaagtggatgtgatgaagaaagataaacttctttttatatattctattaagaatctttactaatcaaaaccctccattatttaaaagatcaacaacaccaattcagagtaatctattctcttacctatatcagaataatctattctccaactccaattctaaacagctcttttttctggttcaaacactattttcagtattgtgtttgtctgcattggtgggtcgtgaactacttttctactcataaaaataagaataaaaaaaatcattcctttaaaaaataaagttcaagtctttattttttcctcaacacttgatataactagggagggtgtttcttcatctgggtcttcttaaaactcctcaaaaatggtttttccttgattattagtaagaaagccatggatctggagagtgtgataggtattcatccagtcaaggtaaacacatgcaccactctctttctctgttacaagaccctaataaagttcacacctttcttatgaattttctttctttgtatttgcagaagaaggattcatggaaaacagtactaactttggcatatcagagcttgggaattgtgtatggagatttaagcacatcccctttatatgtttacaagagcactttcgctgaagacattcaacactcagatactaatgaagagatttatggggttctgtcttttgtgttctggacactaactcttataccattagttaaatatgtgtttattgtgcttagagctaatgacaatggtgaaggtgggacttttgctctatactctttgctctgccgccatgcccgagttagctccttgcccaattgtcaagtggctgaccaagacctttctgagtataataccaaagatggggtcgtctctcccactaagactactgctgggttgactcttaaatcgacattggagaagtatagagtgttgcagacagtcttactggttttagctctgattgggacttgtatggttattggggatggtgttctcacacctgcaatatcaggtattgtttaattcaaggttttgaattatgaaattttgatataaataattgtaattgattcaatttggctctgttttcttttcttttctctccccaagtattctctgctgtttcgggtctagagctttccatgcataaagaacagcatcgctgtaagtatatattttcttgttctgcactttgaatttcaacttatatttgcatatattcgaatgggtcaacatgaatttcttcctttctttcttaaaaaatgaaaatggtttctggattttgtgatttagagatgtaataatactgtagatgtgtttcaattaagaggtttttaagtcataattaggattaaggtatgctaatcttgcttttactgccaagaagttagagcttaaatctgtgattgaaaagattaataaagaaatgaaagatcttttcttctttaatttgatattcacagacgtgaccttagtggatgaacagggattattacctaaatttttaacaattttaaacaagtgcatgcactacttgtgggtcccttaacaaatatataattaagattaattacccactctaatcaatgtctaatcatcatcaagtcatattttggattttgataacatacaattacacactcctttatcggtcattataatataacaaagatacaaaatgtagcctaagaaatatagatataaaattcattgagggtgttaacataaagttagtgtatttgtaaagttaatatctttgttttaagtaaaggaaaacgtcatttagtttagataagactaaatataaataatatagtatatttttttatagaatgatctagtacaaaacaggcatatttttcatcccattttaatgatgatctagtggccatacatatatgtatgtataaccatcataatcttggtcaatttataagcttaagtttccaaaaatgcatacattacatgatcatgatttcatgtcatctatgttattggccaaaacatcactatcatccttgtcatataaccagtttcactattacaagacacaagattttttaccattacaacaaacatgtttttggctttagtcccaactctgaataaatatagcttataattcttatatttcaatcaaaatgtttgtcacaattactagtggggaatatatacatcagtacaatttagttgctggcttttgctatagtgggcaatctgtttttccactgacttatcatggtgacaaaaatttgtcttatcaactagactttggcagccattatcagattacagagttaagaataataacaattatggccatcaaaacaaagagatgataaatttctatgtttatgctttatcatgaacctcatttacttttaaaagagaaaagcctcaattcttactgttcagtaagcatatcagtcatttcttctgtcttttactctagtgcccaatgtgtttgttctccactgattcatcatggtgacaagaaatttttttggtatcaacttgacttgactaaccattgtaagctgtgaaagtttggtttatttcattgcttatgattcgtgaagaaaccctttaactgtttttaactaattaaaccaataactgaattacaagaaaatatttaggctagactttatatactttgcttctaatctcaaagcatatgacaaaataactgaatacatttttctctcatcagtttctcctatcgcctaataacactgtcacgtctcaaagcatatggaaggtgaatcgtatcaatttcttaatctcgattcgtttatttcttacagatgttgaagtcccagttgcttgtgctgtgcttatattcttgtttgccttgcaacattatgggacacataaagttggatttctgtttgcaccaattgtaattacatggctattctgcatcagtgccattggtgtgtataatatcattcattggaatcctcatgtctaccaagcactctctccatattatatgtacaaatttttaaagaaaactcaaagaggaggttggatgtcattgggtggaattttgttgtgtataacaggtactacactatgtatttgaactgtatttcctattcatttttacataatgtatttctctccctaatatcacttcttctctttggcaggatctgaagccatgtttgctgatctgggacacttctcacaactttcaattcaggtacatacaccataatacaattgaacttggctcatttcaagaaaatattggtctacgattttcgatttccactagtagatattgcagaaaatcctcttaacaaaaatatgcattgtgcagattgctttcacgtttgtggtttacccttccttgattctagcatacatgggacaagctgcttatctttccatgcatcacgatttagaaactgattaccggattggtttctatgtatccgttccaggtaggtgtctaatgtttatacttatgtaaaacttgtcttaatgtcttaacatcaaaatggaatttagctaaagtaaaaaccttctgaaacctcagagaaaataaggtggcctgtactggctatagccattctggcagcagtggtgggaagccaagctgtaatcactgggactttttcgataataaaacagtgtacagcattgggatgctttccaaaggtgaaaatcgtccacacgtcatctaaagtacacggccagatttacattcctgagataaactggactctaatgctgttatgcttgagtgtgactattggttttagggacacaaaacgcatgggcaatgcatcaggtaactatatttatgtcaaaaatatggctctttgcaatgcaagacatcatttttttttacttacttgatgtcttttgtttaccttatcatacaggccttgcagttataactgtcatgcttgtaaccacttgcctaatgtctctagttatggtattgtgctggcacaaaagtatcttcctagccatttgttttattttcttctttggctccattgaagcactctacttctcagcatctctgatcaagttcagggaaggagcttgggtcccggttgcactctcattcatcttcctcgttgtcatgtatgtttggcactatggaacacagaagaaatatgaatctgatgttcaaaataaggtctctatcaattggcttcttggtctaggcccgaatttagggatagttagagtaaggggaatagggctaatacataccgagttggtttctggtatcccagcagtattttctcacttcgtaaccaacctcccagctttccaccaggttgttgttttcctctgtgtcaagtctgttccggttcctcatgttagacctgaagaaaggttcctagtgggaagagttggtccaaaggagtaccgactttacagatgcatagcgcgttatggttaccatgacatacacaaggatgacttagaattcgagaaggatcttgttcgaagcattgcagaatttatccggtcagagagaccagaatgtgacatgagattagaagagtcggaaagtgatgagaaaatgacagttgttggaactgcatcgtctaacttaaaaggcattagactttcagaagatggaggagattgttccgagagagcggggacatcagcagagttgcaggaaataaggtctccgaagaaagtgaggaagagagtaaggtttgtgcttccagagagtccaagaattgatagagaaactcaaaaagagttgcaagaattaatggaagctagggaagcaggaatggcatttatattaggacattcctatgttagagcaaagagtggatcaggtttcatgaaaagattagttataaatattggttatgacttcttgagaagaaattttaggggaccaagctatgctttgagcttccctcatgcttcaactcttgaggtgggaatggtctaccatgtttaaactctctcagtatgtatatagcttatatttttgtctgtctctctatctctttgggaagttttggtgctgtagtcatgttgtttttatatagtgaatataaatatatgatagatgaaaaggcactttgtataactgtatgtatctgtatgttgctccctttgcagagtaaatccatagaagaagagcttatagttctagtttttgcttcttattcttagaacttaatagacaaaatcgatagacacggctaatgtaagattatcccatcaaaaacttctcaatcttttatcccaataaaaaaatattgttgactacatgggcacacattttcaatattaattataatcatttaattaattggtcttaaaaaccaaactcttgacagaaaatcactaatcctcttatagtggtgctgttaaatttttttatttcagcataagccccaaatagtatagaactaatcttaatttcagataagacaaccatcctatttgaatttcgagtagctttgcccatgattatgagcactgtggtaatgtattatagtactgtccaacactttagagaaatctaatattcatacattattagtggaatattaaatggccataagggtacgagagggtatgtgtggggatgctgggattgaatcccaaattatatagtatgtatatatattgttggaataaattaaacatcatttttctctacgatattgtctagtttagacttaagctcttgcaattttatttttgaacacatttttaaaaggtctcaacaaataattcttttttacaaattctatcgtgagattaccggaactcatttcctttgtttaagattctaagaattaattcacatggctattttgggatctggctaagtcttcacgattttgtttctgaacacttttctaaaaaacctcaattaatagaaatattgtttgttgttatagacttatcatctttctcattttgacctaatgtggaattttaattgcaaactcaattattagcggggtaaataagtagcaataataacgagcagccgttttcgttatttaaattgtaaatataactatgtggaaatataaattgaggacctaagttaaggtgttgttgagtatttctctattattatatgtgcaagtagttggagcctaggcctaataataccccatgaaatgaatggtgattaatagttttgcatagagcatgaaaagcaaaagaagctataaaaagtggaccaagatgaggagaggaatccagacaaggggtcctaagtccgagtccaagtcataagtaactactctacttactctacaccaactgaaaaaggctgcaaaccccaatactaatgttgttgtacataatgaagttgacacgataagcaatgtttatgactttggggggacacgtggtggaagagaagcttttgcccataaattggtcatttcctttccaatccatgtggattataactcatgatgtaggattctgtttttcttctttattaatattctattagtattaactgttaagttttttattttgtcatagataattaagttaccaaatgagaatgagataaactaactaatcaaaatcatgaaagaaatttctgtagaaatctacattacatctctctctctctctctacttttttaagacttattaggcaccactaccagtaatgtttaacactagtgctatttttcagtatttctcttcaaaatttaccataaatcatataacataaaacaacatttagtgaagaaaaagaccaagttcaacgattctaaatcaaaggtagtaaagaggtggtcacatataagtgtaatgacctgggaaaaatcaaaggtgatgactgatgagtataatattaagatggaccaatgttacttactgattctcatcatcaatcctaagaggctgcgtaaatttaacgttgttgaccactgaccaccaaaactcataaaaacaagttcaaatccggaaaaagaagggcaaaataaaagattaattctttttttaaagagaaaaataaagttttaatctttttagttcgttcctaggtcatgaaaaacattcattcattccccacatggaggataataccaaagtacaaaggtactatagtactactttaataccttcaaaattagatctaatcaaggttcacaaaattaaaagactattgttattgtatattagtagtgtccatgtgacgtcttataattagttagcgatattcttaaaaattattttattaaggtatataaaatttaatacttaattacaccaataacatacatctaggaaggtactaagtacgaatgttctttaacaattcttaaattgaaatacaaaaaaaggaaggtaaaacaaaacaaaataagatttatcgaagcgcttaaaggccttcactttatttggaatattgataattatgtttctgcatgtaatcaactctctaaaaattttatttattgtaattattcgtttattttgcgttgttgtaattttgctgttcataacatggctaattgagtgttcgtctagaacacctcaggttttgtggaaccctcctcaattcctgatactatcatttgtaaggaccgtgaggtctaattttattatctatctaacgctttatttcaaaaaaaaagaaaaaaaaggttttaagtattgattcaataatcaaaagaagctactaatcttgagatttgtgaacttaatataacattattgctaatgttttaagaccaagagtgaagaccatagctgacaacagaccatccccacataggaccaccacccgatttggaaaccccataataatgtattaaatttgctaatttaaattatggaggcaccctaatgatgattaagaaaagataaccttgtttaactaagtacttgtactattgtgatgatgacatgaacatgattcaaaatattcatggaggaggagggtatcccatttatcaagttaagtaacattcgaaatcaacttggcaaagttaagtagtcatctaacatcttcattaagacaaagttttaagtagcaagaaaaaaaaaaagagtacttgattctctctccctgccattgcagaccacttctctttctctttttgcctttactttctttccaacaacagagcttttcattgtgaaaccttcttattcactctgcccttctttctttattttctcttgagaaaaacaaatgtactcacttacgtatagaaaagatggcataacaatgtctgtggggtatcctacttaagtgggtttccttcaaatttggtgctttgaggaatctccatgtttgagcattttgtatctttgatgttctaatgtgaagaacaacaatggcgcggagtttgactgctttgcttcttattttggtgattttttcttctgggtgtgcttcagtttcggccacacctcctgcaagtgagtgaaaagaaaaccccatgcatttctttgcattttgattttggtacttttttcttttaaaatatgtatatatggctaactagtttgattaaaactgcagaaattgttagtgggattgtttcaaatgtggtatctgcacttgtcaaatggctttggtcattaaaatccacccccaaaactggtatagatcttcaagtgactcatctttgtgccaatttttttctatattgaaatggggtttgatggactgatttcgtgattaaaatattcagcaatttctagccgttcgatgatgaaatttgagagtgggtatactgtagaaactgtatttgatggaagtaaactgggaatagaaccttactctgttgaagtatccccaagtgggcagcttctggttttggattctgagaatagtaatatctacaagatctcaacaccattgtctcgatgtaagctactcctacttttgtccttttagtttttgaaatgtgcttctttgtttcttctttttaaggcttaaatcttttgttttttattaatttcaaatttccacatgttagatcatttgttggtcatgctttttctctcctttgttttgctagattgatcttgttgttttgatgcagatatataattaatcattgtcatcatggctatgtatccaaagactaaatttgaaaaataaaccataaaatttgttctgtacacatggtattgtgtttaagtctaattgtattagattccttgctttccttgtcaaactcttaccagaaatgaaaattagctagttcaaaatgtcttcagttgcttttctttagttgaagactccacttttggaagtgcaatataacaaataaccccaccaactccatccttttagagattttcagtcttctccttccttttattcttagtttttgtcccctcctaatgatgtaaggaagatatctaatggccagttagtttagtttagtcatcctattgtcttttcttttcttaaccaatactttaaatattcctatacttttgactaaatgccttttcaaaacaattttttcattctccatgaattgctgatgtgattactattcagatgataagtttcctagtttagtactttgtgatgaactgttctatgaatttctttcagatagccggcctaagttagttgccgggtcacccgaaggatatgccgggcatgtagatggaaaaccgagagaagcaagattgaatcaccctaaaggacttactgcagatgacaagggaaatatttacattgctgatacaatgaacatggctatcaggaagataagtgatacaggtaaacctctaaagttattcacatttgctttgttaacatctttgactgtgaaaatttatgttagatgactaaatgtgaaagaaactctctcattcttcaggggttacaacaattgctggtgggaaatggggccaaggaggtgatcatgttgatggtccaagtgaagatgcaaagttttcagatgattttgatgtcatttatatgggaagtagctgctctcttttgattatagacagaggaaaccaggcaattcgggaaattcaactcaacgatgatgactgttcgtaccaatatgacagcagtttccatttgggtaacactaaattcaaaacgcagaaccttcattcctgtaaaaatgctttcattgttatgaatgtctataataatgccttcgtttccttctcattgcaggaatagcaatgctggttgcagcagcattcttcggttacatgttggcactgcttcagcgcagggtgcgggctatgttttcttcacaagaggtgagtaacgcacctcaaattcacgatagaattttccaaaattatccaaattccagaagtaggatatattggtcatgtaaggtaaattttggaccaccaattttgatttttgagaacaatttgaatattcttgctaatgttttcttttccttttcgcttttttgaatgttttttacaactttttttctcaggatgtaagaactccgataaagagaaccatgccaatgtcaccatatcagaagcctcctaaatctgtcagaccccctttaattccagccgaggatgaatatgaaagatcagaagagggcatcttcggttcatttgggaggcttgtcctcaacactggctcatcaatggctgaaatatttggggggttgttttcagggttcagaagcaaacctcgtcattatcagattcagcatcaatttcatcaacaaaacaaatattcaaattcatggcccatgcaagaaagctttgtaattccagatgaagacgaacctcctccatcactagaaacgagaaccccaacaccaaagagaaactatccattcatgacgaaagaacttgaaaagagtcaccatgtgaagcagagccgagcttattacaacacgtgggatggtgaatatcgccaacagcaacagcaccaacagcagcagcagcagcaagtgcagccacatcaccagcatcaacagcaacaccaccacagacattattcagctagtcctgaaacttactacgaaaagagctgtgagacgaatgagatagtctttggagcagttcaagagcaggatggacggcgtgaagctgtggttataaaggcagtagattatggggatcctgtttataatcatcacaacatccgaccacggctcaattacacgggctattcccatgtctattgatcttgcttcatctctgcacaaaggactaaaagaacactttccattgttgtactgaaaatgagatgagattaagccaatgtaggaagtaggcccttaatgtatgttttcttgtagtttagagtttatgtaagaaagtaatatactagcctgaattgtatcttattttaactagcagaaatcccaatgaaacaaattagtattccgggtttcatagcttattgaaactcggaagtcctttggcatcaacttaacaagttttgtttcaaatgagtatcaaaagctttggttctttccaatcaaaactagtaatgatatgaagaaaaatggtaaagtgggtcattgtatactaataccaaccataagttcaaaaaatgtagatctcaaccactagttacataagaaaaattaagttaaattttttgaagagtaaatgaaagacagaatttaaaatacaaacttccatttacgaaatttcgtctcaactttatattccttgaatgtaaaatttcccaaaactcatataatactcggaaaattttaaaaa

SEQ ID NO: 17924 - DNA, 2812 bp, Cannabis sativa
  modified_base (2738)..(2774): a, c, t, g, unknown or other
tgggttcgaacccaccactgcacatattggaaggattcgccaatagaatatgaaaggataaggtagacaaggtcaagctgcttacatatggaattttcctcattcggtttcactcagtggaaaacagagatgaagtgctgaatggagggtatatctttttcaataaaagaccagtaataatgaaaccctggaatcctaatatgaacttcaggagggaggatgtgaaacaagttcctatttgggtacagcttgaggagcttgaactcaagtattggggccaaaagtctctcttcaaaattgttggacaggtggggaagccgattatggtggatagtgtgacaaaggaaagggaaagattgagctatccaagagttttaattgaagtccaaatgaatcaggtccttcctaatatcttgaagtttgaggatgagtttgggatgaacaatcatgtgggtatcaattatgaatggaagcctacaatatgttcgaactgctctggtatggggcatgctactgcagaatgcagaaaatctactaaagctaagcaggaatggatcattaaggaagataaaaggcaacagaaaccaatagtggatgaagaaggtttccaggctgtcagtaagggaaaaaaaattagtgaacaggggcagccatctggtaccaaaattgataatggttttcaggttttaactgattgtgcagacctgggaattgcaacatatatgtaggaattaagctcttctaatgttcgtaatacaagtgagggggggagcagtctcttggccatgtaagttcattgtttagaatgttcgaggagccaatagccagcaaaaacaacagctaataaagcaatttattagaggccaaaatgctggttttgttggacttctcgaaacaagggtcaaaggttcaaaagcttggaaccttgtaccacaatgtgttttcgacaaatatagcatggcatcaaggaggcaagatagttatagcttgggactctatcaaatttgttgtaaacaatataaagtgcaccagtcaactaattcacttgaaaattgctgcaacaaatgggagattcgattgttacttgactgtagtatatggggcaaatgatagtgaaggaaggaaagttttatggactgatttgtgtgatttggcaactgatggaaaatggctcattatgggagactttaatgctattttagcaaaagaagaaagggtggggcatagagtgaagtaccatgttgacacagatattacaagctatgttcagcattatcagcttgaagatgtaaaggcaactgggtgcttctatacctagtctaataagcagcaaggacaaaaatagaatctactcaaaaactgatcgagttttggcaaattaagaatggcttgaccaatttccgaatgctgaggcaatttttgttaatgatggggcctttgatcatactcctggtatgttatccttgtatcccaggtggagtagtggaaagaaaccttttatatactttagaatgtgatcttcacatcctaattatttaaataagatcaatgaggaatggaacaaggaaatcagaggtaccagaatgtatcaactaatcaacaagatgaaggcattgaaacccatattcaaggagattaacagggagggttttctgatgtctaagctgcttacacacaggctaaggaagagcttaatgatatacaagacaagctgcagcttgaccctttaaactctactttgcatactgcagagttagatgctagagacaagctaaatgccacattcaagaattgcagctcttttctacagcaaaaagccaaggcaacctggatccagaatggagattgcaacacagctgtattccatgccggtatcaaatagaggcacaggcagaaccagattttgtctattgtcagggaagatggggtaagagtttctgaacctgatcatgttattgaggccttcattgcatattacaaatcattacttggtactaagatggttaataggaaaaatgtcctgaagaaggtgattttagagggccctgttcttgaaccttgtcaagctactttgttgttgaaagagtacactaaagaggatgtgaagaaggcactatttgaaattcatgggaataaagcccttgggcctgataggtattccagttttttctttcaagataattaggagctttgggagaaaatctgttctatgcagtcacatccttcttagaatctgggagaattctaaaagagatcaacactaccattctgacaatggttcccaaaatcaagtgtcctactattgttaagaattttagaccaattgcttgctacaacgttgtttataagattgcaaccaagctattgtgctctagaatcaaacatattctccccaatttggtttcccaaagccaaggaggattcatccaggggagatttatacggcacaacataatgatctgtcaagacctagtgagacattatgggaggaaatcaagcaaggccaactgtttgattaagattgatttgcaaaaagcatatgatactttagaatgggactttgtggaggagatgctggagatgctacaagctttaaagttcccagatcttttcatcaaattggtcatgaactgtgtgagaacccccatattctctatcatgtttaatggttctgtacatggtttctttgaaaccagtaggggactgcgacaagcggatgttgggttttgtgccctaannnnnnnnnnnnnnnnnnnnnnnnnnnnnnnnnnnnnataaagatcagaaataacaatttatgttgcatggttca

SEQ ID NO: 17925 - DNA, 3281 bp, Cannabis sativa
cttaaaaatagagtgatccatctgaaaaagaaaaaaaaaatagtattgtataataaaagaactaataaaatataaaatagtacaaaaagattaataataatagttttaagtcattgatttttttttaattgtattaattttcgtatacattaaacttattataatttttattttttttaaaaaaaataaaaacttgcaattaatctatgtataatttaaatatatgtattatactttttaaaattttttaatgtggttattttttcttctaaatatgtatattttttacttgtaattaagtaaaaataaaaaattaatgaagtaattagattataataaaataatttagctagaatggcataattatagtaacaatagaatatcataactaaatattaagcaaaaataaaccttactcaaaatttgaaatttgtgtttagagtttctgatacaataaggatatctagttcatcagattgtgtttagagttgttgataaagcaaacttagcaaaagtatcagtaacaatattaacaattatgaggcaaaaagtaaagctcacaatattaaaatgatcacaagatgctttgatatcagagaggactacctctaaaggtgaatttaaactggaagaatgattaagcttatcaaccaagccttttacattagatttaaaatgaatgttgtgaaaaccaaaacgattgcattgagtgactgcatgacttagagtaagagcttctgccatttctggttagaaattcccttctaacttccaaatagcattagctaaaactacctcatgaaaatatcgagccaccatgcccaaaccacaaatgccattcacgagatcaatggaggcatcagtatctagtttaacaaatccctcaaggggacactgccatcgacgctcttgttcagacaaaataatcagaggtggagcaagattttgagccccgaattgtgacaatcaaactgttaagaagccaaaaaatcggaggcccatagtcctactaactcggagggagaacagtgttttcttgaattttcttgtttcaacggaactaaatacaccaccaagtggttaggattaactctatatcatagctaggaagaggttgaatgatattacttataaaaccaaagatatcactaacagtaccactcaagtttccaagcttaaacttgcaaagttccctcattggatcgagattgcgacaaccctaaagagaatgataagtggtctctaagtcaaccgaataaatagggaaaatattgtcattgaggagcccatgtttttgaagattgatcttagtagggatccaattcaaagacaacctccaatcaaaacacttaacctttggaggaaaattaagattccaaagagtatgccaccagttagaaatacctagagacgaagaagtagtagggaccacattagtctggacaaccaaccaataaccacttttaacaaaaaaaaaacatgtttctcaagactccaacaaagttatcagtagtgtcattgaaaggccaaggaattgataaaattgtaccagcttcttctatgctaaaattaaaatgaaccaaaggcacattcaaactaccatcatcaaggcggagagaggagatagtggcatcatctctaagcaatctaggagataaagataaatagccagttttcaaaggaatctagctgtcattataaaatgagatagatctcccattgccaacttgctaaataggtgcatgatcataaagattttttctccagagaatattcttccaaatgtaagacccatttctctttaaagagacatggccaaaatctttataccggtgatagaaacctttgagcacccaagcagcaagagagttaggaaaattataaaagtgtcccacttgtttggctagcaaagcttgattaaaaagaagaagattacgaaagcccattccaccctcatttttatgtttataaagatgatcccaagtgcaccaatgcatcttctttttaacattagaaccataccattaaatagtagcacacatcctatagatatcattgatgaaatttatagggagtttgaacagattaataatgtaagtggggatagattttgtaatatcttaaaatttaaaaatgaattaacaatcctaaataatttaatttaatattattgatgattatattatatcaattatataatagtatttggaaatatttgaattaaagacccatttgtgtgttaggggtatttttgaattttgacctaaagggagtaaaatggtaatttcattatatattgtgctaatggactatattattatgtagtatatttttttattgtgttataggtgaattttgacaagataacacggtatagtcacaatcgggtatttgagctcgaattgggtttgggatctaaaatttatggattgtgtgattaaggcaataatcagaaatatttgattatatgagtgtgtgtgattgaattggctattatgcctttggatgcttagtagattgacttgtagctttgagcgcaaagcggacatttgaccaaaacttattaaaattatatatgacttatttctgaaagtaagaagaaaaaaaaatctattttcttgtctcttgaatcctccccactggcccactccatctctctaaccctctttgaggtttcttttgattcttgaggtgatttgttgtaatacaagggagtttgttgtggagctgttgttttagatttgaagaagatcaaaagaggtaaattcatcttttagtgtttgtaaattctaagttttattcctatctttgaaagtttacatgaattcttacttagtgttcttgattggatcttggattgttgaattcatttatattgaggtatattgagctagacatggaatctaagatgtaggtcttttccatttgtgtatttgctgttaaaatgtgaactttgagtttgagtttaaattagatttcttcaagctttgattatgtaattataagatttgttaaacttgaatgtatgtgtgctaacaatgtgatactttattgtaatttgagtttgcattcactctgttatgggcatataaatcaattgcataacatatgtgaagtttgatttgagctggtgcatttttaaattttgaaaatttgggttttttaggttttaaaacctaggcgttgcggccctgttcttagccattgcgacacccatgagctccaaaaaaaatagggatcttccttgcaagaggcgctaattcccttttggccctagattt

SEQ ID NO: 17926 - DNA, 3875 bp, Cannabis sativa
ggaagctaaacttcaaggttggaaaatgggtctcttttctcaagcggagagagaaattttaataaaagcggtcattcaagctcttccttgttatgtgatgagttgtttcagatttaccaaaggcataattcaagaaattgagaacatggttgctcggttctggtggggctcttcatccaaaaaacataagattcattgggggaattggggaaaattatgcaagctgaaggaacaaggtggaatcggtttcagagatttggaagacttcaatcaagccctcttggctaagcaaggatggaaattaatcacaatgcctgattgccttctagcccgtgtgatgaaagctctctacttctctaatggaaacttctttgaggccaaattgggtcactatggatcggctatttggaaaagcatcctttggggaagagagatcttgatcaaaggctctagatggtgtattggagatggccgaactatccgaattaatgaagatccctggattcctagaggatatccctttactttgcgatctaaagttaggattccggaaggagtaactattaattctctgttgaatgaagatggtagctggaaattaaatgaagttataagctggtttcaccttgatgatgtcccttggatcattggaacaatgcccagtatgcaaaattcggattcggtaacttggactcttactcctaatggtaattataccgtggctagcggctataaactgagattcagtaatcctgaaattgctggctgttcagacatttcaaaaataaaagcttggtggtcgtttatttggggattccgtcttacaccgaaaatgaagaattttatatggcgagtctataatcattggattcctatcaaagtggaactatgtaagcgcagaatgaatatagatactagctgtgattggtgtaaaactcatgatgaaactttgtgtcatgccctttggctctgcccagcagtttaacagatatggcagcagggggggttctctcattatctctctccctacctaaataaagctcctgatgtcctctttgaattgaatcatcatctctcaaaagacaatatgattcaattcattggtttatcttggctgatttggaagaggagaaaccaatttgtttttcaacacaagaagcctgatgatagttattggataccttgggctttggagacccttgatattcatctttggcacggtcagcagcaacgaaaagtgcagcaatctccaacaaaatcctcttggcagcctcctcctattggtaaattcctaataaactcagatgcatctttagttccgaatcattcggggtgtggtataagtgcgattataagggatcataatggtgagttaattgctgccgaaaccagatttattcatggttttatctccgtggttctggctgagacagtagccattcggatgggattggaccttgttttgcgctggtcttgttcatatgtgttgatcggtgctgattgccaaacggtagtcaatgctatcaagaataaagaagcaattcatacagattggggcaacataattcagagtattttgaagacctgctgcaattttcattcctctgagtttattttttatcctagaacttgtaataaggtagccaatagtttagctaattgggctagagtaaacaaagagtctaagttgtggactgttattcccctgtgtgctactgctagttatttagctgatatgcctaagggctgttagtagtattaatttgtattctcaaaaaaaaaaaaaaagtgttatgtcatatgttacgtaagatgtacagtaatgacaaatagatagtatttataaatgtagaacattaatatgagagcatttttaatttcaaagattttttttataatgtaatccattataattttctcaataaaccattgtatatagttttttttaattattttttttaaaaaaaagtgtaaaatacctattgtgaatatttttatttttttttaattttgagaattacttttttttatatatagatttcaatcacataaatcgtacatccatttgccaaaatcctataaatccagcaacaatatgagacaaaacaattattaaatatcaatgccaaataaactcaatatttgaaaaactattccttttcattttccaaaatgagtactgaaacatgatattataatcgtctgttcaatagcaaaacagaaaaattcaagaagaggaagacaagggcgaaacataaaactacttaatgctaatgtgttctttaattttacaacgggaagaagataacaactattgacaaacatgagaaatatagcaaatggtagtaagtattccattcggggaagctccctcaaccaattctactcatttttattgccaatttttccaccactttcttttctttttaaactcgtctgagggagtatctggagacaatcaaagcacagaaattcgcaaacaactcaatattcaagtaaagtatatccatacaaatatatttatatagatagaaacattcatgtaaaagataaaaccaaccaattaccttgttgaggataaattgagttgtaatgtacctccgcccaaaagctcaaataaatcactgcaaatgtgagacacattgctttacatataatctatttgatcatgggtaatcatgctttgatcccaaaatttgacactcaattatatccaagaaaaaaaatattatattgctgataatcagatttgcgaaacacccattgaccagaagcataaatagtatttcagtctaattacacactccacttgaacaaaaagtcaaaatttaagaatgtataccacgttttggagtctgaaatttgggaagaatctctatgaatttagtatctttgaaagatgccatgacaataattttcacgccatactgcaagagtgtattgacatgaattagtcattaatgaaacacaaattactaactctttaagcaagaagacgacagcattcataccgcatcagcagccgcttgcaatgtgacatgatcaccccactcaccactcctggtttcatacagaatgacagctagttagtagaaaaaagagagaaagagagagaccgtagacagctaacattattattaataataaataaaataaccaagagaaatgaaggtcagttgatacttggacatcttctccaaatagtcatcgtatgccataggaacatatccctcataaatctctgaatgggacttgagctgattagaaacaaacataaaataacatttggatgagaaccgaaaaaaacaataaagagatgcattgatttgggtaaaataaaaagttacttcttaggtttgaacctgatttacaacttgacgtctcacattcttgtgattatcaggcgtgtcatataactgatctgacagagcacgaaactggaaggaaataatgtaaattgaattgtgaattggaaaatgttaagtcaatgcaaatggatattatattgaaaatcatagatgcaaaagagagaaggctaacctgacagttgccatctccttgaactttatgctcaataaatccaaatgattgcaatctataaacatgtaaaacaattacttcacaattttagttacacatcaaactaaatctagaaacataattaagaatctcctagttaaaatccatatgaaacagtaatgaagacagaaaatacagcaattgtgttttcatattacatatttacaatttacatggttcagaatatcaatttgattattcataggaaatataaatcttactatcacatacacatataacttgaacttgcactcgggagatgaaaaaatggatactacctgtccaggagtctttga

SEQ ID NO: 17927 - DNA, 3215 bp, Cannabis sativa
atgatagagaattcaatttttataggataaatacggactttgggagtcattttgggtgggtaatctaaacaaatgtatattatttttaattttttctgaaaggacataaatatatattctttacaacttagcttactacaagatgcataaacacaattataggacaatcacattttcctcaactatatatcatgcagtatagtggttaccacctaccgaggaaaattcaaaaactttgatgcgccgtgaaactccagctgtggcaaataattcatcatcttgattaaattctatactgcaacaaacattatgagataattgtcaacattcattcttatagataaaataaaaaagttacccaatttcataacacatttttatttatggacagacatcatttgtaagaaacaacaaataaataaagattttgatacatgtctgggaagagaacacatattgtagtgttcattacctaaggactcaaataagtaatgagttatgatacaaaatttctagattgtctaagaaattgggacattgaacatatatctgaagaatgatgaaagagcgagtttctaatcacctggacacaatattagcagcgtggaaaagatcaccatgccttaattctgcaatgactctcaatcgactaactcaagcaaccgaaaggtataagttacagttgtagatgataattcaaaaaaggaaacaaaaataagaaagtcatgaatgaggcctattgtgtaagtctatacctgtatcgtgtaaaagtagacagaacagattgaaaatcttcaaggcctgcactataaccttccttcctcatcagattcgggttctgttcttccactttaggtgagtgttcaatcaaatttcgtcgtttttgcaagtaacattcttgtaagctatcaaactgtagcatcacaatattttaaaataaaaattaaagaaatagctgaaaaggataagagccaaattagtaagtattgaagttaatccacaagcctactcatatcaatgcaggttgaggttaatccatgcaaacgaacaggtaaccaagctactaaaatatatcataatgtatagttatgaaactaaatggcttagtaataagaactgaactcaagatacctgtgaatagatgtgcctttttctctctagagccagtcctgttgcagtagcaggctgcaagccagcttcattttgagcatccttccggtagagtccatggcagtttgcttcaacatttacgttagatgttttcctgtgtgacttacctgaaccagtaagggcttgagcagaattggcactatagttgatgccattcccgtgcttgtcaattaaggacgaggatgctttttctgaaatagtttcgtccataagcattctcatttttccagagaatctctctttttccctgtagagatcaactctacgcctctctacagcatatatgtcctccttaatgtaatggagatcagagtgtatctattaaaaacaaacagaataaacaaagacccttataatcttcaaactgactacattaattaaaacagaaaaagtcactcagatctactcagtggccgttgtgcaacagaaaatcaccataaaaatgcaatatcataattatgataaaccaaaagtggataagaaaataaaagacttgatcacaacaaggacacaaaatcaataatgacctgattgagttgttcaagcttttgtttcctcaagcaatgtaagaaactgagcataatatgcatgttagtctcagcttcttcttgctcaattttattcttcttatccgtaaggagagaaataaggccatctaggtctttaattgacacctcaagaccctgactacgaatcatcagaaaaattcagtcatagaaattgaaaattggtcagttacagaaatcaacaatgatttttttttttaaaaaaaaaaaaaagaaaagaaacagagaagagctcgaagaaagattaataaaatggaagggagtacatgtggacaagcatagacaaatacattattgaactgaatttccaattggacgactgacctgttgtaatgcgtgatgaaaatgttcaaatggagatgccgtcttacttaatcgagaagccgaagtcttcttcagacactgaatcaaaaccagaatgattaaatatatcctagtgtaatacagcgacagccattgacgaaaacaaagcattcgaagggagtatgaattgtataatcaagatcaaatagattaacgattataatatcaaaccaaagccatttctttcttgtatttcatccttctaagttttcgaaagaaccaaacgtagcatagtgattacgctagcctaactataatgatccgtaaaaggcgtaaacaacaaaatgctaaacgaattaaacaatcatttttcttttcctcatgcttttccaagaaagaaacagagtactctaaaacgaaaacaaaccttgtccaccaagaaattagggaaaatttgctttgttgtgaggaaatgaccgcaagaaggacaatcgctcttatggcgtaggtgagttacgaggcacatataacaaaagctatggccacaagcggtgaggaatgcgtcttttatgatctgcatgcagatagggcagagtatgtccttgtccgcatcttccatgtccacatcctcctccatctcctccgccggacgcggaaacatcggcggtggcatttcggtagagggttccggtaagggttcgcctttcacggtgggcactaaagcccccattgagctccttcccattctactctgtctctctaagattagagtttccttttctgtttctctgtttctctctctagacttggacaacgactaagagagagagaggtttttgtatgaaacagaagatattttgatctgtggaagaagaagaagaagaagaagaagggttagtagttttcagtagttaaatttgtatttcagtgaaaagaaaaagagagagaatcagaaaagaagagagtatagtattacttaatactatacattatacactgtgtccgtacatagcgacagaaaggtgagatatttttgtgagggagaaaacggcccacgttatgcggccaattttgattaatccatcaccaattaatcggcgtgtaccatttaataccctttctttgtaataattacttattggcttacactttatttctctctatcataatttcacc

SEQ ID NO: 17928 - DNA, 4291 bp, Cannabis sativa
ttgtcccaaatcaattccgcacaagtgcagatatccgtactctttgcatattgaattggatcgactatttgatgaacactaacctcaaattattttgtcatttctttatcttttttggcctttttattatggtttgcatttatcttctatagagatgctttagaaaaatctaaaaggcatgcatggccggcaaggcagtaattatatacactatgatacaaatatgcattaaccaacaaaaatgtatatctacagtgatgtttgatttctctagggactaattgtagaatctaggggtatactgtccaaccatgaatcatccaaaagaggagtagaagggtccaattcagaaggccattcagagataacatctatctcattgaaaatgataggcttagattttccacctgtactttggaaaatagtttgtagccataaattacaatggacaaaaactaaatcattcagcttttcaagttctgctttgttacgctttttgttgtgtaagctctcaaatgtggtccaattccacctgcaccaatgtgagctgcaaggttggctcaatatgcgcattgcagctctttgaagtgtggggatttcatagccatatcctgcccaccaatcacctaagcaaagggagatgaaaatcgcataaaaatatgattttcgtagactcgactattctaccaagacttgcaaaaaccgaacaaagaaacaaaacccgcatctaaactgaaaaccagaaggcttcaaaatactaccagctctaaccaactccttttaacatactatcatattcacattcattcttcttaaagattaaaatttgtttttgatgcattatagataagtgatcaaaactagtgtagtgaaaattgtcaaagtgtgtaaagaaaggcagctttaatagctctgttcatacctggggcatttattgtccttcccatgatcgcaaattgagtcccaagagcaccttgagcaccaatgtacacaggacattcctttgttatttccatcttatcattatctgtgatagccatttttaacatagcttcttgaaatccattcctcacagttaaatcaatcttaaaatttgggttgtagaatgttgaaggatttaggaatgctgcagctgcatgtaaggatgaattaaggtgcacgttccatcttcgatcaattatactccaaatcgacatgtatttctcttcaacacccttatagtaaacttttatgctaacctttgccctctctattccttcatacatgtaccccatagctggcatgtccccatcaacaattcgtaggatcttaacaaatggttcagacaaactaacagcctcgtgtgcgtacttccaaaatctgtctaaatagatcaatgactttatagcttgagcctcaggatgtttactgtacatggaagatagccagtctgtatgagaaaacatgtgctttaaattgtcttcctgaatcacaatagacctcaaggagaggaaataagtcacatatctactaattcgtggtcggattaattcctttccaccagtgaactttctcatcatattcagagtccatgattggccataaagatacctggttatggtttttgcctcctccaaaactgtattcacccaatctatgttaccaatatcctccaaaatcttgtcaatgcaacaagatgcacaaggagaccaaaacaatgaattgtacttgaccatgagaagcctgccagcatagagaaaactgggttctgtatcagttataacttgaacaacattttccacacctatttccaatacaagagactccagcaactcaaacatgtaattggaatcatcccaattggctgacacatcaaccgatcgtagaaacaatgtccccttggggcaagtaactgagaacacaacaagtgatttagtcccaccatcagaccaactatcacataaaatagtgcagccactttctttccactcctctctatacttcttatagcaatcatgcaactcacccttcatttttcccaacaaagaagatctcaatttctcataactaggagctctatatcccactccacactcaagaatagcatcaaccatttcctgatagcacaaagatttagcagcaccaaaagggatgcaattactatagaaaaaaaccgcgattttcttatcagcatcgccttgtttccgcttttcagcatcatccacatccactactggtggttgctcacttggggaaggacaaatgctaccattatgaccactagaaccattatcatggtggggttggatgccaccgctagcagatgagctatgttgtctaccattagaagcagctgcagccacagctgcaactgcagccgcctgatcaagcttatgtttcttagtagtattcgtagcagttttagtatgtttcttgggagtgtttaagatggttagaatgcggttttggacatgggctgggacatgagtacatgggacaatgtctttgttcttaatttgggctaaatgaaacttcatcctataaactccaccactgaactctctctcacagtaattacacctaattttctgtctatttgcatcaacaagcacacagtgttcccaacatgcatctcttcccctaaccattttttaattcttgatcttcaaatttactattaaaatcaaaacccctttacttcatcactgaaattgtaacacacaccataatcaatccaattgtatacactgctttaaaacaaaattgaaaattgatggatgcaattctctaataacacctatttagcattaaaaaataaacaaaacttgattgataatcacgagagagagagagagagagagagagaaataccagttcggagatttcttgggagaggtcaaaatcgggaagttgagtggaggtcaaggaaatgagaaaacaaaatactattactcggcgataaattgttaatactcggaggaggaagacgagacagagagtaaaatgtgagaaatcatctcacgtgatctgtgtgtgccttagagtagagtcctcctacacactcatttttttttttttctgaaaggacacatcctacttttccttaagcttaaataattaattaaactctcctatattattgatgaatgtaaacatctctccttcgatttaaaacatgtttctattctttttgttaaacgatcagctaatgtggtagctcacaattttgcacaagcttctatattatttcctgttatcattttggtatggagtctgttcctaccgatttgttacattgtttagtaacaaattttattggttaataaaattattattttccattcaaaaaaaataattaattaaactaattgtgaaaaaaaaaattatacttggataaatatataattgtataatttactcacaatttatcgcacaaagatattctcaaaaaattgaaaaaaaaatgtaattatgtaatttgcttctaaatcaacactcttcattttggtattgtggctaattaagatttttgacccccgaactttgatatgtatcaaatcatgtcccttgaactttttaggtcgttaaaaattttcctagaacaattgaaattgtaggatttaaagacttttctctaattttactaacgaaaatctgacgtgtatgaaagtttttttgataacagacgtgtatgaaagttaagggacacgatttggtggatatcaatgtttggagggcacaatttagtacatagacaatcaccatattagtaaaatataataaaatgggatagaagtcattgaattcaacaatcttcatagtagaaggagaatttttaacagtctgaaaagttcgggggcatgatttgatacatgtcaaagttcaggggacaaaaatcctaactagccttatatattttactcggtttttattgttacaacttgattttgtaaattttaattttcacaaactatatattgaaatttgagattttacattatttaaagaggaagagaaaaaaaagaaaagggggatttatagtttttaaagcatataatatgcatttccatgggttgggctttgctgataagtgggtgaggcttattttccaagatttggcctctatggagtataatgtgatatggtgggtacgagattggccctattgtctcttcctgtggtatcagacagagtgatcctatatttccatatttatttaggatatttgtgttggaattattttaccagtatctagatttactaacaagaatgtttcattaacatcctaatatgaatttttaaaataatgaaa

SEQ ID NO: 17929 - DNA, 6825 bp, Cannabis sativa
  modified_base (5515)..(5522): a, c, t, g, unknown or other
agtttacatgaaaatacataaggtggggctatcttcgtgaggcccaacccatgataggatgaacatgctgactaagcatactagacacgatcagactatcattaccgtgtcctctaattgtgagcaattaattataaattaattgtttgatctctattttaggtaatttctctttttagcttgatacaatcttctgacaaaaatttgaggagagttaattccttattctgtgcgcttggataaaaaagaaaaaccagactagtcttccaggaacacgttgtctgaccctcttaaatcacagtactggaactgcttctggattcgggttgtccatagcggaagctcgcctaagcatggagctaaaggtaccttcctggaaggtcttgtcttacttgggcttggcccaaattatattttttgggcccagtggcgggctttagatattgacctagagtacatgtgtcctttgccgaaaacacgaataacatttacacccaagcttctagaattctgcgtattgtgaaagcttgccctaatacatatgagtggacatgcggaggttttaaagtaatatttctattgctttctaggtattagttgattacagaaggtgaacttccatctttagttttttagaagtaaatgtggcagtcacctagtggtggaggagtacgtttaccgatgagctgctttctaggaaaaagctttcatttcgatggctattcattgttggcaagaaaatcaagaaaagaattttcatcattgatttgtgtctcgattctagagggcattaattctttgacacgcttagttgttggacttctgagacattggatatacttatgcttttggagagacgatcttagatcgttcatttttcctcacatggatgaccaccttgggtataaatacccctcaaagataccatttaccaccttatccaaatttcatatttttcatacgttagaattaaaattctctggagagtaaaactataatatcctactagctaggcacgctgtagtgttttcttaattgacatgcatgcctttgctaatcaaaggattaattgaaaaacgtgaataattaaaatttttaaataaacataaattttaataaataaacataattcctataacactgggatcccgttaaaagtttacaactataatcaaaatatatttcatacaaaagttgttacccagcgaccaacaaaaagtctaaactgtcccgaagaccctgaacactccaggtctaattgtcttgatatttagaatcttcatccaactctcgactcattctggttcagttctagctcttaccagcacatgcacgtaataactgtgagtcaacaaactcagtaagaaaagcataaacatataaccagatcgtaaccaggtactcatacacctaatcacgatcctataactgggtcaagaatattctcgacaaaagtatgactaacaacgaatccagtctatactcagtactctagttgtactgatgttgtagcaattagttcatactatctgaaagtctaacatatatttgttgatatttgagtgcaagtttatgtgcgcttcactaatctcctaatatgctaatctgatggctacttatttgtctgacatatatatttgttggtatctcggtgcaactctatatatgtacacctcactaataccctgatatgttattctaacgacaactaacatgcacactaaacatgtatacatatatgaaactattatactaatcttacctagattttgaatgcaagcgtgctagtaacctaagtggaaactgctgcttgacaatttaaaggcccctaagtcacaacatacataaacttgtaagtgatactctaaatcactttgtggggacttaaacttaaaactagaaatttttctatcgataaatagtgtggccacaaatatcgagaaaacacgaaaaatgagactttaggaaaaacaccgcaaaaaatggcaggtcgtttttcctagtccctacttgcttaaaatggtagaccgaatctggaaaaatggtctgtcgtttttaactgcacattatcataaatcctcatttctcacacaaatctaccccaaatcttctaataagatccaaaacacctatttgggacattaacaacataattcaaccaaaaattttatcatcacgaaattgtaaataattctactattattgaattaagtttgagatttaaaactaaaaccttgctcaacctaatctatagccaacaaaaccacacaaaaacatacaaatctataaaaataaatcttctaaaaaagttctaaaactacccataacctaaaagatttaaaatccaataggtcaaacatcaaaactcaacttatgcttaagaatttcaaacaaagaagcgatctaacttaccttgatttcacccaaaaccaaccactattcaaaacttgcaaaaacctcttgaaaattctttgaatttacaaagaaaaagttgagtcttcttgggtcttcagagaaagagaaaacaagattgatggtggctataggtgtaatgtttatctaaaaagaattactaacttaataaaaacaaactaatattcaactaaatgtgggtcttatctacataaaacactaaagacaagcttactaatttaaaggtcaaacaataatttgctttttctaagccataaagtaaactaactacttaagggtaaaatggtccaaaatcataactctaataaatcttgatacactaaatgtctaactatcttactgtgctaattctaagatactcaactatatctaattgactctattggccaaatcgtcgcattctactgttactgggcataaaacttgaaaatcataaatttcatatacatcatatattatatacttaggattgaaatatatctccataatttagaaatccttttcatctagcctatttcagacaatacattctagtgtttgctaagaaacacataatcataagttaataattaaaaccttaattatctactaattcccatgatttaattatgcagtcattacaattattccctcaaataaatgatttcatcctcgaaatctaatctaaataatctctggatgaagagtcctcatgttgcaatttaattcccaggtagcttctccaccttactgtttctctaaagtattatctttcttatcgaggatctcaactagttttttctcgtaagatagatctaacgaaagttatggggtttcataacttacgacaatagtcgaatccaaatcatacttcgttaacataaaaatatagaaaatattgtgtactgctgaaaatactagaggtaaggctagatgatatatcactactccaaccttctcgagaagctctaaagactctaaaaatctagggatcttgtcctttttcccgaagtatttcatttctttcactggtaagattcataggaagacatgatcccctattgggagttcaatgtttctgagcttcggatttacatatcttctcctgcctactataaaaaaatacacatcttggccttaatcttctctatagccttacaagcccactgaattgactctgagccttagtattttttatccctagttcatcccaatgatttggggaatgatatttctcacttcccaatacctcatagggagccatctttttcataccatgatcattattgttgtatgcaaatcctatcaacaatggatgcttgttccatgaacccttgaaatccattatacaagctcgtaatatatcctcaaatatctatccctttggagtggtcatttgagggtagaaagtttcacagaattttagttttgtacctatgaccctttgaagattttcccaaaacttagaggtgaatttcagatccttctctaaacaatggaccttagagtctcatcaagtcatattatcccccttatatcaattttccatagtaatcttatgtatgcgttgttttcaattgcaagaaatgcactgataagtaaaccgatccataactttccatatagaatgaaacttacctatggttctacataatctaaccacgaaatctatagtgacatcttctcatttctactcaagaagtgttaaaggttacaataaccctgtaggtctttaatattcaactgtagtttgttgacaaattaaatatttgaaaacataatctaccgcactcttctacataccaaaccataactaatagaatttttaaatcttggtagtactgggattcaatgtacaagaagtggtatgagcttcgcctaggatctctcttttaagctcaatattgcttggaatacaaacttgagtttggtaaagtaacatcccgttgtttaacactgagaaatatttagtttggccgctaagacttcttcttttctactatttcccgatccaccaactaagcgcttctgattctttctaacaaatccaattgaggtgtcaaaactattgagcatgccaaccacaaactcaattcctaacttgaccttgtcagtcgctagctgaaaaagaatcatggttttgttgaaacctgcctgggacctttccttctgaggacattcgccactacattggccttcccacgatggtagagaattcgtaataaaaaccctaactaactccaaccactgtctatctcactttcaagcataaaacatactattctttgtagagacaatgttaacaaatcttaaaagcaaagtccattgccgcgaatcccagatcataagttaggtagtgttgctcatactcctactattgatgagaaaataagcaataaccttgagagtctgcatcagaacatcctagatcccgtctagatgcatcatgataagccacaacctttcttagtctgatgatacaactaacactggagttatattccacttttgcttcagctcttaaaaatttgtttcacatttgtttgtccatatgaactgctgatacaattcaattcaacacaatacaattcagtacaaaataatataattcaacacaatacaatacaatataatacaatatggcgtaccaaaggagcctttaatgtatatacatataatttaattaggttaattttttaattggattttgagattgacattaaataacagattcaatctaattagaatgcaactttaatcatccaatctaatcaaattgtaattgtaaatccaattttttgtaattagattgaattagatcgattcggtcaattggatttaattagatgttgtccactcctagtctacatgttcaatattttcttcaaaaaaaaaaaaaaacgctcaccattaaaaaagaataattatagtggaactcacattattatagaagaattttaaaagttgaaatatatgataggacttgtttgacatattattattattattatacattctagaaaacgaggaacaaaagtatattttcttataatcatgggttgggttggatgattgttttttctttttctttattattattatnnnnnnnnttattattattattttaaaataaatgtttgatttgtataatttgaaagttgtcttacttatatatgaaaattttaattagaatactatattggatagtctagtctcaacgaagtgtaaagaaaaatcatgtttgacagtctcctacttttcactattttcaatttatctttagttccattacaaattattcaaagaaagaaaagctttatacgttgttttaactgccaaacacaataagataaaatatttcaaattagttttttcaagggaaaagccaaacagaataccaaccacttaaatagcaagatacttcatcaataacttagccccaaactatgcaacttatattagaaataacatacttagcatatttgtaatttttataaaaacaaaccaaggacgaatatttattatatacaaataaaatcatgaattaaagtttgaaactaatataaaatattagaattaattagattaattaatgaaaagctttccaagtcttgtttgtttattgtggctggttatctaattctaaatctcaaaagcgtggtccctttagttttaaagacttgatgtctatggctggagtttggaccaacggcttagtcagagaaaaaattggaccacatgcaccatatgtataattatatatatttataaattggcagttaattcatcatcatcagtcagcttagagtttttggcgcctgtacattactttcccgggtcctatgtagaaggaagactaactacctttctccatcttctacttggtcctctacgtcactataacttttattttttcattttgatttattcaattcgaacttatctctatgtatttatttaattatatatgtatatgttgtgttttcatttaagagtcctattaaatatgctttctctgtatagatctcttcactcttgatcacctttcccaactttttcttatcaaatctcaactatatggctctggaaaattgtttcgactttttctaaaatgagttagggagagtggacataactcatcataagctttagcaattcctctctttcattcacaaggttggaacttggaatatatgttatatttatatattcacttctttgtaatcttgttattcctttgtttagtacccataattcggtttgttgattcatttgcaaaattttgtttttaagattaaaatctaatcctatatgccttcatctctttagttaataacgtttgtataatacaagggtcattatttgcttttatgatattttttttcaggttatgacttcaaaaaaaaaaaaaaa

SEQ ID NO: 17930 - DNA, 1689 bp, Cannabis sativa
gaggctgttagagcctctgccttcctaatcaacaggctaccttcctatgtgttgcatggagacacacccttgcataaactacataacctacaacctgactacaactctctaagggtctttgggtgctcttgctttcccaatactagaccttacaataaacacaaattgaactttagatcagaagaatgcacctttttaggatatagcatcaaacacaagggttacaagtgcctctcacacactggtagaatttacatctcaagagatgtaattttcaatgaacacaaattttcttatgctgtcaaaactcatacttgtcctacctcttccaacttcactcaacccattacctctactgtacctgttcctgtcatctctacctcacagccaccaaaacaaaccactttcccctcagaccaacatggtccacctcaatcaccaactccctgttctgactctccatcaacacatataacaccagttccatctacttcgatacctgcagcagcaacacctcccgcagtcaccaccaacattcatcccatgacaaccagggcaaaggcaggtgtttataaacctaaggtatacatcagttccaaaacacctttaacattggaagccgcattaaaagatcctaaatggaatggagcaatggcagtggaaatagtggcactaaagaaaaatggtacctatactgttgtaccactcccacctggaagaaaggcaattgggtgtaaatgggtatacaaaatcaaagaaaatgcagatggaagtgtgtcaagactaaaagctcgactagtagccaaaggatttcaccaagaatatggttttgacttctctgaaactttcagcccagttgtcaaatccccaaccatcagaatcatcattacaattgctctacataacaactgggacatcaagcaactcgatgtgaacaacgccttcctaaatggtgatttggttgaggaggtttacatgcaacaaccacctggatttgaagaacaaggttccaacatggtttgcaaacttcacaaagcaatttatgggctcaagcaagccccccgtgcatggtttgacaagttaaggcaatgcctccttcatcttggttttcacagttcaaaggccgatgcttccctattcataagatttttgaatggtcacacaacctacatccttgtctatgtggacgacatactcatcactggtattgacaactcagagatctctcacctaacctctcaactgaacaaacagtttgccctaaaagaccttggtcacataaactacttccttggaatacaggttacaaaaactgatcacgggttgcatctctcacaaactaaatacatcacatatgtcatctgcaaggccaagttgtaatttgcaaacagtttgcccactcccatgactggtggtgaaaaattatccagcattgggagtgaccctgtcaaagatcctcagctctatcgcagcctggttggagctctccaatatgcaaccttaactaggcctgaaattgcatacgtcgtgaataaagtgtgccaatttatgcatacaccgctggaatctcactggaaaatagtcaaacgtatcctaagatatctaaagggtaccctcgactatggcctagacatgactcgatccacctctctcgacctcgttggcttctgtgatgccgactgggcatca

SEQ ID NO: 17931 - DNA, 4931 bp, Cannabis sativa
tttactctttttttcttggatttagtggattcagtccaatccaatacatattagatctaaaatattagatgtatccgatccgattcaaaaaatactatgtctaaaatattgtataaaccaaaatcaaaccaataaatatatatgaattggatgttggattgattgaatgacttaaattgattgaatcagattggatggtaaaatctaacatacaatttatgattggatcgaatctgaataggcttaaaaatattggatgtgatctaatgaacactcccaaatttataacacacacaatcattaaaaaagttatattaatttttttttttaaatgctgaaacagataaaatagtaatatagacatacctaataatactacgcgactctttaaattttaactattgaatgatttagtaaactgtattaaagtaaatcttaaggaaagtgataatatagagctttactacatttcttgtactttaatctcaagcctaaacgggtccaatctcatcactattttaaggccatatttctaagcaataccacactaaatttttcatcatgatcaacaccaaattcttttttcaaaaaaaatttatgtgatcaacaaactttgatgggatttatttgatcttcaaatcacaattcctttctcttaaatatcactgaaaataaaccaaaattctccttcatttcttaacataccaccttcatattagagttctttctttctttcatttctcaactcccacttttgttgcatcatatatatatatatattttagttttactcttctcttcatctatatttcttcaactttgatcaacctaataagtaataattgatattgataacactttcatttttacagtttttccttcaaattattatagcttgagtaatttaacttgaaaaataaagttgtgtcattgaaaagaaaaaagaagtgacctttctccaatttcaatgttttttttccctatacactagttcatgtctttatagttaaagacaacaaaggttcttacttagcttcttacatataatatgttttggtctattggtcccttcttctttggggcttttctctttgttttttcacttcacttttttcaatagtctctgttaaagaaattaatcagtacttatgtagggtctcttttgtctataactataatataaacacattataattaatcattataaatttataattgatcttgatgccttttaacctcaagttttttgtcttcacaaatatgattttgtagctttctaatttgaagaactttaggtaaaatattctcttataactatatatttagaaaatattttttttacacaaaagtaaatggaaaagctttattgttttttgtcataattttaatatgattttacacatgccctacaatattatcttaataaattgtattttgatttttttccaaattattcatattttaaaaaattattgaattttaaaatatgatttttctagaaattacaatcttattttaagaataagatttatttataatttcataaaaacaagaatttttgtatttaaactttagggtaagtctaaagtacactctctaaaagagtttttcgacagacttttatctattttgacatctaggaatattttttagtctatttttttttttttttttaattgcatacattgtagttatttagaattacctataaatctttagaaaatttcgaatagtttacaatatcaaaagtaaaatttacatatttttttgcacacgcaatttgtaatcttaaaaaaattaaattagaaagttcttttaaatataaaagcaaataaaaatctaccaaaaacaacattttaaggttctgagtacaaaaatttcctaaactttaatctaattgtccactaatgttttgtactaaacacgtagtgcagtgctatacttttgtctttgttgagaataatattttttagtccattaatcttagattaaaaaatccgactttatgctaaattttagtttatcctcttacaaatctattaacttaattaaattattaaaaataataattcaattcaacaattttcttaagagctaagattttcattttcttccttcaaaaaaatatacaaaagccacgtcaccaaataccggtggtcgtttaccagccactgaatgatatcattccctcgtccacgtggcattaaacgacacgcgtaattatgtcactcgttctcattctgcatgttttggaccgcgacttttcttccgtcacccgccgtggcatttaaataaaatcaccgacactccacctcgtcaagacacgtggacaaacgttaacattatataacggaatcaaatagtcaaacattgaaaaaggtcgataagttaacggccgttaatctttaaaaccgtgcactgtccattctttcatacccacccaatccccgacatttccacctgctctctcatttcgggttcgggttcgggtttcggatcctaaccttcgatgaaatttcaacggctgagattaaatctaaaattccccaactatatatataaattccagagagagactttagtttttgaaaacagaaagaaaaaggagagtgagtgagtttcgagagacttcgattacgattcgaattttggattttgattctgatttggggtttttgaatcggtaaaggcgagttttttccgattgttgcgatgggagaaggtgaacaccaggaggatcatcatcatcacgaggaatcgttgatggagaagatagctgataagatccacggtcacgattcgtcgtcttcctccgattcggataacgagaagagcaatgattcttcatcgtctttgaaatctaaggttttcaggctatttgggagagaaaggcctgtttaccatgtcttcggcggtggaaaacgtatgcgatcgatctttcatttttgttttattttccatttctggtgataattgttataattttgttggattaaattgcatttgattttggtttttatttgaaattttagattttgaatcgagaacacaaaatctattattttgataattttatgcattttgaatgttttggtaaagttggatctggatctggatctgcctgattcgttctaaattatttttgttactgtttggttttgattagatgtgattcatttttttggtttgagaattgagaataagaaaatccaggaagagatagcttaattgtgtgtgattaaatagttacatttaacttcaaacaccaaaaccgagtaccgacactttttatgtaacggaaaaatgagtcttttatgcgatttaataagtgaaattgcagtttgtgttttaacttaattgttcttaatttttggtttttcagcggctgatgttttcttgtggaggaacaaaaaggtatcagcaggagtgcttggagtggccacagttatatgggttttgtttgaattgatcgaataccacctactcactcttgtttgtcatgtgttgatacttgctttggccttgttgttcttgtggtcaaacgcctccaccttcatccacaagtaatataatttgctttagtttttgtttattactttcagatacgtttccctgttccttttttgacaccaattttgttcactgcaggacttcaccccacattccaaagctcagcattccagaagagcctgttcttcaggttgtgaatgctttaagaatcgaaatcaatggaggtcttgctgttcttcacagtatcgcatcagggcgtgacccgaagaagtttctttcagtatgtttgtttatactttttactcaactctaatgatggttttgatttgagacataccttattcattgtttatttataatcctttaggtgattgctggcttgtgggttctatctatgttgggaaattgttgcaacttcttgaccttgttttacataggtaatgaaatctaaatccaaaataaatagtcttttgctaacttatatgaaccattctctagtccatatagtaatgtgttttatgattctttctgaaacacagcttttgtcttgcttcacactgttcccgtactctatgagaaatatgatgacaaagttgattcatttgctgagaaggcatgtttcgagatcaagaagcagtatgcagtgtttgatgcaaaggtgttgagtaaggtattgagtaagattcctagggggccattgaagagagattgaagtggagcttgagagggtgagtggactggactggactcttttctgacatataatatttactgggtagctacaatataatctatatatatattttcctagtgctgtgaagaattgtatccatgcttggctagaatcctctttctctttctccccatcttttctatttttattttttttaccatttagagtccttgggttctcaatgtgaatggattttctatggtttattttttgttattattactattttctatatacttgtttaagatggtatttgctgcaacttggtataaatggatgataatcatagaaataacctttttggaccaatttataagatttatatttctttctgtagagatgatatttacttttgagtaattttatgtcaaagaagttaggttccattggacagtacatgagttgttgggtgtgtttgtagtatctaatgtgtcttattatattgggaagcccacaacgttgtcatgtcatccacgtgtcactccaaatcaaggagaatctagaagatattcagaatcatggttaatgcaaaattatttatatttttcataaattaagcaccaaagtatgtggaagatattgaattggaccattaataaacatgttacctttagtcaattctattattattacaccatttatatttagtgggtcctatatcactcagcattttctgtatagagttttt

SEQ ID NO: 17932 - DNA, 4284 bp, Cannabis sativa
ataataataataggcttattaatcaaattaattacaacggttataaaatatgtgtaacgcttgtcatgaatgctccttgaatgcttgactgttgacttacgttgattggtgtatgtgtttgggcattttcctattgatacttcgacttcatcaaatatgcgaggtgtgtctttcttaatatagcgaggtctcctttagttaatattgcgagatcctttctttcagtactgcgagtactataatattgcgagccaccttcaatacagcgagttctctatactggaagggtaaatttatgccgataacagaagcaacccgacccctattcacctctatactggaaaacctaaagatcccatcttcacattcacaagcgctcacatgagactatccctgatgacctgaagaccccaaaaacctgattccatggttgtcgccctcttcctcctcgtgatcgaaaagacttgttagtttctctttttcccgaacgccaatggctcatcccgtggtcggagaagaaggtcttgtccgatgctaatggctcgtggttggagaagaacgtctagcccaccacctttttttcactccccgactctagttccatagttttagagtttttggtttttgttttgtacaatttttttttttctaaaattacttagaatttagttaatagttaggagtttaattttgtataaattgtgttatttcaaattttattataaatttattaaataatttttatgtaaatatttttttaaagcaaacttaatttttactttaatggttaatattaggtagctatttaataagatgatgtggcattattttaaatgatgtgtcatgtcatctcgtgtccagtgtgcaatataacagcaagatacctacacaatgtatgaaagtttaacggatgatatttatgctgccaaaattttaacttaggtattaaattgcaactgaaaaataaacttaagtatttataccgtaaattattctataaaaatattcatagatctgaaaataaattactttattttatttcataaataaaaatattctaatacatatgtgcagtgcaattatgtgcagtgcaattattttctcctctaaattttttcctaaatagaatggttatttcgtatattatatttaccatccctaaatataactccttcctttaaagtgataaaatgacaaatgaataagttatacaacatattatagttttctttaaataaaaatgtccaaataaactagtacaccaaacaaattgaaaaagatttttgttaataaaaaaaatcgaaagtggtttgttcaatttttattttattttcttgaaaaaagatcaatattagaataaataaaaaaaaatgaatcaaaataattaaaacatgtagtaatattaataaaaaataataatgcggctattagtaaccaaccgagggaatgttctgagatggtgccgtcaaatgtataaacattcactgggaaatatttaacgcacacatacgaatccccacacgtgcctctcttctacattctcacctatatataaacaacttcctacctccattttccttcaaactcctcatttcattctctctctctctctcaacaaaatctttacaactttttatacactctcagagctgtgatccgaatcaaattgaattaaacttgaaaaaatggcggcactatcaacacttccacagctcagcatggactccggctatggagtagacaagctcacttacgagatcttctcaattttggagaacaagttcctcttcggctatggtgatccaaatacaaaggtttcgaatccagagaaattgaatagtaaccttatctcatcaaccaatcgcagtgctggtcgcggcagtaatggtaaagtcagaatcctcagcatagatggaggtggcactactgacggaatcctcgccgccgattctctttcccgcctcgaggcttctctccgcctaaagtctggaaatcccaatgctgccatagctgactatttcgacgttgtggctggctctggagctggaggtattctggcagcgatgcttttcactcgcggaagagacggaggtccactcttcacggccgaggaggctctgaagtttctagtaaagaatcgccgaaagatttttcggtcttctccagccggattctttcggcgagtcctgaggtcgtcgtcgacggcggacaagctcttcgggaaggttttcggagattctacgcttcgagacacgttaaagtcagttttgatcccttgctacgatctctcgaccggcgcgccgttcttgttctcccgcgccgatgcatttgaaatggacggttacgatttcaagatgagggatgtctgcaccgccacgtcagccgatcctacggcggctggcgcgttcgagatgaggtcagtggatcagcgaacgaagatcctggccgtcgatggcgggatcgcgatgaacaatccaacgtctgcggcgattacgcacgtgttgaataacaagcaggaatttcctctctgtaacggagtagaggatcttctcgttgtctctctcggaaatggggagtcagaattcggtgcgggcaatgtaacttcctctcctacacccgcaagactccttagaatcgccggtgaaggagcttccgacatggtaagaaaaagaaacaatagaaatacatcatattttatttgtcattattattttattcttggcatattttttttttctaactatttctttttaatttttaatcattgccgaaatgcaattcttcttttaattaatttatgaatagtagtagtggttgaggggaccaggataaagtgttagctaccactattaaatgtttattatatatattaatttaaaaaaaaaatgagatttgtattcatattttgtacctgaagaatttgtcggtaggaaaaattagaattgtgaaaacgttgtcgtatatgcatttaattataatttacaacaatattttctaattatttggatttcctttttatttattcttataggtagaccaagcagtttcgatggcgtttggagaatatcgcaccactaactatattcgaattcaggtaaattaattgattaattattcacacattcttattatatgtgatattatacaatagttatgtgtaatttttaagtgttctaatcataaattttcaacatattatttcagggcaacggcattatatcgaataataatgataataatttatcagaaaaggcgaaaatgatgaataagaagaagaataatatagacatgttgagagaaacagaaaatatgttgacccaaaataatgtggagtccgtactatttcaaggaaagaggattgttgggagctcaaatgtagagaagattggtgtatttgcaagtgaacttgttgaggaacaagagagaagaaaaactagtattttaccaatggtggctttgaagcaaatgtcaccatcccctagatcatcatctgccacaactctctccagtttatcttccacctaaaaattaactaaaaactaaaaaaaaaaaaattaaattggaagataaaatttaagtatatggtttaggttctttattttgggcttttcatattattatatatgtagtttgtgaagaaaaacaaaatctatagttacttaaaacttgtcattaaattgactcaataggatgggtttaattagttaaacttaattaatacgctgccgcttggattaatgataaatacatatatattatatatatccgagtatgagctgccgagtttatttgtccttttaaaaaaatatattatttctatttaattttagataggtgtaatatattagtgtatctatgattgtatgtaattttgtataaattgtgagaaaaatatttggaatattgttgcaaactttaaattaaaattctcacctacatttttgttcgtttttctttaggtatattaaaagtttacatttatttgaagaaatattttcaccatattgtttattgattattttttgtttattcaattgtatataaataattatcattattttatatatatatatattaaattaaaataaacataacattttatctaattataaaaaaaaattggagtgaaggtagctaaatgtatacatataggtgaatagaatttttactttattagatattttttgctcttaaaggttctgctaaaattcaaatggtaacattcaattggttaggattaagtattattggtgtcctcccacaaaaactcataaataaataaag

SEQ ID NO: 17933 - DNA, 1572 bp, Cannabis sativa
tatttttataaatatttgtatgtggactgtataaatgtttaatgggccggcccaaagtatttttgtaattttttttccttttttgtatttttttgtttttttccctttagattatgacactataatacacaataacccacaattactaaagtgattacttaattatttgagtcaaactttatgtagcaatgcatacaaatacatatgagatcacattagagattttaatccgaatatgaaggactctatattgaaatgcaccaataatttgacatttttaacacattatcatatctcatgttaaaaatctctacatcatttaaaaataacaatactttattttttttttctcttccacattatttttttttaaattttctaatgtaaatacttttaaaaattattaaaataatattatattattaataatatatattaaatgattaatttttttaattttatgataaaataattattaaaaaaaataagaaaaaagaagatagcaagaatgtcattgttagacattaatacttgtcattcttttttattttaatggtaagtaatatttattaaaaaatgtcaaaaatattttcatgtcaccaccattcccactattaattagcatttctataaaggcaagagcttcacataacatttaattataatatttttctttgaatcctcgtaatatttccaactggagttagatgcatgtaactagagagctacagagagagaaatatatattaatggaaggtgaaataaacaacttggtgatggtgtggataactgtggtggcatcactctgttactgtcacacaatcggtaacattatcacgccaggcacagccaggctcatagccatccttcctgtgatacttattttcttggtattgcctctaaatctaaggaccatcattctgggaggaccaatttcattcttcgtggcttggctagccaacttcaaacttctactctttgcctacggtaaaggccctctttcctctaacccacctcttgtctcgtttcatccccttagcgtccttcccaatcaaaattcaagaggatccactaaataaacaaaagaaatctctcacaaactatgccatcaaagcactcatattctctaccatcataccagttcaacaaaacaaatcctatacaattcacccaaaagttttcatgtctctctacttcatttacatctacatctttttagagatcatccaagccgcggtggcggctttggttcgagccgcgctcggtgcagagctggagccacattttgatgagccttacttgtccacgtcgctacaagacttctgggggaggagatggaatctcatggccagtgacagcctacgttccacggtgtatattccagttaggaacatcatgagccgttggatcgggaggaagtgggccccagtccccgcagtgatcccgacttttatgatgtctgggatcatacacgagtttattttctacagtatgagaagatcaaagcctacgtgggaagtgacgttgctttttgttgtgcatggaatgtgtttggctgctgagattgccgtt

SEQ ID NO: 17934 - DNA, 4068 bp, Cannabis sativa
  modified_base (1564)..(1586): a, c, t, g, unknown or other
  modified_base (2476)..(2478): a, c, t, g, unknown or other
atagtcacgcgtgcaacacactatttgaacgtattgtttagtgtgttaaacttttttaaatttcttaaaattttaccggatgtcttaaataactataacgtacatgaccatgagaaaaaatttgactaaaaatttatttcgggtgctaaaacaaattagggtgcatcaatatatctattttaaggggtgcattgtaaaatttccctaaaacattatctatgtgtttgttgataaatagtttcaaaatgttagagaatgaatgtagttgtccggtattaatatataaaataagtaattaataaagatataaaatagaaattcgtccaatatttaactggatgtttgtttcttaattaaccaaagcggtaaaaatatttacaaaagtactgatatacagttttttttaacagaacatttttctatgcttctaattggttgaagaacttagttgtatggtgttatggtgttttgtaaaacataatagtatttggctaattatattattttattgtgcatttcccataaggattgtgaagatctaagtcatacatatacaacaggatgtccgagcaaggtcatatttatggacaactcaaatgcatcgaccaagagatgtgacttggcaattttagaaatgattgatactatctttaaactttcatgtcacgaaactatccttaattttgtggaattaattcgtaccttagagaataaagacaatgaacacaaatttgcctaattttctcattgtaaattaaacatatttttaatttcttattttattttttattgattaaagaaatcacttctatgtaattagttcttgtaaatagtagtttatctcactatttagggacacgaaattaattatagagaacactcaagaatgaaactacgatctaagagtaaattactcagaaatatttgtaagagcttttgagaaagaatacttcattctttatctcacgagttaatacaactgaaagaggagtaggctattactactatcacgaggccgaacctctataaattttggtattttctttacttacaatttttactttctattatttatttaatctaatcgatttaattaagactcactgtcgttggttaaaagggaggtcaacaatttatattattatttaaaaaaaaaataataaaaaaattgtatgatatttctaaaagaataaaaaagtattataaaattaaaagtatcacggtaattaaacttaaattataattaacaacaatttttaaatacaataatattttttttatataaataacacttaaattataaattttttaataaaaaataattttgtttattaaataatataaaaaactaataggaaattctacaatgcacccccttaaaatggatacattgatacatcattgtctgtttaagcacccgaaataattttttagtcaaattttttctcatggtcatgtgcgttatagttctttaagacatcctgcaaaattttaaaaaatttggaaaagtttaacacgctgaaaactacgttcaaacagtatgttgcacgcgtgactattttannnnnnnnnnnnnnnnnnnnnnntgtttgaacattgttttttatattgtaaattatttagaatttctcaaaattttgtaggttatcttaaatatctataacgtacatgaatatgaaaaaaaattagactaaaaaattgttctagatgccgaaacaagtcaagagtatatcagtacatcccttttaagggggtgtattgtagaatcacccgaaactaattttgcaattaaaaatatacataaccaaaataaaaattactatatgcgcattgcagttaatattaatttactatatatattttttcaacaaaaataaacattgttggtttcagattgtttttatattattttgatgaagctcttaaaagatatatatttttaaaaaatataataaaataaaaaataatgagtacagaaagaatatgtatatttggatagtacttagacatgacattagttatctatccataatatatgagtactactatataactggcttgaccttttgaactttgaaaaattacaaataaagaaagatgcgtgtataaaatttaaatcgacatctaagagcattcacttttaggagaataaaaattatcggctgatagtttttgatattatggaccagataattcttatacataaactaatcaaatgtcgaatctttcagcaccaattaaggacaaaaacgctagctttgtacttagattatgcaaagaacatacgtacaatcaacaatatttgtctatatatatacatctacaagttatattcagcaattaataatattatcatattttttcttttgcttctgaattatatagtccagtataatcgggagctaaagcatatgattcccgcctaagcccaatttgtacaggagaaacacacaaaagtcactctctctctctctcnnnctctctctctctctctcatacattttaaattaatattaatacttaattaatcgatcaaatgttttattattcccattcaagatcagaggaagttataacgcctagcaagctgagtaactattacgagactttcctttacattgttaaacggattcaaataagttgacggatataatatcgttattggtataatttaatgtcgggcctcattatttattttaatttaataaaaattatataaaatcactaatcaattataaaatgtagtattatatatcttggtatgcccatgacaatactcctttaatttggtgttacaacttgatgtctaatcaattaacaaatgagacatgtatactaactttaaatcaatatttattctaattaatactttcaatgaatattcatggttaaaagataattaatacttaacaaattatatttcaatttagtttctttactgtaaatattttttattttattaatttgaaatattttaaatttgatatttactttttagactttaataatctattttttgtttttttttttttttgctaaaacataaaaaaaattacattattttctattttacaaaggctaattaaaaataaaagatttgttttcttctttgtctcgtaattaaaaagaaaagtataaattaaattgataactttttgactttttttaggcagaaaattagttatatttttgaatttgcagaaatactattgacttgactcaagttaatacaaaattagataggtgatttgaaacattcttaattatctttattaattgttacaaaatttaatgacattcatttattttatttttgggaaatattttatttattttaaaatctattgaataatttttatattcaaagcttttcttaaaaaagtaataattattttttgaattattaatattagtcaaactcttttttgttttcttaaaacaataatttattactattattattattatttgcacatttttaaaagaaaaagcggaaacaaattaatgaagagttaagaattatatatatcataattcgccccatcttttagtcaaaatgagttagggtatcatacatgtatataatgctttttttgataaagaatatataatgctttttatcaaagtagattaattagagcaaaagctggcactatatttatttataataagagtatttcttctataaattttaattacatatatactatacaccaaactaaaagaataaaatgagaattttcttatatatatatatatattatatataacacaaaagtaccatttattagttaaaggaattaattaatagggtgaagttattactgagctttttcttgttaatcatatttttttttcaactggtcacgatatattatatatatatatatatatataaatacatcatgtatatagcacataaattttttgtttcaaaagatttacccaatcaaaaagacttgtcatagaaagctgtttaagctatttcgatgtgtaaaattggccaagttgtgaaccgacattcgcagaggtggtggggattagagaaactatctatatatctatata

SEQ ID NO: 17935 - DNA, 4655 bp, Cannabis sativa
  modified_base (31)..(32): a, c, t, g, unknown or other
  modified_base (1006)..(1009): a, c, t, g, unknown or other
aaagttcaggggacataatttggtacatgtnnaagttcagggggcaaaaatcttaattagcctataaatattatagaatattactaactaattatacgataacacttcatcgtagtgctaggcactatgagtgcctcatagcaatactcatttttttttatttaaggatatgtttggcagataggattggactgaactagactcaataattttagtagttcagtgtttagccatgttggagaactggatcactaatgcagttaattttatttatgtaagattatttatctcatcaagaaccttggaagtattaaaacgagatcctgagagcttgggaatatgacacccaacgctgaggttgacaaatggcctggtgcgttgggttctgtttatctgattttgatttcgtttcgatcgtcaatctagtatttcacaataactaatatccatgaagtcagagaagtcaaattcacaacttcacatttctcatttccaacatgaaaaactctaagaaatgaagagttttgagtctcttatttttgcagaacaacaacatctccgagaactggtgaccaacatcaccaggatacaaaaatagactgagtgatgtcaaaatatcagctaggcatcttaaattacatcccttggacgttatgtcaacctggctgctggatatcaacctggacgttgggtcatgaactgacttcagtaaaataatcataactcactatattgatctgattgacgcgattcaacttgtgtttcgaagataattcaattatctatcaagtcatgtatcacactcaaataattctgaagctatcatcgtcaaattttactccaagagagttacgaaaataagctctaagttaccctcagcatgactcgtcgggctccaaaaaatggctatcaccaccaagagataattttcaccgttagattattagcttaggttgaaaaaatatatttttctcttattttttgtgggtctccttcacctataaannnngagctcccttagctcatttttcaagttcaaaaactacccacaaggtcagaacttctctctctagtttctttctctataaattggagcttttgatatttagtctttttctataataccatctcatgaaaaataactcaaagtagttgtagcttcattactgtcgcgatatagagagtgaactactataaatttgttgtgtctctcttataattattttacaacttttttattctcatcaatttagcgagcgggtgtggcttagaagttcagtcctaatttttgagtcaacaaaaccttttatttaagacaactctattataaccttttgttttgtctttgataactctaaaaattagagttattttatcagaattttatttttatattgatccatctcccactaagatggattggctgttactttctactccacgctaatggtttctcaagccagctccactttgtggtctatgatcatttattttgcgaaattatttgcttcggccatcgcaaaaactgaaaaaagaaaaaaaaggcgaaaccaagtcgttaataccatacactaacaaatatagtccttttgataagaaaaaacaaatatagtccctataactatttggagaggttcctgctagacccaacatccggaagcaagttctccaaggaacattactccaggataataagatcaggaacacaagaatacaaagcaaaagatcacaaaatggtctgtctaacaccaaaagagacctagacaaaagaaaatgcagtgtttataaagcatatataccaccaatacagagcaaactactgagcaaatttgccttaattaacttaaaagcttcacaagcaaaacacatatcctaagaactgccctacacaacaaagtttgcaataaaaacccactcaaaccctaaacatcatggctatacatctacaatctcctctttagacgcagcgacttcgacataaatttaaatataagtttgaagtaagaaacacttacttatgaaaactatagtcagggggatttgatcgagacgtaagagccttgcttgaaaatcttgagcacgtcctagtagttcgtcgacatttgcttgaaaacccagcgacttcgatggctttgaagggtctatggtgagggataggggtggtgtgtctagctatagtcttgatcgaatgtgaagcagaatgtgaagaatttcttttatgatattggacattcattagtaaatatttgaggatttcttctctcttgggaaattttttccctttggaaattttgaacttagaaatttaaaatgacgaaagtggtaactagtcaatcctcactctatatatacaaagtggtgatccatgtacttttaatctgacaacccatattaaaatttggaaaacataaaagagatctaacagtttgagaatagggaagggtagcagttaatgatgtatgcgggatcgaggtcgtcttatgatgacattcacctcgaaaatcctgctgacatgagttagccgtcatttcacatcctcaggcttcacacgctttttcaaggcatgtagtgtgcacggaccaaaagattcatgacacatgtactccatttccattagacaaaaagattgcaagcctccaccatttactactatagaatcctaagaggttgtacctattcatgggtccgtatccaatagtgaatctgggagtaggctacaagcctccatgactctcgagccctgaaggcttgggggtaaatgttatccatatttttagatagatggcgtgtgcattttctaatgtccaaagttaatattagcaggcccaatcaagttagcaagtaaacccagttacggagtcaagctacgactttgaattcggatgtaaggtcagcctacagacgtgacgaggccaggccactatgattcgagaaataatgtttggcccaaaaggcaaatgatccatcaagatcaatattgatgcagtagtaattcagatacgggtaattgaagagacatccataagctttcgaatatcatcttatgtaacgtcctccagacatggggtcccaccatgtcagggatttgtcccctacgtcaagcccaaagagtgcgcacaccaccaaaatgcaacaatccttttgtccagtgacatattatctgacattctcatcactagtacaacaacttgcgacacgtggcatcatatataatcggtcctcactcgtatggatgaccgttatttcatgaattgggtgtcacccaatcaatctgaagtcaatatatattgtattttaccctatttgtgggcctagttgacaacttcaaaccctaccgggttcgagttcatcaatactcggttctacccgatatatataacagtatcccctcatgcaaggggatcagctgcaaatcaattctgagaaaaatgctaagaattagggttcatctgctaggacaaaaatatttttgtaaagatactttgaagcttttttagctcaataatattagctcgtggagcaagattcattaccgtctaaaccatgtaaagtcttaattttcttattctttaaaatatttctttcttaagtttaattattttataatcagtttttgaaaattttagtaaaaagtaattaaatatgtatagctttaaattacaatttatcccacaagtattattaaatatataatgttaagttggtattttaataaaacactaaggtgacgtttagttggaaggaatgaaaatataagaataggattaagaatgagaattgaaataggaatggaatagaataaaatttaaaatgcataaaaaataataaaaaaattattaaattttttcaaatcttgcattcgaatggtttttctttcaatttcaaaatagaatagtcattctactaaaataatggaaagatcattccatcggaatggtattctaagtgttttagatgcaaccaaataaaagaatagaatgaaaattatttcctttccattccattctgtttcattacttccaactaaatgccacctaaatgagtacgtaccctttaaatttattgtctaaaataaattaatatattgaggattggtataggacactattgtaaaaattgtatgattgactatgttaatgaaaatttcttaccttttaattaatagtcaaatcaaattatagtagttcgaccttcaaaattgacatgtatccaacaacatgtattgattttgtttatgatacaaattcacaatgtttttccatatacttgattcaacttataagtggtacacgatctagggtttctcataattataaaattaattagtttcataatctatattaattaattatagatgtagtagagtcattcataaaagatatgtgacaattaattaagttgaatttacgtatcatatagagttaatcatgtacgttcatgacatgaacaataaagtaagaagtagcattcatatatttatatgtaatacaatagtatttccaattgtataaaagaaaacaaagaaaagtacccttagattaagaaaaactattacatttcaccaacttttttttcatcaactcttgtgtactttctatccatcatattttattaaagaataattagtatttttgtccttaaactttcgacattac

SEQ ID NO: 17936 - DNA, 3339 bp, Cannabis sativa
acctcttattttccaaaaaaattctttctcaacgtcgatccattagtcaatgcaagaggtcttctactactttattcgaatctttctaaacctctattcagcccattttccagaagtagagttgatgaaccttgaatcgttcaaccccaaacccaatgaaagcttcgacgttcaggccagctacgactatgtaattgattgtgttcaacacttttgggcagatttctacaacaacctctctttccttactcacataacaagtatcccgacactttgttgactattttctatttctcatagaaatgctaagttcaagctaggtgtaggacatcttgcatgtttgagtggtaaattgatgcccatagagtattatttctgaggtaggattatgtggaaattttttttaccctggaagtgctgatttttttgaatggtttgagtacggctatttgcgctcccgtagacattttcatgctcatagaattctagaattagggaaaaaccaggcaagatgaatttttgagcaaactttaggctagggaacttccttcacacccattttgagttgttaggacatcgaggggctattattttgtagattgttgcttaaaattgttttctagtagcttttccgtaggctcctgagctatcgctatgagttgttcgtgaaaaataggtttttgaaagtgacaggtccggtaggcacctctccaagaaattttaggggaggccttcctcgatacaaattatgtcatttcaatggtgagtgtttaattgcttgccctttttttttcatcattccagtgattgatttgagcatggagttccatcttgatgggatggaaattaaggacgacaaaacatttgtccttatcgaggaaacaaccactaagggaacttaagcagtggatcctgtaggggaaactcactcggatgctgcccttgagactttcccagaggccactctatctgggacacctgagaagtccaaagggaaagggaaggccaaagtttctcctctcgctcaaaaattcaacaaatccatctgggtgatggaccaaaaggaaaattgctttcgttgacacgggattctagaaacgtatgctactgaagccagactgctcaacgtactaggattaatgtcgcataggctactaattgcaaaagagtctccatccacgagcacggatgggttcagtgcttagagctggtcccatatctcaagcagagcacatctctcgctaagaacttactttgtggagtttcttgcccgtattaggatttctctgttccagccaatacctccagcttatgagcttttagctagatggtatattttttgtaaaattaataagtttaaggtgcctactcaggaggaaattctatacttctacagggtgaagcctcaaccgatgaggactaactacaagaagtttaggctttaaaagctcgataagtatttggatgatcactgccttacttgccaaaccaagcattcccacgacctcagggaatattggttcctctccactaatttcccagtgaataggcttcctaccctctaggttagctttcgaattccaagtaaaaattttacacttgttttttggatctattttttttttcaatcttattctagttttatttaggtgttgactagatctttgagtttctttatttctattggcaaagcctgtgcctcaaagtgttgagactaaggaactggctaagaaagttgtgtaatataaggccttcaccgaagctcaactaaaagtttagggcttagtgactacaccattgctctgcgagcatggacttattgtgacatttcaaagtattgacagtgtcaacaacatgggacaatgccaagctccaaaagaggtcaaagaggtgattgcccatgacttaaccaaaatcctcacggaggccactaaagaggaccagctcttggaagctagttggatgctctctcacccaaatcctctaacagaagttaacaagattcacatgaggcgtgctgcagcatatccaaatcaggggacactgggggctatcacttctggaagaggtaataaacctttctgcatgtaccacaccccagtcttcatctcatgtcccaaatggaccaagggggatttgatacgtacattctgaatttagatcacgctatgtaccccatgagtgaattcatagataaggtagataaaattgttaggagtcctagaaatctaaagttacctccaaactctataagggtggatccttttgtagccatttcctttcaacttttcagagaacatggcagcttccactacaataaaaactattattcttgacagcccttaaaactctttttttgggggaccttcgctaaaaaattaagtgagtatttaaaattgtcgggaaaaatttgatattcccgacgattttaaatactcatgatgtattttgaatagtttctaagcattcctttaaaataattgatatttttttaagtggaattaccgacggttaaaaaccatggcctatactattatccaaatttttgtcctcatgagatggcatgcttatgtggacagaacctgtgccacgaggcagtacaactcaataaaaggaaggctaaggcaacatctgagccaatgaagaccccaacaacaataacttccaagaaggttcttgactttttttatcaagaacatcatatacatgttcgacctaccctagaagattatgtcagacaacggcaaacagttcaacagtgacatgttcactaatttctgcaacagacatggcatcatcaaaagcttctctgtcgtggtctatccacaagcaaatgggcaggttgaagctgtcaacaaaaccctcaaggagaactgagaagatggccactgggtaaactccagttgccttagcttatggctaagaggtgatgttgcttatagagatagtgccactatctcactgtagaataacctatgaccaacaaacaaacaacaccctactggcggagtcccttgacgaagtagaagaaagaagagaataagccaacctaaagctataggcctaccaacaaaaggtagcaagacacttcaacaaacacgtcaaaaggtagcaagacacttcaacaaacacctccaaaaatactaccaataaccatcttacaaaactctactccaacgtagcggttctacctactcaacattagagtacaacaagcgttagcacccacgatccttcttgggcgtagtctcccactattcttcaatagtggcctatgttttgcaagtgagcaggggtagccacttggtatctaacagttaactttgtgtaatataggct

SEQ ID NO: 17937 - DNA, 4659 bp, Cannabis sativa
ttatttaacgaataactgaaaaaagtttgaaaataattaaacataaatcacaaaaatttaaaaaaaaaaaattaaaaaattattttcatgtagttttaagtttcttttatgttgtttttgtaataatttatattcaactttaaaatatttgataaaacaaaattatttataggaatccccctgaactattacatttataggaatttagtccttctgttaggttctgtcccattattctgtttgaatgatgatgtatctttgtcaatctaccccctaaacttttgacaactatcaaaatcgtacccactaaaaattaaaatgagaaagattcaatattttttttagtaaatcttaaaaaattaatttagatcttaataaaaattattttgaatgattaagaaaattaaaaaataaattaaattttaaaattaattacgcgatataaaaaattatttattttttattaaaaaatttattttattttttattaaaaaatttattttttttattaaaaaatttatttagatattattaaaaaatttatttagatatgaaataaaaaatttatttagatatgaaaaaaaatatattaaaaaattaatttgtaaaaatatattaaaaaatatatattttcaggaacaaacttgaatatattttgtttttatcaaaaaatattgatttgtttaagtaaacataacatttttagttaatttataactttttttaaataatttatatttttattcaattttttaattatttttctttatttgttaaggtatgaatttataaatataaataagtttgattttttcttcaaaaaatcttagtgtatttaaattatttattagaatattctcaataatttttatttgattttttaagatactcgttgataaataaaataaagtttaaaaatatttttttaagtaaaattaatattttttaatcaatttaatatttttatctaattttcattagtttttttttttttgaattaatacaatattataattggtttaaaaaagatagaatattatttttatataattttttttttaataaaaatgggcgaaatttgtattagtcaaagtttagaggagtaaaaacactagtttttaacagtaaaagaaatattacctaacataaagggtataattatgtaactcgagaatttataacaagccttatattttaaagggtacattcaagtagttttgaaagttcaaagaacaaaaatactaattatacttacctagttgatatataaaaagagtgctcatgctcataattaattgagctgaaattcacaaatattctttcataatatttcatcttaaaggagaaaagagtactaatgaaaaatttaaacaaaaatgataaaatgattcttaaattttgaatatcgatattcgaaaagagctatacgaataggaaagtagacttattatatgttgggatttgttaattgtttaattactgagttaataatgaaaaatgcttattaagatgtatatgtattaattaacttggttttttgggaagaaagcttagactatataagcaatggttttgcacaaaagaagaaaataaggtttctaccatatgatttttttcgaggacttggcatctgcctgggaatgaccaaaaaaagaagaataaaaaactattatacaatacagatatgtatgctctggtaatgaaagagctaatatgtcatttggtcatagaaaaagcaaagaatatgtagtccttattgttattttccacctgtattaccaaaccaaacaagccaccccacagcgctttgaagaggccaagttaaacagtcccaacagggaaagtttggaatataagaatgaagaaatctacaagaaaagctacctattttgatcattttcacacttagaagtgccatcatctaatttattataacaacattaattattgacctattgaaataatgctagttctatataaaccacataaatcatcatatataacatacgcacatttaagctaataataatattcattaccgaaccagagactttctcatttatcaatggccaatgttagaggaacaggagtcttaggagatgaaagtagtacttctaggctgcgaaatgcggttttcgatgagattgtaccttcttctgattggacagaagacttgggtggccattatcttcttgttgatcttcctggtactgcatcaataaactatgtacaaataaattttgttacgtctttcattttcttgacacggtttcatttgtttcctgtaaaagttacaaatcatcaattttttatgttacatatatgtgataatatgttacaacaagcagggataatattatgcatgatttacttaaattttaccatatggtgatattaacatgttctatttttacctttggacggaaaaaaaaaaagattttaagaaagagcaggtaaagatacaagttgtaaacaatggacagataaagatttatggtgaaaggaaagtgaatgagaataagtacattcgtttcaaccaaaccttcaaggcgccacaagagtcagatttggatggcatcacagcaaaatttgatggtgagattctctacttaactgtcccaaagaaaaaagtactcgatccatcccacgaaaataatgatcaaaatctgcaccaaaagtctactggtgagaaagagaagaaaaaagatcatcatgatggtataaatcatcacaataaggaccaaaaggaagagaaagagcaccaaaaaaccaaaaccgagggagagaaagaggcctctaagtctcctttgtattttccagacgagagtatcaggagatgggagcgcgaaacgaattatcttaaaagtgccatgggaatgctgaacaaaaacaaagcacttgttgtaacagccatattagcattctcattagggatgttcataactcgaaaattcgactctgataatggagagtgatttctagcattgtaatttgtgtgtgtgtgtgttgttgattaattatttgtaaattctgcatactggcatggaaatttgcccaaactaatacaacataaagtactattttaatgctgatgaagatctgtatatacttgtttcttcttcaaataatgttatgaatatctcatataattaagtactataatattgaggttataggcttttgattgtacttgtctcataacaggcgtttctcatgtgaccaaaactatgtataattatatacatattaaaaatcttgattcctaaaatgtgaacaagattattttattatgcatgatattctgagttgaatcaatttcacataaccccccattggttgacataggttcttttgttttagttattgtatattggtgaacctttaatgcttttattttagccaacataatatattatattgattgaaaatggacatatcattgaccgatttctgaaagaacaaactgattttgttcttaacccaacttgtaaaactttgatttgttgattaaataccatgattcaaaaatcataagcaatatctgaattttaatcaacaaattgcaagtttgagagatggtagaatacaaaaaaccacttgctaaaaaaagtttcttgatgataggtaatggtattcctaaatattcttggtgtgtaaactagcttgtacattcatttcatccacaaaaatgtgtcaaattaaaaagaatcatcatttttttatataaaaaaaaaacacttttatcataggatcagattccattagtaaatccgcccaaaaaaaaaaaaagaaatggagcaatataagaccacctagacatgacgagggaaagggcatgtgtgaaccaaaagttatgcactataatcttctaatatattacctaattcttttgtttagtgtatgagggatttccctcataaggtaagtaatagagactggtcccccattgcttatgttaatgaaatttaaatatatcatgatctcactttagaaattaataatgtataaataagagaaattgctcaaagacttatttactcttatgatatttttcccctaacccttttcttgcctctacctaaaaatagattatattctttataagttaaagtgcttttggtggaaagatatgacatatacaaagagcaggaatgaccatacatttctttcactaaccataaaactagcgtcatgaacacaatagtatctttaaaaaaaatgtgtgtatatgcttttttttttaattttttttttttttagatttatggatgaaatgaaataagggatgaaagagtgaaagaagaagaagaataagggaacccaataagaaataaagctgatgctttgtcgatgaactttattcaaaatgtgggctgtttttgacaaaaaggttgagggcccaggcccaggctaataagggtggaatcatgtaccttatgtagaggcatctcactcacatcacactcagttatttcttcctcccaaattttactcaatcttcatctttggctttcataatatttcttttaaggaaaaaaaataaaagataaaggttttacttatatctgtcttattactgttacatcatattaattaaattgttgctattcgattaatgtaatggacaacaaagttgtaaaaatcaaatctttagagctc

SEQ ID NO: 17938 - DNA, 4348 bp, Cannabis sativa
aagagctcttaataatagcattggtggaaggtattggcttatatttcttaagatatcttactttttcgattagtttgttagtgaaagatcaattcctagaaatatagttaatttaattgcttctttttaaattgttctatgcaggttttggtttggtggcctttttaaagtaaaaagctttatccttggatttttttccttttcaaatattatattgcattagcacagtgcagtaatgaaacactgtagactttatattgcattagcacagtattaaaggtaacatttttctcatgttttaatggctgcaatatttctaacttgactctaaacttcttgtagattttttatgatctacttcagtttgtggggcctgttttattgagtcagctactacaggtcagttcctttccttttatatgttgctcaaaccaagtgtattttttgtattattattattattctttggtaaatgtttttataaaaatgaagttactttcttactaaatataaggattatattactttactattcttttgtttgcacaattaaggtttaattaatgtcaaaacacctatattggagttttaaggctgtagttcctgagttatgacaataaatattttcacattcaaagaactcagtaatattaaattatcttgatgtgaaattaaacctttcattacttgttttcttctgttaccacggttttcctccgccacaaatcaggcttcataataaatttgggagttagatcagtctatctctttctcaataatattacaaagttttcttgcattgtacaatgtagttcttgtgtttcaaatcctaattctcttgttttgagatgcagtcaatgcaaagaggggatccatcatggatcggatacatttatgccttcttgatttttgctggtgtggtatggcttggcttctcctcaatgtgatttctgtataagatttgaagcaatttgttatggtagtggaaagctgaactaaatatatttgaattagtttagggggaaatgcataaaaatttagagaagattattgattatgctgaattctgaacttgggttctggtaactctacactaaagttttagttgttaagtaaattattgttatataattgtttaccaaacaactttaatctacaacttttaaataaacagttttcagtttttccaatatctaatatattagaacttgtactgaattagtgaattttacagtagcccaaagtacaagattttgcttttttgactacttatgtaaaagatttaatggaaatgaatgctcaaatgtgtttcatgttactggttttgattcataagaatatttgactataaagatatattgatcaaatcttggtataacttttgttcagtcagtaggggtggtgaacgaatctcgatattaccagaatgttcagcgtgttggtctttggatgagatcaactttggtaaaattctctggtttttttcgaattaagtttctttcatggagattatgaatgaatttgttggttttaggatattgtctgatgctttctaatttctaggtggctgctatttttaggaaatcattacgactcacacatgagggccgcgaaaatttcccaactggaaaaataacaaatatgattacaacagatgctagttcacttcaagtatgttcttatttgattttctatattttttagtcataagtattttccctaccttcttctccatgtataaatttgtaatcatatttattagagttagtcccacattactaatgtgtggaaataaattgccattacataagatgaatgagctactgccaattgattttgagatgaacctcattcatcttatcacaaattctaacatggtatcaaagccacttgtgatccgttgtgagcctaaatgccactggtccaaaaagccgttgtgagccaaagtgctgccggtccaaatagatgtttcaaaatccaaaacacctacaaatttcccgatatttagccttttgggattctttcaaatgtcacgttcggccttgtggtcaaatgaatgagctatcccttccattgccaattgattttgagatggaactcaatcttatcacaaattctaacaatattaactttttccttaaaattatcagctgttcctagattttgtactaaatcatatgctttttatattgttcattgtgaatgactgatcaaagtaatttcataatgaaagtcagtaaaattacaaaaagccaattggacacccaatgcctaattttcaccatagagactctgcacaatcttcatcccccttcataatttatttgattttttttcatatttttttccaaccacattgcccaccaaatagctaccacctcaattctccatagcacttttgatgcctattctctcaacataatggataaaaacaccaacaattcatctagaaatttttatcatactctcattgcaaccaagcaaagaagtgaaccttagaatgcagtgggatataactatggtagtttttgacatttttcagcaaatgtgcccactacttcacgagttatggtcagccccatttcgtattatcatatctattgttctcctgtaccagcaactgggagttgcatcgctttttggggctcttgtactaattctcttgatacccttacaggtagggtacactttttgtaatgtctgcaataattcaaactctcatgtggtataagttttgctttatttacctatattttatcagttttttaatttcttgtataatctaatttaacatgttcttcctttcagtttgtgaagttatatacattaaaaagtcctaattgatcagtgaattaaatgttagaaccaagaactaacattttcttgtaacataggtttcaatcctttttagcatgctcctgtttaattctgtgtaatttgaatttttctgagtgaaaaaaatagacagttgtgctttccaaaatgcgaaaagtaacaaaggaaggactggtgtgtactgacaagagagttggcctcatgaatgaaattctcgaagccatggatattgtgaagtatggttgttttctaaaaaggatattgcttttatattttttgatttatttttatgttttaccacattagtatacattgatctgaatctatgctgaatatgtttccaatatttttgttctttatatccaatttgaatatgtttcagatgttatgcatgggaagttagcttcaagtcttgtgttgaaaacatacgaagtgaagagctatcatggtttcgtaaagctcaattactatccattgtatgctggaaaatagtttttccttgaatctctaaagccattattttatgatgttgttggtagttttacagttcctggtttcacatgtttctgattgtttttttcttttgcagtttaatacttttatcttgaatagcaccccagttttcgtgtcgttcatatcatttggagttttcactttgctggggggagatttaacacctgcaagagcattcacatcactttctctatttcaactgctccgatttccattgattgtgcttcctaatctattaagtcaggtacaatctgccacttttaacacaaacagtttcatttttcaatgtttgtcattcactttttttttatcatatcaacagaagaagctgaactggtttgtgttgcatttttagtatctgagatcattcttctttgacagattgtgaatgcaaatatatcattgcaacgcatagaggggctactcctagctgaagagataattttagagccgaacccacctcttcaacaagagctttctgtcatatcgattaagaatgggtacttttcatgggatgctaaggtcagctttggacttgcctcttattttcttactccatcactataagatctataagttaaggagtccatattttgatactctccattatatatagtgaaattttgtgtatattatgttttttttttttcataaaacatttgagaaatacatcagcatagtggctagaaaatggtgagtgttatgatgattccaaaatattttctcatgcactgaattggacaaaattgatggtacttaagtatgtttctttccaacgaaaatattagcgttttctattatattagtattagttagtgatctcaactgagtgagtcctttctactgtgatgaactgttggcaccacccttgctttaggacatgtttttctattacaatgctaaagatctttcttttttccttttttttttctttctttcaggcaaataagcctaccttatcaaacattaatttggatattcgagaaggtagcttagtggc

SEQ ID NO: 17939 - DNA, 2483 bp, Cannabis sativa
ttctgcacatgggattcgatgaagttttgacacattcccagatggtaataagaagtaaatgcatgagttcacagcccgttctaccttatctattaatagacattaagatactatccataacacattcatagttcatactactaagaaaactgaagaccaacaaataagacaaatggattatgtgattgtcaataacattaataaactatcgaataaaaaactatacgtaacaaaaacacaacttaaagcagaatcataagaatcaattttataaaaataaatgaaaaccaacataagaaattgtggaaataaattcaaaacgatttagttagatggtaaagatgaatacaagaaagagagaagagtgactaacattggggtgggagttgagactttgagagcataacagaattgtctctgaaagtttcgaagtagaatccaccttcttctgggtgtggagccagattcaatttggccataatttgtgaagcagtagccatcgatattctctctaatttctaggaatgaaaatattctgtcactaatattatgcctacctaacacaccctctcttctttctgtctttttttttttttctttttgaaaattgacttcatcaagttaacgtccaagcctgcaaggaagaaatccacgtgttaacgctatatatcctaatccacgtggcttcactacagtacccttgtataattgaaaaagaaacttttttttagtgctagtattgacctgtcaagatatgctagtggaagcatctctaattcatgtgtcaagatatagactatgaaggattataaaatattatgtattacataaaaattacaaaataattagagaagaacaagaacaaaaacacttaataacacacaatgaaatctttttcctaataatcatataaaccttagggaaattttagatatgctcttaaaatttgtgaagcttcatacatttaatctagtgtctaaaaataaatatatcctcggatttttatgtttcaacattatattgtaactagtatgttttcaacttgtctgctaagtgaataatatggctttaatttatttataagattttcacacttatataaacatgaataaagtgtttaactgttatcaatgttaaattgcatttaatgatcatcaatacaaaggatttatttattcatacatttgtaattttatatttgtcttttataatttaacgaatttacactaaattatttatgatttaaaattatattataaaaaccacacattccatttaagactaattttaacagcataacaataaatagtcttaaaagctattcaaatccagtcttatctatgctaacattttggtacattcaaaatcttattagataatttcctaatgaaaaatttcgacaataattcagtcatcaagattcattattttttaattacaaaactcaaaaaatataccaaaaatctcaattaaaatctattatatatacagtatactcgaaactacgatagagatgatgattaatactttatatacggactttcaaattctaagaaagagaatctttcgaagacaacgttatattaaactttaacaataaaatctttcaaattgtatttctgaaaatttattactttacgatcaaaagtgttattatatattttattacatataaaagaaacttaattatttaaaatatattttatatttctcacctatccattataatcgttttttgataaccttaatgtcataatcatgcaaaaattcttttgaaaaaaatagaaagctcatgcaaacttttttttttctttttaagaaattcactatatatgatggtagttgataaaactatatattccaaaatctcaatcaaaagcacatcaaattaaaagtacattaggaacacatctaaaagcaattaaacatatggaactcccacactaggcttccttttattgtacgtcgttatcttttgtatgggttcgattcaaatagagttttcaataccactctcaattgcttttattatttccttgaagttttcttcgaaactaaaatcaaatgtaaatgcccgctagatttttaatgctcgcttgcaactggtttggaagaaaactggtaaccgatatatatatatttattttatatgtacgttttatgtacgtttttcacatgccacatttttaattctttgtgtattaatgtgttattatgatttacagttgcttgctatagctgcagctaaaaatatcgttggatggtgtattatctcactgtttgatcgtaaagtaataaatttttagaaatacatttataacatacatagataacaccttaggtatttttaaaccatgtgggactttaagtttatatttgtagtagtttatttctaaaaatatgaaaatgacacaaaattttaaaaatacaatgaaaaaatattgatatcacctaaatttttttgtgtttttctttatatttat

SEQ ID NO: 17940 - DNA, 7141 bp, Cannabis sativa
cttctatttttcttttatttatatatgaattgtgcttgttggactttagtaatgctggaaaaatgtaggtacgccgcactgatgttctttctgcttggagtggtattcgcccgttggcagtggatccatcagcaaaaaatacagagagcatttcaagggatcatgttgtatgtgaagaataccctggtttggttacaattacaggaggaaagtggactacataccgcaggtaactttcactttggcatgctgaacacataaaggggttttagttttcacgtattcaccagtagtagtcacctcaatacaagaaaggtctcgttttcaggcttctttatatcaagacatctaatccatcaattttttacagttttctgatgcctcaatttgttttattaagcttcattttcacgatatcacatgttatataatagtgtgaccctcttttaccatcaatactttctttgtctgacatgatgtgacagctatttgaattgagattcatttaccgtgtattacgcgaactttttcagcatggctgaagatgcagttgatgcagcgataaagtctggaaaactgagcccagcaaatgaatgtgtgactccaaagctacgcattgttggtggagatggatgggatcctgcatcctttactgttctagctcaacaatatatccggatgaagaagagtcatggtggtaaagttgttcctggtgtaatggacacggctgctgcaaagcatttgtctcaggcatatggaactcttgccgaacgagttgctgccatagctcaggtgggttctcttttttcaaccaactagctactacatttagtttatttttaggtatttttcttttccaaaaataaagaaagactggcccaggagaggtggtttggtattaaggctttaagaggtcccttcctctgtatttctttagttggaattcatgtttctaataatttctagatgctcagaatatttaagtcaatgtatgtgcaagcatagatagttactagtatgcaaatttcttagttgctttttcatttattttggtttctataattacttaacaatcttttacaattttcagaacgaaaatctagggaagcgacttgcccatggttacccctttttagaagctgaggttgcctactgtgctaggaacgaattctgtgaatctgcagtcgatttcatcgctaggagatgtcggcttgcttttctcgacaccgatgctgcatctagagcattgccaagagtagttgaaatattggcgagtgaacacaaatgggataagtctagaaagaaggaagaagttgagaaggctaaacaatttttggaaacattcaagtcatcgaaaaatgcccagttccatgatgggaaacacttgtagtaagtggaattttcatctggttgataacttatcaaatccaagatataaaaactacattgcaatcaatgacttcagtagcattcttctatttgttggctggcctcgggtctcctcagaaataagcttaactatgaaggagcttgattttcacagataccatgtttgataacattcctggcattaatttggccaaaaggaggcctttagcagtttctttctttcttatttatttatttatttttctacacaggctgatttgcaatcaatagcataatatagtgcaaagccatttggtcttggtcatagtttattatacaaggaactctatattcaatgacttgtgcttcagaactctatattcaataagctaattaataatatttttcatgtgaaattgaaaatgttgtggccaggcctgtcttttattctaaagtactctttatttacacaaagtctacagacagacagtagtaacagtatgcattttaatattcatattttcatagtggaagagcatactaaaaatgatgcttgcaatttttttttattatttttagtccaataacttacattaatccacatcttttaatcacaattaccgtgtttatagtgatgcttgcaatgttgtgcggataatatccattttattttttatgtagtgctgaagcagatcacgtaccaaaacattactcatgttgggctgttaccttgttattagtgtaattattttaggtcttaaacattgatttaataaataatataaaaaattattatttatttacaacacattgcataagtatgtgtaatacgaatgttcatttaaaaataaaaaatgttaaaaaatattaatagtgcttaataaaattaatattacataaaaatgtgccgcataacttgtaaaggagtagtatccctaaagacgacttttttttttttttttttttgagaaaatgctattatattaaaacaaggattaaaaagaaagacaaatcagtatccagtaggaatgcggtttgattgaaattaaataaaaataacacctctaaaatgactacaaaatatccgaaatccaaaacaaaatggttttaaacatcataaaagaaaaaaataaattgacactatccgttaaaactgtgaaactgagatagaagaagaagaagaatatggcggcttctctctcttctctccaccatctctcttcttcacttctatccatatcctccgtcgtctctctccgtcccatacgatacattcttcctcgcctttcatgctctctttcttcttcttcttcttcttctcgcgagttcaatatctcctttgctcccgccaaacccaagcccaaaccccaactcgaagactccgaccctcaactctctggcgtcgatggtcagctcttcattccctggattgtccgtggtgaagatggaaatctcaagttacagtcccatcctcccacgcatctcctccaggccatggcccatgccgagactaagaccaaggctaccaccgccgccgcaaagaagaagaagaaggagactgttgcgaagacgactgagccaaagcattccaaggcttcgcgaaggttctataacgagaattttaaagactctgaacagaggctcagtaaggttctcgctgcggctggaggtgattattcgaaattctcactctctcttatctgcaattccttctgggattgtttattcgatttctgttgattatgggagaaaatgctaatttggacaggattaggatatttagtgggaaattgattatttggaatgatgaagaatatgagtgataggttagtggattttcgtggaaaattagtagtttgtagtgggaaattgattatttagttttgtgttgaaattcaaagaacttggaactggaagtttggactttgttttgttgaaggttttatgtggatattctatagttcttttacaccaaaagcaatatttgtactttactatgtctgaagtgtatattttctttcttaagttttgtgttttaatccgaagtattgaggatgttttcgaccaaaggttataaattctgtcaaatgcaagtaaagagcttttcatttttcagttgagaaaatgtgtggtcgatcttttgaagaattgtacaagttcaagttggactagtgtgatttatttatgtatttttaaaaagaatttatctctgtggttgttgtgtacagaaatttggaaatgtcttgtgaattttcaatctttcacttttattttcattttagtggcatcaagacgaaccagtgaagaacttatttttgaaggcaaggtgactgtcaatggctctgtttgcaagactcctcaggtcacttgttgctcctcatctattactagaatatttcaacctgttagatgtgagctttttattcatgttttgaaactattgctctaacaaagaggagttcttcatattatttttcttgctgatgagcagactcgagttgaccctgcaagagatatgatctatgtcaatggaaatcgacttcccaagaggctaccaccgaaggtctattttgcccttaacaagccaaaagggtttgtcccttgtttaatccctgtttattctttttttcctctagaaattgttacttagagcccggaaatacttttatctaggattaatgcaattatgtttgacaggtatatttgctcttctggagagaaaaagtctgttctgggtctatttgaggattatttaaagagctgggtatgcataactgagttttatacttttttttccttttgaatttgttataaaagactgtaaattgagcttgtgaactgaaagatcctttttcattaattaacagttaatgtatgtgtttcactgaattttttatcatcaaaaatattgaactcaaagtttgtatttccaggacaaaagataccctgggcaaaccaaaccacgcttatttactattggtcggcttgatgttgctacaactgggttgcttatagtgaccaatgatggtgtgtagcgcattatatgcaaatgtctttatgtaccgatttgtagcatgatacagtgatctaatttattctcaacactataacttctcaggagattttgctcagaaactttctcatccatcatccaacatgtcaaaggagtaagggcttgtaaaatattattatttttagtgataaaggaattatcattcttaacagtgactataaattatagtgaggtggagatttctcatgttaaatcatgtgatttgattattgcttttgataaacacttctaagttggtggtagattattctttgcgttgtttttgcttgtggaaaagaatgctgcatgtatatacagaagtcagaaagtacgaagctgcatattttgttgcagatttcaatgctgatttgttcttttatctttacttgtacatgtcaacaatatgtttctgggtataagtaatttttagttgcatgtgtataattattaacttcttgtgtttgctatcttaggtatattgcaacaattgaaggcaaagttggcaagaagcacttgatagctatcagtgagggaacagtcatcgatggtgttcgttgtatcccagattcagttgagctactacctgatcagccagatagaccaagatctcgtctacgtgtagtggtatgacattttactaagtttttcaaaactgttttgatgatatgttttctagcacttgcttctagtctaatccagttccaggtaatgtatgtttccccttatacaaaaacaatatttgcttgctgtaggtagttttactttctcaaatcacttttttattttgctgaatgtgggtgatttaagggatttttcttcttgtggtctcaatttttaaactaaattcttcatcatgtgttataatattttcaatgctactggtctggtcctttctgataatatcggactagtatcactccaaattagtgctacaataaattaattttgaatctgccaagattttctttataagttaaaggatgcttatgaactgtaaaatagaaatagagaataagaatgtgcaagctggactcgtgtcatacaaaagacctttgtttggcttggattccatctatagaatttgggagtttaatggattcatgatgaacagaaccatgaacccattaaactcccatgtctacattcaaaattctcattgactctctaaatttctgcaggttcatgatggaaggaaccatgaagtacgagaacttgtgaaaaatgctggacttgaggtcagttttaatttatgaaagaagaattgagaagaactatgcgttcgagtgaaaaaacatcattttataatgaacctctttaacatgaaggggatcatttttttttttttaaattcaattttttgaaccaaggagccttattaaataacaagaacggactgccattaaaagaatgaaattacaaatagtgagtgaagattatgttgaaacaaccatcatctttgttgttccttgcttggacatatttactccatgttcaatgatatctagtcgtctgccttatactgtattatattagagtatgtgtttctttatttttctgtttccccaagtttcatgtttgttaccaaggatttcctccgccacaaaggagggttccgaataaatttgggaggaggtcagtcatggacatgtgacctttcttttcttttttgcaaaaatataaaagatatttagtcttccatgctccaatctttactttcctgtatgtttgttcctggacttgtttttatgcatatcattattgacttgtcatatctgtcactggaacagttttatttttatgtttagttattttcaatcctatttatgctgacttcttatgtctttactcaatccagattcatgcattaaagcgtgtacgtattggtggttaccggcttccaacagatcttgggtgattaatgttttcataataacttatatcatgattgctcttactttcattccagttttacatcaatatctaactgttcccatttattttaaattcaggctcgggatgcatattgaactaaaacaaggtgatctaatggctcttggttggaagagttagacaagttactgcgtgactgttgttcagttttcttcatgttccgatagcatctttgaagtgtgctatcagggaagttaccattacctttgagtgggaatagatgaattagatcttgcatcctcttgtgggacaatatacgaatatctgatgtgggttctatccctgtctacaagggtagtgaagctgctaaagccagtaacagagcaagagaggttcgttgcgtttgcagagtccgacataaaatctgcctgtgaaaattgcttggttgtaaggtcaattgtgtctcagttctatacttctattttagttttctagatgatggtatagattgactataacttctcaccaaatgaggctgttgctgaaagttcatatgtcatatgttaaataagaaatgaaaattttaccttaaattcattggttcaataccataataataataaaaaacactttttttttttgtcactttatactgattggttttctgtatggttgtgttttctttatttttattcataagccttacacttctgggatagattgatgtttgtgatattgaaagctcattttctttgtagctgccatcaattcaaaattggaacagcaaagatgtcattttcgttggatgccataagatgttatagcatcttt

SEQ ID NO: 17941 - DNA, 5199 bp, Cannabis sativa
caaactatatatacaaatgtatataaattttttaatggaacttaaatttattatttttctttacaattccagcttcaataatagcaaaacaaatcacagtaggtcgatacaaacacgatacgattttttacggatcgagttagagttgagataattaaacacgagtcaaaaaacagaacaacacgtttgacacgaaatataaaaacgagtcacataaaatatgacacgaacacgacacgatgacacgttttgccacccctacttgctatgctacatctaaaacattgcctgagggtggagcccccgttaaaattgaatttaaaacattaatcatgccatacatttagtcttaacacccactgtctcttcatcagactcaaaacacaaactatttaattacgaataccatcatcccaacaaatgattattagactaaactttcgttgaaactacaaaattggattccaggagccatgctagaccctcgtatattttctgctagcatctgccacaaagtcaggttcatactccgtttactgttttcctactgctgctgcaatgtcttcactcaattagcagtgaaaatgggcttatctcttgttttctgtgaccaagacgcccccaaacgaccgctcttctgttcattactctactacttttacgattctctttttacgcaagggctgtgtggtaatacttccaggggtactgtgtgccttcctcctctcttcttttcttctttcagcatctgtcatggtgcgcttgagattagtggccttgtatattggtttgggcaaatgtctatgtctcacaattcgcttgacatcgggtaggtgcttgtagcggttcttgacagcctcttgatactcgtgctttttctgttctctcggaagaagctgcacagtaacaaatggttagaagttaagagcttaaaagtaggtacttgacaaaagaaacatcctaaagaacaagttggacacactgtttggagctatgctacagactggctaaaaacatgttgccaaatttaagacattatttacaaatttttatcaagtctatccacttcgcctagcagtaatcaagatgcttgatccagtttgaacagtgaggacataaataaagtaagtgattcttacaactcccaattgttctgatgctttagccttccaaagtctaaggttggtgtcatcactaccagaaataacataagttccatcgcagctgaatttaacagaaaacaccctgcagtaaaagaggaagcaaataggaatggtaaggccagatacaaaagataagattgcttagaaaatttagacacagcttataatatatcaagaatccgggcagctaaaaaagtagaagcatgactgaattcaaaaaggaaaactgttcaaacctttgcattctctttgtatgataaatttctcggctgtgaccaccattaaatgggaaaattcttacctgcacaaagaaatttttcaatagaatcattggaccgtttattaactaaattactgtccgaagaaagcataattgactcatcaatgcagtactcactgttctatcataagaaccagtcacgaattcccgaccagttggagaataatcaatatccatcctagaaaagaaaagaaatgtgaaaaaaagtgccatattcgtatatgaaataacttgaggtgtaaaatataaattcaacaaagatattacattagcaacttacactgcagaaacatgatctttatgtacacacttagcttcactgagcttcctagcatcataactatagcaattggagtcttcatttgcctgattaatcaaaggattgatatgcataacagctgagtattcttaaaaaaaacaagaggatatacctatatttgtatattctataccataggatactacaacaagaatctatcaaaccttactatgattttgttagaatgaaggtcatgctcatgcctacatgctacatgagggagaaaccttctaaatgccacatcttttactcccaattatttatttacttaattcaacttgagaattattttttatcaagttaaacaattttagtactaaaaaaaaaaccttttcaaatgaagttagactacatttcacacaagtcacaacccttattccaacaacagaagcagctaaaactacaaatgtattataaaacaatttcataagtatgatatgcacatagagatctaaaacctccaaaatgaacaaattcagaagcactactaaaccgcaggagtttaataaatgtgcttacagcagtgaaatttattggctccataggattccaagcaatggaattggttcttgtctgtcacaataaaataaaaggtaagaatagttggaaataatttgggcatcattaaataatcatagtgaatatcaatgtgagatgtgccataaataccctcattattatctttgttacttcttttgacgtccgcaagtcatacagtacaataccgcggtcactggaaaagaatatataataaaattatttagtagtagaatatgcttccaaacaatattaaaaaggaaaaaatgaccatagaagtgaagctaagaccaaagtgataattgatccttggagattatttaccaactttattacccataagtgaaagtaaggctaactatatgatatttacacgctacaatgtgtgctgtgcctttatagaggcattcagctcaacttgcttccactatcactaaagatagtaggctcataagttacccttcacaccaaatccaataaactaatagaaatgccaaaaacctagccattgcgaaattgcaagaggaacccaagtagctgaaacaaagactggtaagagtgtccaacacaaaattaaacatttattaagacttaaatcctcagaaaattactagttcatcattgcactgctacaaaatgaaccggctccccttttttccttctgagttctgaccaactcaatcaccacaagctgtctaattctattcacttagaccagattttattctcatccccacataatttagagtgagcaaacatatgcacaccactaacactggtcaattgcattgatggaatacttgatctaaaaagtatatggcatgttgaagctgaatcattgcataatttactacttttagcatatatctaattaacagaatcctatacgtacgttgcggttgttgctaagacatttggctctccaggattgaatcgaacagatatcaccgtgtctgtaccccattcaaatatcttttctggcactgacctgtaaatcataggtatatacaatgtcatgtcatgcaacaatggagaaaaacaatattactaacttatcactcttaaagagaataacaaggttgaatcagaacttattgtgattccatatatgaactcctgctccagcagtggcaaagcgatcaccattccactggtgatcaacagccctgtagaaaaaaataaaaaaaaaacaattggaaattaaaacattgcatcggaagaaaatttagtctactacatgcagaaattccattaagatgcttaccaaaatgcgttcttccaaacatattcttccagggcctggaagcatgaaatatagcttgttagctaaatatataaaagtaaatttaactcaatacatacatcaacatacaaaataagaaaaaaaaacccacctgagtagatttttcagttgagtcacttggttccactacatcagaagaagggacattccaaagcctgacactaaatacaagacccaaaagaattattattccaagaatgaaaaatcacgatatgataagagtatggggggtacatatggttcttttaatttttaaagtatcagacaatatagatagacacattcaagattttgtccttacgtgcaatcagtgccacaagaaacaaggaggcgtccatctgtagatgcagctacaccttttacagctccttggtggccaggaaatttgcaaactgtttgcctttttaatacaacaaagcatttgcacgtaaattacatcaaattatgcccaaagtagcaacaaaagaacaattagaagaataaacaaaacccagtccatagtgccagtgtcataccttgtagctaaatcccaaagacgaatttctgcaaagatgagaaaacacatattactttagtcaaggatctcaagttactcaaggctaagatgtttaaatattattcaaaattctctgcacaacgataaaggacacagtatctaatttctaatgattctatcttttttatcagcttaaataaagaactaataaataaataaaattgttcactacatggcaaaattatattgttaatgtcagaaatcaacaacttctgtcctggcaaggagctagcacaatcacatattcacttttctaatatcatcttaccccagctagataaaatgtaggagaaacaatgtgatatcacaatcaaagttgaaagatgagggaaaagagaatcatcttcggtaaccaagacaatgttagtcctactgttcaaccatctttaacttgttcttaatttaacaaagctttctcagctgccaatcagagactaaaagcaataacattgtcattaaataatcaacatacctccatccattgagcccgaaaaaattcctttcaagtggttaggattcttggtcatgcacgaaacagcatccatgtgcccatccattgctccaataaacggcctcgcaaatatctttaggaaaaagaaaaaagagtaaaaacccccaacatgcccaagtataaaaaaataataatacataaaatcgccggtacaaattaccttctccaatttggcggcgttgagagcccgaacatactcgacagctttctcttggcttcgaatgttggggtcgaaattacggaataccctctaatcataatagcaaaaagttagaaaattttcagaaaagtagactaaatatatcgagtggataacaagacctcacctgaagatcttggcttcgttctcgagtgaattcgtctgtggaacgagagattactttgaccttcatagttggtgtagttgcgaacaatggtgaagcaagggatggtataaaccctactaagtacacagtttctgaagaagaaaataaggttgttgaacgagcgatggctgtgcgagagttagaggcgttcctccttttgctaaa

SEQ ID NO: 17942 - DNA, 6463 bp, Cannabis sativa
  modified_base (46)..(51): a, c, t, g, unknown or other
  modified_base (153)..(159): a, c, t, g, unknown or other
attttagtaaaaaagtctaatatggatgaaagttcagggagcatgnnnnnntacatgtcaaagttcaaggggcataattttgaagatgtcaaaagtttgggagcatggtttagtacataaacaatcagagtaatagtaaaattgaatgaaatnnnnnnnaagtccttaaatccaacaattttaatagttcaggtggtatttttaacgactttaaaagttcagggagcatgatttgatacatgtcaaagtttaggaggcatgatttgatacatgtcaaagttcagggggcgaaaattctaattagccaataatatattgaaagaactatgtgggggtccctggctctcaagtacaattttagtggtctgctttcttggaccagaaattttgtggaaagagttgactgaaggctagaaataaaaagccaaacattatctgtccaagaacttgcttagagaaaagagaaaagaatggcttgatcactcaaagaaacaaaagaagacaatctttatcacgaccgaaggtgttaacattggtaaaaaaataagagtctaatgctaccaagtaccaagccttaaagtattcttaactttcttttttcctgtatgcagagtctgagaggcaatttttgcatgcctttcatttaattcttagaagtgtaataattgaaagcttagcaaaatagtgtatggttttccatgagattacattggctttttttttttcaaaaaaaaacaaatgtatattttgggctcaactcaatcttttaatgtgtatacataacctttgtagggttcacgctattatgattaaggacagcaacaaggatcctgctcgccacccatgtgcttcattagccaagatcttaatcgaccaggtttgtatttttagagttttaaaagttgaagttctcaactaagatatatgtatcttcagtgacatgtgctaacaaaatatgacatttggaggatttcaggttgataggaaattggtgaaacagacagtgatgacttctgtatatggtgttacttatgtgggggctcgtgaacagataaagaaaagattagaggagaagggtgtcattactgatgatgagcaactgttcagtgcttcatgttatgccgctaaagtgagtaatccattaggcgttgttgttactgcagtaactgcctcaagctttaccttaattgttactggcctaaagttaactacagaaattgaatggattcatcatttggcaattcatagcaatgcatatgaattattatatgtatactgaaccaatttaccaggtcaagcttggtgttgggtatatgctgattgccaaagttaatatatttcttcttgttttgttttggtctttatttatttatttatttattcgttctctcttttcagttccatagtatacactattgcattattgtgtcattgggagttcatttctagcatttgaaaattttcttgtgtctttttttctcggtgttattctataacggtatttttttctaaatgctgtaacgtctgcacaggtgacattggcttcccttggagagatattccaagctgcccgagcagtaatgggctggcttggtgattgtgccaaggtatgaacacagactagactagagagtagatccggataccctttcccagacctagattttgaatgatcgatttgtgaacttgttgcaggtagttgcttcacaaaatcaacctgtccaatggaccacccctttaggacttcctgttgtgcaaccttactataaaaatgaacgacatctggtaagtgagaaagtttgtttgaacattagtatactagtactactatatctatatctatatctatatcaaaatttaactttgtcttaccagaaatttataatctacctaaagaaaattgttgggtagtgattgtgttttcttatcactatttataggtacttttagtaatttcagtacatagataaaatgtaattatttttaaagtgacggtgtataatatagttacaagggatctttgattttttcttttttcagaaaattcgggatgatttaggatgctgaaattatgattcaaatagctaattgtacacacgtttgttttaatattaattggcgtgggcaattagctatttcaattaagattttgggataatttcataaatacctgaaaataacaaaaaaattataaaaatacggttgtacggaaatttaaatatttttacggtttttaagattttatttataaaaaatgcaagctttttatgtttttatgttttcatgttatatttatgttatactcttgttattgtgttgttttgttgttagttttttgtttttatatattatttttatgttgtttttttgttattttcatgtggttttcttgtttttttataggacgctgtaaaaatgtcaaaaaaatttattggaacgtaaaagtgtaaattttttaacaataatagtattttgtgtaaattttgttaaaattttggcatcttaatatatgatgtgggaattaaaattttatgagaaatcccatgttctacattatatatcttgattatgaaaaaaaatacaattaaaacttattcatctcccaaaatatcaaaaatacctataggtggtgattacttttacctataggtagcaatcccttaagtagatagatttctttgtctgaaggctttgtttgagttttccagatcatgggatttttctctttctttttattttttatttgttttttgttttccttaccagctgtagttagtggaatttcctgtaactattgtctcctttgtgttgcaggtaaaaacatctttacagattttggctctgcagagagagggtagctctgtaagtttatatgaccatctctttcatttaatatgatgtgggcaatcttccattattgctaagcagcttcatttttattgtattcagatagatttgaggaaacagagatctgcatttcctccaaattttgttcactcactcgacggttcgcacatgatgatgactgctctcgcctgcagggatgctggcttatgttttgcaggtttgtgtctgtcaatttggacatggagattgtaaattcggttggtgtagaaaaagccttaaccgccttttatattttaagcgagtgtcttattaataataaaaaaaacatgttcctataatgtctcttgtaacttttcatagattagaaccacctattcagtgagccataattcctgttgaaaatcacaaaacctttctttttctctcttagttcccctctgtccaaagcttggagttgcgctattcacttttaatctgtgtacggtctgcagtgctaatgaattgtttcaacgaaatatgtagttattatcgtttacttgtgtctgttcctggaaattgttgaaactttgttcctgcttttctgctcttgattgagatgatttaaactttgaagtacaaacagttgttgaaatggaagcttaccttgtcaaatgacaattctctatctttgtttcaggggtgcacgactcgttctggactcatgcgtgtgatgtggaccaaatgaatcagatattgcgtcaacaatttgtggaactgtatagcatgccggtacttgagaatgtgagtctgttattaagtgtgagttaatgtttcaccattattagtatcaatttcatgcttcttctccactctcccaccctctttttccttctcccctatctaacttctgatgtatcattctctgcctgatgacagttgctagaaaacttccaaacttcgtatccagaattggattttcctcccattccagagagaggcagctttaacttgcaagaggttcttaattctccttacttcttcaactaatacttctaaggtatcagtacaatccttgtacagaagaaatttcattagtttcttttcttccactcgaaataattaagaatcaatgagcaaaatagttcatatagaagtggactgaagttgaaaagcagggagcaagaagctaaaactgatcctaaatgccatttaggacaggaaagtagaagctcttcaatcaatctgataattggtgatcgagtccaatgtttgtgatcacggtcttgacattggaggacaatacagattgagttgttctactgtgtacagtacagcagaagtaatgaaccctttactgaaagttcaatcctccatcattgagatgcatttttggtagcaagtattaagcgcggcagataccgagttctttcagagcttattttgtgagaagtgagaaaccatgtcaaggatgcaagtattattcatgcattcaagtgcattacatgtatgtttgtatattgttagtgaaagaggaaaatgtataaagagagttttacagtttgaacaataaatgagtagaatatagaaatagaaaaagtagtaacttcaattcttcataatcttatttgtgaaacttctatttaatttcagttttgtagaaattaatcttagttaaataaagccaagctttgaggatccaaagaagtaaagaaatgccaagtcaaaattctcttatcttatcttttgttcttgccaattggctgctatttgatggtagaggttaactctcctaatatgtagcaaaacatttttgaagtgtacatagcatagattttagaaatttacatgcgggcactctataatataaataaatactaaggtgtattttaatattaacttttctttttcttattttctcttttttttttgaaaatgttcttattttctcttagtatttcaaataacacgaaattattaattatactaatattattttgaattatgagtgcagaaagtcatccaatccaattacaactgatcgatttaatagaattggatatctgattataattggatcgaattgaatgtatattttgaaaatctaatcggatcgaatcggttattagatgggacatcctatccaatagataatcgaaccgaactgattcaattatcatctaatggtcatccaattatatttatatgtttttaaaatacatttattatgtttgtagcctttcgatcttgttgtcgaagcttagtagccggtcatggagctcttgccaagtattgccggttcttgcttcaatatgtgtaacaatagagatatattcaattcctaaacctgacaaaacattttatattaaatgtgccataggatatggatctccaactagaatgaggatatttgcccaattcttcttccaacgaagatattccaccattgtcattgctcctttcctagaagttcgaatgagagttcatgtatcattcatttttgcctttgagtgagctccatataagttttccagtgctttccatagctctgtagctgaggttgagcccataacctcggtggctattgtttctgacattgagctgtaaagtcatcccatgagtagttgatcgttgatgatccactcctcatattcagtatcgatttgagcttctcctttggctgtttcagcaaatagaaatctcaggggccatagagctttcagtagtgagcagaatatttccaatttcatctcattccttaacatgaatagaggtattaccattgtgtaacacatgaatcaaacaaacttttaaaaagacaaataacaagattctaatgtacaacttatacatttaagaagaaaaacaataagaatctaattttcctaataatacaaacattgaaaaaacaagtccttggaatgaagagcaaatatttatctcaattattttctttttctttttctagtgtaagctagttaataagttgaacctattctttaaatgaaacacatacatggatttatttgcaagtgaaacatattatataatagtagaatagtatacttatgatcacaccattattttgctttacaaaaatagtgacttagtacactacaaaattccaagacaaactgtctgccactgccatggaggcctatacttacagcatttcacaattcatacaaggcagtcttcctcaacatttctaagtatatatagagattgatacaaatagaaaaacaagttccaaacaccatcttcactgacagtaaagggtgactgtcttacagctgaattcgggagacttttgcagttctgaatgactagcaatcagcagatttctacagtcatcaaagctccttttaatgctcttccatactttgacactgttttccactgctgccaatctcctaaacatctggaaccactttgcagatcattaagctatcgataatacttgcggtccattctagcaaagtgagaattcaatgtctctttgaaggaatttgcaaaaccattcaacctgtaggatagtgataggagcaaagatcttaaaatggatattcagcctccttcattgaaaaatccaatccaagacaataagagaaatgaaatatagaatttcgaggaaccatat

SEQ ID NO: 17943 - DNA, 3064 bp, Cannabis sativa
ctttggcatcttctaacttctccactgcagtgtcaaaatttggaggggaggatgattccccgagctttttagcagtttctcccgactcctcctcgtgcaaggttgagtcagagttctcaagctgttgttctacttcaggctttaaagatgcttctaatgcttcgtacttggaaattatttgctgaagttcatcgtgaagatacaaagcttcgaatagcaatccttcatcgtcggtggttctttctatgattcctttaatcacaggctgagactccttgcacttttccagcatgctcagcgtaagttcttcctgcaatcatcgaagagtttctcttagcatcatattcttatcgaattaagctgaagaggctgaaaaagaaataccttcaagggttttggctcagtttcactattcaaaatagtcgacagcagttcaacactatttcgagttacaacaataaaatctttcgtctcttcaagtgatagatcccgaaagtgaaagggtaaagcaccaccatctgcatcatgcgatccagtgtcgggcactgggtatctatcagggggagataatggttgatgaacgtaagactctaagtcgtactgcatctctcgcgaatttccttcctgtgctattgaagttgctcctctttctttcaagttctgtcatataaacataacataaataagacattcaacatcttaaacctaattgaaacaggtctcatcataaagcaaagtaactagaaccagattaactcataagaaagtaggctgatatttgcaaaaaaaaatggaaaagactcatactttaaagtttaattcccaaaattatatatagggaactttttaagtaagatcatcatttttgccccctaaacgttcttatttccgttatctaaaagaattacatttcaatttttttcatataaattttgaataattaacagagtcaaaaataaagttcaaaatagtatgttgcctactgttgagaaacatgaaattccatcttaaaaccaattggtcaagagtaaagtagcccatgttcttacatatggctcaatatttttacatttaatccctgcagaacaatattctccaatatctacatatataaaaaaaagtataagtgtgtcaattgacagtttgaaatctatttttggtactgtaaaatattcagaaccataatgtacgctgtcatatggttatgtctaacatttataatttctctaagtaccaaaaacaagaaatgccctaagaattttcatatatgtagtatacatataaatgtcatctagcaaagttaatgacaatacttcatactagataataatcttttgtaccaaaaccaattgaacaagtgtaaagataagaaaacagcataccatgtaagtttgccgaaaaacaggaaggtaagcaagctcttcagactctccccaagccctaatcaactgcatagccctaaccctattcccattatcagattgtggatcatcaataagcctcatcatctcatccaacaccttctccgacgccacctccgacgaaaccttctcgcaattcacagtacaatcctccaacaaatccagactcagcctctgactaacaacatttctccctgaaagcttcctcttgatggctctaacaacctctgaaccactaaactcttcagaattgatcattgtacatatccttagattcataccataatttggatcctctaaagtctccaatgttgcctcatctaccatcattgattcaggagttggggtttgcataatttctttcattttctcacttaccattcgacccattttagctccactggcttttaatcgctcacccaattcacctaatttcaacttatccattttctcaccctaatttcactgaaaaaaaaaaataaagacaccatttttagctttctctcttactcaaaaactcgtgtttaaataaaaaattcaagaaattaaacggaaaatataaaatcaaacatgatatgtagcatacaattcgatctcaacatcaaaaataaaataaaatcatacaatgaaaagtgtactttcccgggaaaattggtgggaaaaaaacaccatttttagctttctctctagctcaaaaactcatttttagagaaaaccctaaaaattaaacggattatataacattatttgaagcacgatctcagtataaaaaaaaattataacataccaaatcatgcaatgaaaagttttttcccgggaaaattggtgggaaaagaaaatgagattgagataatatatgttatatacacacacctgaacttcgttgatgcttcgatttgaattcgaaaaaatacagagcttgaaatcaaagagaggagaggaagaagagagctttgagttgaatgagccttatttcagtctgaaaagccgagcgaaatgttgggaacggtcgagatgatgatacgtggcagtagcgtatgtaaatggacggttgagatttagtggtgagtgtgtatacgtggcggcatcctatgatagtggtgaatggtgattttgtgattctggtgggttccacggccaaaagttaatgcttaagagtggttgaccaattcggtcatattttgcttaataataaataattaaataattaattgttctaccaaaataataataattaattggggttaatttagaagagtatctaaattctaatggtgttttgataatattatttaattagttttttgtttttttaattaaaaaagtaaaatattttttaaaaaagaactgttaaaaggtgtcattggtatagtaatatttttagtgttacattgctattagtgtaattaagtatcgagtcttatataacttaagaaaatatttcttaaagaatatcctaactaatcataagatgtcacctagagaaggtgttggacaccaccggtacccaataacaatgctctttccaaaaacatgttgtttataaacgagttgacacaacacgactaatgtaacccgtttataagcatattttatttaaacatgttattcaataacacgtttatgaagtattcaacatgttt

SEQ ID NO: 17944 - DNA, 2565 bp, Cannabis sativa
tttttttttttttcaaaagaaaggaaattagatatttgaaatttaagatttatttattttaaaaaaaattatcaaaacaaatcgaattcagttattatttatcatttttaaaagataaatttactaattacttaattagtatttaaaggaagcataaaaataattaaaaaatagttattcctattcctatcctaatatttatttgtttgagacctatagtatatatatttagtttttgagggtttcattatttagttttaaatttcacacaaaggatagtacacttacagtagttggacttgtggagcatcagaatacgacgtcgtttcgttctaaacttcggcagttattctacgccttggttggtccatcagatctgtttggtaactaggaaaatcttccgatagaaaagaaaaccagaccttggactagaaattagcttcagtctcgatcatttagttcaaacggcatagaaagaaaatgtaagtgagccaatggaattttttattttttattttgaaaaatttattatttcattgaaatcgatccttgattgtctattttgtacccaaattcttttacgtcttcgtgtatgttgtatgtgccttaaactgtttctatgtgactataaatttcaattcaatgtatactgactgcaatgcaatgggtatgggttggtatatttttttttgttcaatgccttcatcatagtttagtatgtagtttttgtgtagaacagtatgtggtttgtgtttatttttcaggacccttttcttttgattaaatgagtttcattgttgataatctcatttaattcaatttaaaaaggaaagaggggatttttctgctggtgaaaagtttttttattgacaagtgactgtcattattgatattctatttgcatagattgtaattaaacccaaagaagcaattactaaccatagagatgttatgtttaactattttgtaatataaagaatcgaggggaagtgatttaaagaggaatgagaaggaactagaaattggtaaacttgtttcttgaataaaacagggaatgcattattttcattctggtccattacagaattgtaaacatgaccttagatatataggaccacctaaaggtaatataacttagtgtttgccaactttcttatgtgtttttttttttttgttttctttctcatgattagtgaggtggagataaaatggatgatagttgcgttgtttgtgcggaaacacttgaatgggttgcatatggacagtgtggccaccgagaggtctgctcaacctgtgtcattcgactccgttttgtctgtgaagatcgatgctgctgcctctgcaagagcaactgtggagtcattttcgtcaccaaggttagctagcgtgattgttctatttttgcttttgggggaattagatgtcataaaaactagaaattatttatgtttctattaggggtttcgaaaatccaattataatggctgaggagaaggttaagtaatgttggcaagtttgttttgtttgtgagtcactgataaacttattgcttcaaatattggtttttgattctctcttctactccctccctttcaattcatatttccttaaaaagttatccaggctttaggatattctactttgctcttatttctttaattcttgtaacaatgatccaggctttgggtgattatacaaaggtgataaaggactttacaaattttccatctgattcaagggagggtcaagttggggagtattggtatcatgaaggaacacaggcatattttgacgattttgatcattacaagatgataaaggccatgtgccggctttcatgtagtgtttgtgataaaataaatgaacaaaggagtcaaggatcgaagagcacaggggaatttcaaaatgttgaacagctgaaaagtcatttgtttcatcgacataaactgttcatgtgcactttgtgtttgggaagtaggaaggtgagttagatttcaatggtacagtcgttcttgtctttgttcatatgtttcttatcaagagcggtattttagtatctctgtacataataccaatatatattgtttgccaaaaaacaaagacaggtttattgcactggtgttctatgtatttgtttatattgatcattactgtatgtcatggacatctgctgagcttcttaccattttcttattatcaggaacattttattctggtatttgttttcatatgcatgcatatgtataatttgtatgtgagcaaattgatattgtactgtgatatctgatgttgaaattgtttaccaggttttcatatgtgagcaaaagttgtatactaaagcacaactaaatcagcatacaaggagtggcaactccgaggttgatggcagtgaaactgaaagaggtggatttatgggacatcccttttgtgaattttgccaaactcctttttatgaaaaaaatgaactttactctcatatgtcaaccgaacattacacttgccatatatgccaaaggtaactttattattactatttctctctggactttagtgtaggcttttttt

SEQ ID NO: 17945 - DNA, 7352 bp, Cannabis sativa
attaaaaatatactaaacttaatctaaaattaatactaaaaataacctaacagcttccaagcacaatattgaaaagtatcctgagaattttattcaactccatccaaaacgaggaatcaagtgctttcgaggaggaaacagatcaaccttgaggccaaaattaggacctaatgcctaggttgacctaatgctaggtcccatcacctaggttgacatgttgtcaacctgaaccatttccaacagcagttcagacaaagttttccgagaatattctcctttttcatcaacaattaagatatgggtactttcgagaaacaaatagagccatctagaagttaaaactgggacctaacacccaagttgacttggtgctaggcccgagcgcctaggttggcatatttttaacctgggccaattccaaacaattctcctaagaattttctaggaatattctctattttcaccaatatataatcgagatacaagtgtttttaggaattaaacggaagcatccggtgggcaaaaatgggacccagcgcctaggttgacttggtgcttgggcccagtgcccaggttgatattttatcaacaaaggctagttctaagtgttttcacaaaaaagtgttccgggcttcttttctgttttaaaaaataacaaggatagaagtaatcttggggagcaaacgagatcctttgggagccaaaatatggcccttacacccaaattgacatgggtgctagtgtaatgaccacatagttaaattatgagaattagcagataaatagaagatttaattattattttatgattatgtgcttcatagtaaaaagttatggcttattgtcagaaataggccttaagaaaatattttcttaattacaaagatatatttgaattatggatgcatgtaatatgtatgctatgtataaaattttattgtttttatgttttatgcccggtaacagtggaatgtgacgatttggctaatagagtcacttaaatgcggttgagtatcttagaattagcggggcatgatagttagacatttaagatgttaaaatttattcaatgttatggttttggactattttacccctagattatgaggttacttcttagtaaagtaaatgttagagttgtcttttggcttttattttattagtttgaaattagtgaaatttttaaataacactccaggttttatttgatagatacaagctaaataaaacaaatgtcaattaagatagactttaccacaaactaaaccaatctcttcattctctctctctctaagcttcggccgcctaacaaaaacacaaaggaaaatttgagttgttcatcacattcagagaaaattaagaggattcttagcaaggttttaaagtgttagcaagtggttatccaaggtaagcttttaaacctatcttctattatatttttcaatgtaaaagttaggtttaagtatgtgttttgggaattagtttctgtttgactttgggatatttaagggttgtttccaaagttggttttgagttgtatgagattgtttttgtgtagaatttctagccatggtattggttgaactaggttgagttttagagctcaaacttagctaaaaatggtggaatttgattcaggtccttattgttgcatttatttgatggattatgtttgttttagtcttatttgaagttctggacttttttggatggattgcaattgatttggtggagctttgaggttttgggccaattctgctatagaaacggcatgccatttttaggaaaatggtctaccatttttaggaaaatggtctaccatttttccaagcagaacccagaaagacgacatgtcgtttttatagaaacaacctgccttttttagggaattttttctgaaatcttgtttttgatgttttctcgatttttaaggtattgccacctatttatcgataggaaaacttttaatttcgagtttatgtctccaaaagtgagttagcgagtcacttaccagttttacttaaattgtgacttagggccttaaatcgtcgagtagtagtttctacttagagttacgagcacacttgcatttacaatcaaggtaagattagtataatagttgcatatatatacatgtttagcgttcatgttagtttccattagaataatatatcagggtatcagtgaggtattcatagagttgcacagaggtaccaacaaatatatgttaggcaaatcagtaagccatcagattagtatattagggtattagtgaggtgtacatagagttgcaccgagatgccaacagatatgtgctaggcttttagaaagtatggattggtgctatcacatcagtgcgacaagagtgctgagtataagctgatattatggtcaatcgtactaattaataacattcctgacctacttttagacctgtaggtaggtgtatgggtgcctggttacaggtcgattatatgtttatgttttatgcttttcttactgagtctgtcgactcataattattacgtgcatgtgcaggtatgagttagaactaaaccagaatgattttagagttggaggaagattacacatatcaagacgattagagctggagtgttcgggtcttcaggaaagtttagtctcacattttgttagtcgctgagcgataaattttgcataaaacatatctcaaaacaattgtaaacttttaacgggatcctgaaattatgtaaattatgtttatttccttaagtttatgtttatttaaaagtttaaattaatctcgttttttataaaccctttgattagcaaatgtgtgcacattaattaagaaaatattatagtgccttaactactagggtgttacagctgggccatgtgcccaggtagacatggatgctaggccttacgtccaaggtgatatacaatctggttcacatgtttccactcctagaacacaaattcggctctaggcatacttcttatcttggtcagaaactgaagagattttgtctgcaatctcgaatgccttagaagtatcaaaacaaatcctgagaagtcccccaaggagcacccagtgcccaagttgacatatggcttagttcgctggtttctgcttatctaattagaagtctacccaaagaactgaagaacactcgaagaactgataaagttgaaatactcagagctctcaagaagttataggcgtgtgaagtagtgaagaaaagtggagagaaattgaatgaaagctctcttatttatagtgatccaagtccctattcctaaagtaattaagagtcttttaaatgtttagtttaaaaggaaagatcaaagataagtaaaagataatcatcttttgtcttctcctttttaaacttaaatttcaaattccctattgaaagaggaataagaattcttaatttaaaagacactacaagtcctaattaatgcaattaggattcaagcaaattaaagataactgagaagtaaaagattatcatcaatgtttgaagttgacatgagggagaaatgttaaccaggaaacttaccctggtgacatggacatcaatgtttgacacatgaaaagaatgaaaacatcgagagttgagtagtcaggagtcatagcagtcgacttgggaggggtccttagccctactccctagttgactttaagaactctgaaatgagtgtttggatccagccaagttgtttccaactcactatattttattattatgtaccatgaagacatgaagtatctaagtctaaggcccaagaactgaaaatacaagaaacaacacctcagaagtcatctcgggcgcccagggtttcacctagtgcccaagttgacaacccaactagggtttcagtttttaggaccttttaagtgaaaatgggtcaaattttttattgggacatgaattaggcacatcacgaacatatttaaggcatcaaaattagattcagagaacttttgtttttgagcacctaaagcaccaggtgctcaggttgacattctgtcaacctgggccacttccaagcatcaaattgaataaatatcttgattttcttcgttttcataaaaaaaatgagaaaataagtactttcagggaagaaacataccaacttggaagacaaaaagggggcctagcgtgcaagtggacacttgcggctggcccagcgccccggttgaaattttttcaaccttggaaatttccaaggagtttttccaaaattctctaggcatattctttgtttttattaaagattaagatataagtgttttctagaatcaaacgaaaccatctggtggctttaaactggatccagcgcccaggttggcattttgttaacctgtgctattaatcatgtttccagaaaagtatcctgggagtttttcctgtcatcataaataacaaagatacaagtaaacttgtggagaaaatgagaatctatggggcaaaaaactgagcccaacgcccaggctgacttggtgctgggccaagtacccaagttgacaatcaacctggtgcgctagttttaatcatccaaatgaaaattattttctgagcattctctccataatggtcaaaaatggggtaggagacctcatcctaaattttaagaacattggaagtatcaaaatgacatcttgaaagctctagacagagtacccaccgcccaagttgacatgtgacctagtgcgttgggttcttcttattcgattctcattctgtctcgagcgtttgtttagtttttcgtagtaaaagagagttatgaactcagaaaattcaaattcacaacttcacattttcacttttttgggaaagtgacttaatcgtgaattagccagtttcgagtctcccgattcttcgaaacaacaacatatccgagaattggtaaacaactccacctgaacatgaaaaaagttaagtgatgtcaaatataacttaggcatcaaaaagtataccctaaacacgttttttccttggcccaatgtcttggttgacgtcctatgtcaatttgggcgttgacgctggtcctagaacaacctttaataatacaaccataactcactcaatattgatccgattgatgcgattcaacttgcatttcaaagctattttaatgatctatcaagttatgtgtcacactccaatgtcaattgtgaagttatcaagtccaaatttcgtccccaagagagctacaaatttaagccacaacttacccaaagtgggtcccgcagacgcgactcaagctttgaaaattgacgatcgacctcaggagtcaatttcaccgttagatcattatctatggtaaaaaatatgtgaagtataatttttcatattttttagaatattttattattattttaataggacatccctccctataaaatgagagctcctctagctcatttttcacatttagaaagtacccataaggtcaaaccgcattttttatgcagtgtggtacgatgcaggcaatttttgcggtgtgatttttacagttttaagattttgtggtgcgattgcagtttcaaaaattacaaaaaccacatatgcggtttggtttgaaaaaaaaggttaccacccgcaccgcgaatactcctaatttttatattgggcatgttaaaaataataacaactcacccaatcaacttgaactaacccgaccaacccaattaagagggttatatatattatttatatttttattatatacatatatatttagatataatataatttatatacatgtttaaaaatatataaagttaaaaaatactatgtttgttttacgatagttaatttaaactttaatcttatgctgtgactaaaaagttcatgactaaaaataatagttacaaaaattataatttattgtgactaaatatatttttagttacaataagtatattgtgtctaaaactaaattagttacaatttgaatctaattattatgttttagtcacaagtaattttttattgtgattttagtcacaaaaaattatgttgtgactaaaaaattatcacgaaaattaattttttttgtaatgtaataatttttatggaatatcgttaatctaattaatcataagatgtcacttttgagtagtgcatgcagtcttacaaaaaatactgtaaatctcttatttttttttttttaatatttgattgtggaaactcatttgcaattataaactaattgtgcaatgtgacaatcggtaccaactcccaatatattaagtagataaataatttgtattaatgttattgtagtaaaacatctgaaatggaaacatgattagtaattgagggtgcatacatatatagttgtatatttgtgtgttttgttttggtagcatcaccaggccaactcagtattagttattcaactaatcaatcactaaacattagtattaaatagagagaggaccgataagttgggtgacccaaaaattagttagcgttggaagtagcagtgtcatttaagaatgaaattatgttaaatgaaaattaaaatcgatgcattggaatgcgtacgtagtgtagttgcggaatagtagaggcctctctgcgtcggcgtcaagaatccgttgttctcctttgaggcctactaataatactctctctctctctacttaattaggttaatgcccttcataatgagccacttattattaatggtctcctcggtgctcaatgaaatgtgaacactgcttagtgcttacttactatacgtacctagataatagagcattgtttgttattgggcacaatagtgcctagcaccttcaagacgtgtcattttgtaattgtataacgatactccttaaaagctattatattaaattatatgagactcgatacttagttagactaataacactattaacgtacgagagtactagacacctctaaacccttttagcatttctcttaataataatatagagaaatgctaaaaaaaaaatctaacatttattacggtgtgatattactatcgatgtgcaattaaatatattaagtttcatataacttaataataacttttatgatattgttaacgaatcgtaaaactctacttgtagatggtgcgctacgtactaatatctaataacagtgttcataataataattaattacacatgacacaaaatatgcacaatgcacacatatatacatatatttgtactaggtttatgtttcgtgtaatgcacgcataattaattttttttaattaggttcaattaagtgatattaaatgcaataaatgtatgtttatttttttttaattaagtaatgtatttatttttttttaatttttgaaatagaatttatgattttgat

SEQ ID NO: 17946 - DNA, 4743 bp, Cannabis sativa
atatcatcctcattcctattcttcagtctggtatttgattattctatttcatttcattacttctaaccaaatacgtcataaataagtgtgttatgagttttcgaaacatacatcttggtcgtactcggctatatcatccatgacacctttaaaccattcaaaggatccttgttcccttgtaacccaatagaagtaagctcttttaggacattttttacttgaatctagtgaaataccacctggtgatgatccctgcattagagtaattcaaacattttcaagtcaaataccatatttccaacataacaagatactatatctgattgattagcctttcatgactcacatattctggatcatttgtcctaatgttgttcaaaagatctttaagaatgctgatgaaaggcgtcgctccgattccaagacctatgagcaagagaatgtcatacttcttgaaattctgagctggtgctccataaggtcccttgatgaggatttttgggtacctaacataagaaaaagtggacatgtttggtaaggtaccatatagaaaaaatggacaagtttagtatgagtgtttttagtctgagaatcttggtgctcactctggttgtggacatttgtagtctgagattgctttggtctccattcgaacgaggtttcctctccttgcttgcgtattttctggttgacatgcctgcatttcattaagatggtgtttgattaagtggaatgaaataagaataagaacaagaatggtaattaatggacttgtttgactgttacaatttttttcttaactattgaaatgattggattcaagaacttccgttaaattttactaacagatgcttaacatgacgattgtcctttagtagaattgaacataagttcttaaattcaacaatctcaatagtttgggaaagtttttaatagcatgaaaaattcgagtggaataaaccataattagcttaaaaatattcctactttattcttcttttggaaaggataacaaattcttattccactaaatactagagcactcattcctttccaatgtataatatgcaaaaaccaaacaaatgaatcttatatgtttaagaatggtgattccattccaattcacattcaactcaaccaaacattatcttgaggtatattccaaacaaataatctgatttagggaataacaaaacttaatatggatatatcacctgtgcaaatctgtttttaagctctgtagtccaatctcctaatgtccttatatggacactcaagtagtcatctccaggagcagaggtaatggagaaaggatgcctgaaaataccatttctctgagttaaatttagttcatgacatgataatcaatttttctagacatatatataatttatgtaccattcaaaacttgatatatctggacacttgacaaaaaggtacatcccacttttgtacttgaatcctggaggtttgctcatgtataaagctagtacattccctgtgtatattattgcctgcaatgttcaaggaatacatctgaggagataaatttgatgaaaaacttcataagtagacaaatcacaatgaaaaagagcattgttattatgaggtgaaagtgaaactctatgagtagcggttttatataatcattattaaagtaaaataagtaagactcgatattgaattacacctgtagctgtatgaaaccttatggtggtgctatgatgattctactgaccttaataacgtttactcggtggttgctttcgtcgatgattgaataagtcctttcggttgcatagaataagaccgggaccatgatatacatccatgtctgcacacacacataataatttcatcatcatttcaagtgttgtttatgaataatatactcgtttagtaccttgtgttttaacaaaatataaaattaattacagggtatcagataagtattatcgagaatataaaatacataccgtcttcttgtgccaatcatgagtgagatatagaaagtagccatgtatgataaggagtacatacacaagaaccagcaaatgatgtgcataccagaaggaattgaagccagccaaatggtggaattgccatggcaatttgatgacacttctcctaaatgagtgtgttgctagagtaaaggaaaaggccattagaaggatcattagaatcccagttatgcctggaatacttttgagtaaatccaagtatgttggctgattaaagttgaaatcttgtcccaaaattttcataaacttttgtttgggacatgaaatcagtcttggaaaatcacaggtcaaatgcattatgacatgtacaaatgtcattgaagctattgcaagtgcaatcaatttgtggaaattgatgttatcatcaaaaggaaataatttactaagaaatgatgatcttagttttgtgagagttctcctacaaactgggacaagaatgagagccatattgaacttgagagtctcagcagcccctttggcaaggcaaagacatctacccatgatttgataagctcctttgttcttgtattgatagtatttccaaacgaagaggacaaggtttatggttaaccacaaaccaataacccaaattctcttccaattttcatagatgagttcctcagttgtggacaagaacttgctcaatggtgttctgtatcttctgggaatcatggctcttgtgagagtttgagttttcttcgaaagtttgctagtctcttcggggttcgagttcaccattcccctgagtagagtttctagctgccacatctgtcaaaaattggaaacaacatactgagaaagatgaatcgaaaaaaaaaatgaaaaaactaacacagactcgatacttaataacatcaatatgatacatgaacaacgattcacctcgatataaccaagatggtcaggatcaagctcttccatgatcaaagatgcatatgctgatgcttgttgtttaagattagccaacttgtttgcagaagcacttaaaactataacctgtattttttttttttaacaaaattaagaattcagacacatgaacataaaatataacaaaatggcaaacaaaacaacagaagagaaaaagaacaatacttttggttctttgctctcacctccttaacctcttcttctgaaagcttcccatctccattcttatcacacctaataataatttccaccatatttcactctttagatcaaaaacaaaaacaatagaaaagagagagagagagaaagagagtaagaatgctcacatgtcaaagaatatctgtaatctggattcaaggtcttgattagtcatatcttcccaaaattttcttaaaacatcttcatttatcccatcttttgcagaaatactcctacgcctagccaaagtatcaaataactctcctgcaaaatcctttgaatctcctcccattcctacaaaaaaacaaaaccccattttccaaaatctctcaaactccataacccataaacatacatacatatacatacctatacaaacataaaaattcaaactttacctatacagacaccaaatttgtctcgacagagtttcccattaacttggtgctgataaaatcgcttctcaatcgatctccaagcatcattttccttcccagtaacagttctatcaagaaaacgaagacttttaaggcctcttgaagctccagaagccattcttccgatctttggtggcttactctgtccaacattcttcttcttcccagagctattattaatcttggtcaaacaaatcccatttgagcattggggtggtgtggctgtggcctctgattggtcagagggaaaatcacccatttggtcaatttcaattctctcaagaatccattttgttgattcatctttgctcactttttcagatattattattaatgttgttgttattgttgttgttcattacaacaccaccctctgtttttcaaactctataaagctctgtttttcttccacaaaaaatgtaaagatcgaagcttttggatctttggttaatgaaattaagagaaaaaagtttagatgaaatggtcaaactggtgtcgaaggagggaaagagttatataatgaaggctcacacaggctttgtctattgtgtctttaatctaataatagcaaaaacgacagtagaaactgcaaaacgacactaaaaaactgtaaaacgacgagagtatgttgttatgtgattggtttactataagatcgcgaccagtgtaggtgctgaaacttatatatatataatattgtaaaattacaactaaacacgtaaaaagaattaatatatgataataataaaatgaacgtggctgcagtgaactgaataatttgattaaaaaatgatctcatatctcaaaaaaaaaaaaaaaaataagaataaatagaaaatttcccacttgtgctttgtggtgttttcatttgaagctgttctcttttattttaaagtagatctaatctacccaataaaaataaaaggctgatttttttttccatgcaaaaatagaaggcagtgattaatgctacatacttttttttttcatcattatttttaaataattaattagaattttttgcctatagtagtctttaacttttgtgggggccagggcaaggctttaaaaattggcatttaaaataaaattcaaataagtttttaaactgtttttctgaaaaaaaaaaaaaaacttcaatggactaatgttaaaaa

SEQ ID NO: 17947 - DNA, 5546 bp, Cannabis sativa
tttagtattttgaatctcattttaaggaattgaagaaagaaaaactatttgctcacttggggtcgacacagtgcacggccttcttcatttaaagaactaagaaaacgctcttccaagccggtgctcttcatggtttgaaagatcttaccacaaaattttcgtatatcagccctcctcgactgcttttcgggcttatttgttgccaagacctctatcaagtgacacaggctagggagatggctgctccaaattttgggcaatgcatctgtgttgttggctggaccaagtgacttggatatttccattactaaatcaagcgcttcaatccttcgatagtcggatttcgtattgccacatttctccaagaggaaacccaacacttgacgtccaatccatggccttctgcggaatatgtctttcaaaaattctgacttgatttgtgactttttactatcgaaatattctaccaaaacgcgctggaaaatatcaataaccccttgcaacttagcctctggaagatttttcccatcaatgatcttgagtatccagaaagtcgagttctgtgcaagcgaagcaatcatcttctgtcggttccaagacgctgattgcttcttattagcaagtttctttttcttaattggcttcgacgccaacttcaaattcttttgcaacaaagactcgagagcaggtagttgcacttcttcacccttcgggtgctccttcgctttaaatatcttcttttgtagaattccccatatgcgttgccgaagctgttcgctactttctgcggttggtggactaacaagtgctcgtgctaagttggaatacaccaagagaacttgtgggctacctgtttattaagaaaaccacagtaacaaatgagaaggaaaattctgtaaattacagacataatgatcagccaatccatttttatatcggaacataatcatctaaaatccaagctacatatgcatattccattattttgtgtaatagtttgtctgtttagaagtcagagcttacccgggttttcatgcaagtaaatttccagcagcgaaagtacacgaagtttgaaaagaacgagctgatactgagcagtttcgctcccagcctgagcctttcgctctttaaagatctgagcaaggtatgtgtccattcggaacatagcatcatcatccattcctccatcagaatcatccgaagcagcagaaacatcattgtgaacttcctcgagcccccctacagcctctgagtcatctgtctgctcctcactttcaccggtttcagctgtctcagcattatcgatcacctcatcctcatcttcaatattcagaaaatcttcgtcatcttcatcctcatcaacatcatcatcgctctcagcaacttgatgcctagcaggttttagtgttttcttaattactcgtaacatttgcagaagaccatcatccgtgatatcatcacagaaatgtttgaaaacctgaaaaggcaaatgaatgtcagattacagtaaagggtaatctgtttttccaattataatcaactactcatgagacaaagctgaaaatcctagtgcatcgaaatctgacctgctcaatagcagtccgcataggagccgatgactgtggcaacaatgaaagcaatgtatctacaagaacatccattactgcaggtgcagcatcatcatcgttgtcctcttccccagaagattcaagaatatcaggagttggaaaagccttcttacaacatataattaattcagtggcagcgtctgaaaactctcttggccgtaggagaatttgcaaaagcaattggatgagcaagtaccttattgcatgcaatctgttcgcctcgttgctaatcccgctattcctctcctgccatcataaacaaatttgttagcactaggacatgattatcgaaatattcagtgacagtcaagtgaatcataagtaaggagtacaaaataacagaggcctgcattggctgcggatctaaataaaagtacctctcttgagagtgaagtttctgtctttatcaatttcttaattacactttcttcttcatcttccaatggtcgaaatacagaaattgatggaatattccgtaaagtacttagaaaacgcatgaaatatgaaccaaggtcatttggctcaacaccgtttatcttagcacgtgagccttcacccttttgagcatttgccaatagcaactgaagttgttcgatacacatcttgcaaagagcactggaagtggctactttcggccattcaaacttctcttctagctcaaatgatgttacttgagtgccaagagatgcagtaaacacaccctgaacagctagaaacttcattatctctttttgaacacggaacttggcttcattatcaagcttcgaattcttcaatacactaggtaatgattcaacaatccaagttttcaaaaaatctgaatttcccaaagccccaagtgattctttgtcttcaactgaacccatctctgaattgtcatcagttgtttgactctgatccgaaggttcctcagaaggatgactttcatctacaaacatgccctttaagttcttaataaacagtatgcagccagattctgtatcgaagtcagccataaattccttaaccgtttttgttcgtgtaacagagtcaaattttccattgctgtgtttttgtagagcaacaattacagcaacctttttgacatcatcatgcttaacccaattcgatatttctttaagaaaatgttcagcaactttgtaaagccacgagtccttggtggccagtacgtccatcaggcactggacaagtttgtatgacaaaacaagcggtacaaaagacgcaggcaaccttggcaatagtagaagaagaacatcaaatgccaagtgcttacggtcatgagatgacagaagaagagatccttcaataatcacttcgatgaagcactgcaagttctttacaatttcttcttcagaagagctagattttcgacttttcttgtgcttcttcatagaacttgaaagagacactacatccccagcttgcaaaagactttcgggtaaaagaagatttaccagaacaggccacacactatgaactctaggctggcaaaaggttgattcctgacatatttaaagaaaataatcacttctttacttcgagaacttattgaaagccacacgtctagcatgtgaaaaaacgtaaatgtgtagaatacaaatttaccttcaaacaagtagcaagcagcgacagatggtcggcagaaaaaagttcgtttgcacagaatggatttggcagaagtttaccaaacattgcactatcagcagaagttttttcatggagtttcaaagccagaagcaaggcatcaggatttccaacttctgtagctcccgcaaaccactcactaagtcctggtgcttctaacacatgttttaatacagcttccgtgggcaactgcaataggacgaaaaatcgaatcaatgaaaaaggaatgcactgtcatactcgaaccaatttccccccttattctttatctttaatataaaataataagttcatacattaagtagaaagactaggccgctaatgcatttacaagtactaatacaaattttactcatcaagtcattcataccatttcaaccaaatctaaaataaccgacacagcaggctcttgcaagtatcgcttcttgactgcaagggcaattacgagactggtaaattcctttatgtaaggagtatcccgattagaattccattcctcaacaagtctcctagaccgggcaagagaaccataagcaaataaacgacccaaaagagactctctagcttcctgcaatgtcataaaccataagaaaagaaagctatagaaacataaagaaagataagataaagaatgcaaaacaattaattcaaacatatcaagcatacctgacccttcattgaagaagtaacttctaacaaatcggttatgagtttcagcagagagtccactttaatgctgggtatgctgcctattaccattgtcaaacctaatgcaaaaccttgtcttgcacactgcaagaacaatacatgtgagaaattagtcagtattaatatgccttctaatttctacaataataaaaaattcaaatcatcagataatcctgttaaaagtttttcactgaaaaaatgttattaaccaaactaacaccttaagagatataacaaaaaagtatcaaactttatgagttataataagcatgatgacaagattagctaattaaactaaaaatatactaccaacccttccataaaccttcaaaagtcttataagcaaataccaatgaaatatatgtaaattaaacaatgacaccacacaaaatgaatgaaagataatcagttctttaataatcataaccaaacataacacaacacatcaaacagaggaatgataaaagaaattcacaacaacacacattacctctctggatgaagaaacaccacgaatgagcctcctaatggcatatctcaaagagggtgcacactgattcaagccatcatctttctcagcttccaacttcaacccactttcaataacatccttagtctcaagtctatcatatactttctgaacatgctccaactcagttaccaatgcttccacagctgcttctctcaaagaagcatcagaacaagacaaatccttaaaaacaccaatgtgaaactcaggcaaaacaccaacagatgatgatgactcctccacattagaagaagccttaacttgaacaacctccgtttttttgggcttaacttgttcattctcagaaaggtgcctcactttatccaaagcttttctctttttcctcctctccataggcttaaccgtattcacaacaacaccagcagcagcagaagaagaagaataaggagactcatcatcattatcatcaccatcaccatcacccttttcaatcttcttcttcttcttggtcttctttttcaatttatcactcgaaacaacctcattaatgggtgtatctaattgacccaattcagtttcgacttccattgattcagaacttctctttttaccactacccattaaagcttaaggtgaaaaaacaagaaaaagaagctgcaaaaccaaatcagacaaaaaccattaacttagaaaccagtttgaggaaaaccctagtgaaaatttgcagagaataataatatttgtgagtcctgaccttgaatggagggtagagcggtggtggggttatacaaaggtttaagctttagaaagaatgttgggggcggccgaaactggagtggagaagggcagcgtttggttttggtgagagagagagtatgttttactcatatgggcctatttcttgggtcatcgggtcgggtttttttttgttttatgtattaaggctttttttattgtataaaacttttagggcatcatcacttctcttcccattttaggtttttagcattttcacaagggaaatttttatatttatggtttttttttttggtactaatatttttgtaaaaaaaaaa

SEQ ID NO: 17948 - DNA, 6384 bp, Cannabis sativa
ttttcagatgctctgtgcagcgagacggcatcgtgttgcttggcacttgatatggcaaagctcaaaggttacaagtttatcattatggagagtgattctagggtagtgattaattctctcaattgaaaggccttttgttggaagattgagaactattcttccttttgttataggttttttacttataacaaacatattttgtaatgactgtaaggtataatttatgtttcaatgaatgcttttaacttcttttttttttaaaaaaaatgatcacaagagagagaaccatagagaggtttttttttttttttttaattatttattttttatagaacaattgggagaaatttcattatgaaaaaaaaacataaatatgaacaaaaataaattatgatttttcttataaaatctttatttaaatgaacaaataaattaaaaaataaaaaaataaaaaaagaagggagaatgagatatagaatacatatgattaccaggtaggtgtgtgtaaacggtgagttgttttcgggactcaacgcgccccttagacgccacctctcctccgccctaaacttctcaatgtacggtggtcaatccaagctcggtaggggcggcgccggcgctggaagaggtgccggagctaagcgacttagttcgtcctttcctattcctccccctcaccgctcttcctcagctgggtccggacgcctctcactcggtggctccgcctcagcttccaatccccgaaaccgcgcgtccggaacaatttctccggcaccggccgttgaagagtcatttagtttagtggcgggcaataacccgcctgcttttgccatgatcattagactggcgcccgaattggtcgatgagatcaggcgtgtcgaagcccaaggtgggaaccctcgtatcaaattcggcaccttagccaataatccccacggaaatgtgagttctttttttcttttctttttttgagttgttggaattcaatttcaaataggtgttgatttggaatttcaaatttttttgccatgttttgtggtttgtaactatgtgtgtataactttcctgttttcatggttagttcttaattggccgttgcttacaatgttttgtatggggaacagtgtagtttcattcaattcatacgttacttagtgctattccatggctatgtctgttatgtctctatattagttttgtgttttgggtctttgaactgttcaatgggtactgtactatttcttttagaaaatatgtcactgtagcaattgtcatgttggtaccagtgacagacgtttattacaattctgttaggattgaagtttatttttcatgatgctccttattacatcaggctattgatgttggtgggaaggagtttaggtttacgtggtcaacagaagaaggtgataaatgtgatatttatgaagaaaggcaaagtggggaagatggaaacggtttgcttgttgaatctggggcagcatggcgcaaagtaaatgtaattcgatctttggatgagtccactgcaaaccatgttaaaatgcgttcggaggaagctgaacgaaagcataaatcacgcaagtatgtcgagattgttatgaatatgtagcatactctttatatttttttgttattgtgttgtaggtctggaatacttaatttttactttttgaaattgtcatgaatacagaaccctcatcttagaccatgggaacccatctatgaagagccaaataaagaagttagctgctgctgagagtaagtttttatctttgggcgcgaattaacaagatttattattgtgattgaagtgttggatgtcttcttgtcctcttcatatgtactaaaagattgttgcaataatagtgacatttattttcctagaattgctgattttatgtagtccacttgaagattctttcctattgttcttgaactaattttttattatcaaattatggttgatctatgttaaaaactctggtgtctttttttttttcttactctttcctctagctaccccgtggaagcaattcaaacagaagaaagagcttccatctaagaaaaggaaaattgatccacctccaggtcagtgattttcagttccaatggtattttttgatgggcctaggtttaaaatggtatgtaggtatctgggcagtgtgcacactgtcctagttttatttagaactcactcttagctatagttgccactacggataatggatgttgtatgctttttagcccataacatatcatgtagttgttaccactagcaataatgaactttcttctaatgtaatttattgtataaattaatatgcggggttgcatcacttgcagctggaggtcctcctaaatctctgtacaaacatgggatatcatcgacaactactatcaagggaaggccctcatcatctccagttccatctcccccagagcaatctggtcctgctgtatctccattaagaactgtaaatatttccaaaagtcaaacaagtgtagatgttatacccaatcaagtgactggtaaagacaaagctgttgttaactctgacaaggaactcccagccagggctaacaatgtaacaggggaaacagtgggtcgtaaatctaattcggtggatttgcagagtatactgattaatttgctaatggataatccaaaggggatgagcttgaaggctggcagaagaattacctttcttttgtacttgtttaatactactaaaaataagttgtccaatcttaagcttttttattttttaaagattaacttctgctttccttgttgattctcaaataactttcttaaatctttctttttctatcttatccgtaggctttagagaaggctgttggggattcagttccagcctcattaaggcaaattgaagccattatgaagaaagtaagtgaataatctcacttgttattgactttttgaaataaaaacaggtggtcttatgttttcattttcatcttgacattagattgcaactttccaatctcctggaaaatatctcttgaaaccaggagtggagacagaaagctccaataaacgtttgtctgttaatggaaggtatctcacttttcttcatgtctctcttatggtttcttcacttatgagttgatttattttctgcatcaaagaattaaaaaaggtaaaaagagagtatcaaacagaaatatccatcaccacacacacagtattatccatttgctgcacagtggtagctacaaattttttgggttgtgttgtctgggacgtgtctaatactggggaggagattagttggagaatggtagtttgtactgtttattgccatagtacttccgcatgatttatctgctcccttacttcttctctaggtgcttataataatttactctgttctgcagtctctttcaactccttggctagttggtacatatttactctaattctgaacaatttgggttctcatatttttgatattctattgtgttagcaccatactattttatctagaaatcggggcaccctcctgggatgtaatataaagaaagaaaaaagttctgctgaacagctttctcttctaataccttcctgggatgtaatataaagaaagaaaattgtttttaattttcctttagatagagtttttccacgcactttgtacattcattaaatctgcttttataaagttaattaagtgtctattatctgaatctacttaatgttccagttctcctaatgagaaccttcatcaaatacctgctcctgaagacaagcataatcagacgctggcttcagaattggattttaaagacaaagtcccatctcaggaatttgatgagcaaggacaattaaactgtaagcttggagaagagcctaatgagttagaaaaaattgatattgaacagcaatcacctgatctttttggtgaaaaaaaggtctctgacaatgaagggcatgtaggcagttctagtgatagtggaagtgacagtgatagtgaaagtgacagcagtgacagtggaagtgatagcgggagccccagcagaagcagaagcaaaagtaaaagcccaattggcagcgggagtgggagtagtagtgatagcgatagcgatgcatcttccaacagtaaggagggttctgatgaggatgtggacattatgagtgatgatgacaaagaacccaagaataaattgcaatctgaatctgtattatctggatcgctcattacatggagaagtcctgatggcaatcctatgcagggtggtaatgatgagaaacaagatggtcatgaaccagaggctgccgagatagagaaagatgggcctgatggaaaacaggaaactgaaatagatgtaattggtatgtctgctcccgaatattctgagatacctgtagaaaaatctaatagcttttcacctgatcatgataaactacaagagcatcaaaattttacaggaagtttgtttgatggagttgacaatattgttaaggatagacctaggtatgaacgatctgatagctctgagaaaatgtctaagggaaaatacaaacggggtgtggaggtaaaatcagacaacaagtttgagaggggaaaaaggttgaaaacagaaaactcattcgagcctcctgtttctggtagtagagatgtccactacgatgagagtgtacacagattgccttctaacaaacttatggaagaccctaatagggaagccatcattctagcggttaatggaggtgagagggatgtgaatggtgaactgacttcacacaaagtaaatgatcgaacattttctggaaaatctagtgcagattttcagcaatcaaataggaggtcatttgaacaaggtggaccagcaaaggctcccgattcagcagagagacctcataattatgctgaaagcatgtcggtcgtcgtccgtaaacattctcatgtccatgaagattccccttcacagaagtctaaatttcacaaggatgctcaatacgaggatggtttcattattgagaaaaatatcttaaaaaatttgaaggaaagtggtgtgggtggaaaactgtcagtgcccttggattctcatcataggaaacacagtggtggagttgggaagtttaaggatggtggacaggtttctggctcatttttgggtacttcaccaaacaataacagaacagttgctgagcaatcccctgctgttaatgggcgaggcagtaggctccaaagagagcattcagaattggagctaggtgaacttcgtgagccccttcctgaggtaatacctgctaaaaggcagtttgatagaaaaaactcgtttaaacagtcagataataaactaagcagttcagactactggaactcagatagtaaagggaagcctgcaggaaagggaactttagttttgcgaaaatcatcttcgcctgacctgaatcccaaggctccgagcaatttggatatctcacataaaaagaggaaccgtgaagaccgtgctgaagattcagtgcggtctcaacagagggttgcacaatctcagctgcagcaccattcaagagtagataatgttgaatttcctcagtccaacaaagtagagacgaatggtaattctcgacaaaatgatggagtgaaacttgggaataatctggaaggctgcggagagagtaataagaaaacacctggtactcagcagtttgataccagacgtgggggaccagtttcccactccataagaggaaggaaaaaaggcacatcaaatacagtggcagaattaactgatggacgaactgagtcaattttgggagatggcaataacagtgaacgtaagagaagagattcctcgtcagatgaaaatagttgttcttactctaagtatgaaaaagatcaaccagatctcaaggggccaataaaagattactctcagtaagtagatgcactagtagagcttttgtgtcaattaatcctttctagccttgaataacactgtccccacacttttttgggtgggcctctgttatgttttacggcttgttttgttgatttaagtgtgttatttttaactcttctttttcccccgctgttagatacaaggagtatgtgcaggagtatcatgacaaatatgattcatactgctccctgaataagatcctagagagttacaggtttgctaaggaaacataattaaatgaacttattcaagtgtgtagttgcttatatttttaactcttcatctttcatgtgtttaaaagtatacatacacctttttgaatgcaggaaagactttgatcaacttggaaaggaccttgagtatgctaagggaagggacatggagaaatattatagcatcttggagcaactgaaagattcatatcgccagtgcggcatggtatgcttgtct

SEQ ID NO: 17949 - DNA, 7770 bp, Cannabis sativa
ttttttttttttttttaaatgagtggctgagttagatcatcttattaatgttttgtaaagagtgaaactcgtgtaaggatatccaaggtctcaaatacttggaaatgttttttgtattatgctctttgatattaattctagttatttgatttacgacaagaatatggaaggatgagcccagtctcagggtactcagaaaaaaaacagtggggtataggcaggtgggttatattgatttggaggcttcctacagacaccaaagaaagcaaaagagagaacagacaggaacaatagagttttcaagagccaagaaaaactaactaaagtgatcaagggaaaagattatttcaaattccaatacacagcaagtggctatttaattacacgtaccacttcgagcacagccagatggattagacggtggggtgaagtctgaacatttttgagcagtccgtgcaatgcgttcatccacagctgatcgatcattagatggctgcttatgcctcttacaaaaagaaagaagacgaatacactgatcttcttcatcatcctcaaaagagagtaggtgaagtctgtcttcatcctcaagctatgaggagatagaatgtataattaaaggcaaatccaacaaatgccggaataacagaaatgcatacaaatcaactctataggcacaaaacttatgtggaaagatacctcaacgcaaagaccggcagctcgtgcacaaaggggatgatatgccacacgacaactattgtttgaacactgaaaacaacataaattgaatgaaatataataatataataataagagttccttcagggtatgatcgaagtaattcaagggaaaccatattggaataggcaataataataaaattaaaaaatgcaattaagtaaggaaggagcgtacttgaatacaggccccataagaaacaccacaaatgctgcataacagcttccaacgatcctatttaaataacagtagaaaaattaattaaacaagaaagacactaatttaacacaacataccaagcaaacaaatgaaaaaccattgtagttgcgataaactcaaaccagctcaaagagaagaggttagagagtaagtaatctataaagagaagataataatgcggtatgtgctagtgctagacatttggaccaacagaatcatggagaaaaaacaaaaaatggtttggcttattgccctcctgtccatagttctataagtatctttatcgtttgttttttatttaataaatctaatttaattatgtcctctttctttgtgaaagtgtttgagtagttattatgtccatagtcgaatctattatacataggttaggatgtgaaattcgtattatatttcagctgatcctcaataattcaaagcttctaatcacacagcagcatagaaaagaaaaatcctcgacatccttactcttgcaaaaaaaaaacacccagtgtttaaccttaacccaggtaaggtccaaatcttcttctaaatcgtttaaaattctacagtactcaatttccttttttttttatggaacctacaatattcaattactgatgtattagttggatatacttaatactaacatttaccatttagttttaaaaaaaaaatggcaaattaaaaatacactaattttatcttttctttttaaattttcatttatttaaaaaaaaaaatcatttattatatatgttaaacataatattacattaaacactatattattttccaaaaatacactaatttgtagtgtatgctttcccaaaaaatacactataaatttcatattttgttaaacataatattatattaaatactatattattatctttttaagggtttgtactcatttggtactctgtgttttatttaaatacaagtttgatgcctattattttcaataatactcatcgggtggtacctgtatttggaaatcatacatgcttggtaccctgaactcatatgtgatcaataaaattttaccattacaatcaattatctaagttctaaattcaaatttaaatatttaattacttatagctgagggcagtttggttaaactgataaaagtttattgatcaaatatgacttcagggtatccaatatgtacaatttcaaaatacaagctactagatgaacattattaaaaatactgggtaataaacctatttttcaagaatacagagtacagagaagtatattccctctttttaatataaaatatcttcttccataaagatttattttcaaaataaaaaaaaaaatccataatagtacctataggaaatgattagaaaaatcagaccccataatatttctacatacatatatataaacactttaagcagtaatagattacaaacacaaaggaactgtaaataccttgctgatcctttttaatccatcaattggttgcatccgcttgacatccgataaacaagtttctgaaggatttcaagagtattaaaaagaaaaagaatgtttactcttaaaacagccaaaaacatagtgaagttacaaacctggaatccatatggcacaagccagatgagcccagcgcccatcagtagtaggcttcattgcaccccctatagaaaaatcaaataaagtattttaattatgtcctaagcctctactcaaataaaaaccttcataatttctaagcacctataacagggcagaggcagcaaggagggggaaactcaggagcccctgggcgacataagttgcatagccatagaactccatcaaaaggttccacttctccgtaacatcttgcatgcacctgtaaaatgtgaaggcttttagcaaaacaatgtaatcaccaaatatctcaaactaccaatacactaattgaatgaataattcaccaaacagagaattcggtcttcaatagaaaaacactaagtttaacagaacaaatatctaacattcggaaaatttgatgaaattacatgattttgacaacagaatatagattagcttattcagaaaggacttaccatcattctgcatttgtcacactgcagaaaaaggttgttttcatactcctataggcaaaataagaatctcgatcagccaaacaaagcaactaagcatgtagagagcataaagaatgataacaacaacacaaacaaaggggtgaggaacatatataagataaataaataaaaccccactaggtagcttctagataggtcaaaaacaacatagagaaattgtgcacctcatccatatggcaaacactgcatttatcaaggtctttccagtctacacggacaggcctatagccaacaggcaggtctcgatatcttctagaggctaatttgcacatggaaagttttgaagaaagtgtggacttcgataaaccctgcaaaagccaataaaattacactatgctagaaatgagcacttacagcagaaatctaatcaagcattatattgctgattgttaacaaaaccagagagagaaacaataaacaaaaacacaaacaaacacattacaaaataaaaccacatttagacaaacaaataatgaacataaattgtgcatgactgtcgattcccacttaagaaaagcagtgcttgttgctaaaaggtaccaaaggtcaccatcaaatattaattgcacaatcaagatctctagaagagaaaccttctatccaattatagtcccttaatcttctctagattccaatctatgaaaggagaattatagtgcctatataataaaaaatattatagttccaacaagatactatagagaaaataaataaatcttctgccacaagtacaaaaaatttatataaattatgtatgtgaaatgtgcatgatacatatatggatacttaagctattaccacctcaagtaaccagtatttcagagcatagacatttaacttgcgaagtatctgaaatccaaaagtaatttataagcagtatggatgagtagtgaatttcttttttccattttcctttctttttttttttggaacaaagaggagtagtgaatttccatccgtgacctttttactgacatatgttctaccattccataaattcgtccaaaagtcaaccaacgaagtaatatgatgagacatgatgaagatctattcaatgttgcgtttttaacaccaaaccagaaaccagccatctttacttcatagtttcatactcaaattacctttataagttttgcaacttcaggaatggagaagccaaacatataggagccggatctgtaggtactttctaatctttgatcgttaaaaggaccatcagaagggttttgtagcttccgtatccttttgtatattttactccagcatgaagatggagtggatcctttgaactaaaaaatgacgaaaaaagaactgaaaattagtgaccttgcattttaatttctatacttcacacaccaaagtaacatacaaaacttgtaaaacttaagcaataaaaaaccagaaataaaaatgaaacccctgcttcagaaaatatatatttatttatataatatatatatcatgaatttgaaatgataaggaccctcctccaatggacaactatcaagtaagacatactgtttttccaaaaaccatacacccaaggacagaaaagttggtgaaaccagacataattagaagaagaaagaaacactaggtcccttgcctaacccaaatatgaccagcaaactaaagcaactgctatgctggcgagagaaaaattgaaacttcaaactttgtggaagcaaaccacaagcctgacccatttaagctacgcctcttgggcacatagtcgaaagaacatagaatacttcaagctaagttacaaagtagggttaagaagcaaacagtaaacagaaatagtgagacaccgattagatagaaactaacattaaaaacacaagccaaagattattacaagaaattatgccaatctgatgaaatcagacaaaaagagactcctttcaactctttaacattatataaaccacaaggctaaccaatttttaatatatctcagatgcattcaaggttactctctgctgcagtttcaaaaattcacttgttcagttccttaaggtttaacttaattagagtggtatttatttttattcatttaattagcttccaagggaatttaagcttcgttatttatcagcatctcagttggattacgacatgctcttgcccacatctacaaatagccatattgttgggctgattatttttcagattattattgttctctcttgattctatctctctaaattcctgtatctgtgtatgttcttgctaacttatctcttctctcttcatcatatgtgtttgtgaaccattaatacatggtggaatgatatgcacctaaagataaatcaattaatattcattccaatgtaaattagcagaaagaaaatcaacacagaaataaaaaccatttgaaattactacagccttcagtaatacttatatgtgagcaatactttctacaagaaacatatacatgttagatgtgtgaaggaatgtattattattgcacaaacctgctctccactttctaaagtcactctaaacagaggtcgactctgtatctcagcatctcttaacacttccatcttatatacaatacacgtacttggatctgaaacccaaaattatatggagaaaataatgtaactacatggcacaagatgaaatatttaagccacatcatcaggaaaacttatagaaataagcataaataaatatttttttatgtcacctgttatagaggtaaacttcctcagagcagtatatccttcaggccaaatggatctatcatcttgaaaatattctgaatcttcaacaatcttccctgcaataaatttagtgcactttaagttgaattgagatcttataagctattactttaacattagtatttagtagtatttccttccttataagaggtaatggtaactacaagattttttcttttctaagaacatcaaataaagaagaaaaaaaaactcaatgcaggtataatttcctagcatggtttctttttttttttttgctgaataatttcctagcatggttgaaactcaaaatatctcctcaacaagaacatgacagtgtgcatcagcagaagatattcaacatatagaaagactatcaaagccacataaaacgtgggagagcttaaataacaattaccaacacttatcacttgcagatcccctaagacataaggtgatgttcgaaggctctccaacgttctctggactccaagatccttcacacagtcttcatctaaatctgtatcaccatcatccactccacttggatcagactcatcaacattaattccattttgcaggcgtagcattctgtttggaagcttctgttcactcagatacctaaataaaacacatgattcaatgtaaagttccgttacacaagaaaccataaaaaaattaatatactactcaacaaagtacgaaagttatcctccaaaattttcaacctgtctaggatgataaaaagcatttggaaaaacatcaacatccccaaaaatacaaaaaaaaaaaaaaggttacgggtaattacgagtagttacatccaatagtaccaaatttttacagactcaatttctaaaaggtccttattatttaagaggaacctcaataaactgcaaacacataatagaactagaagtcacagtttaactttttcctaagtctgtataattttctgtaatttttaagcaactaagaacatgcctaataaaagtaatagaaagcaaaattgcagcaactatgcagtattataaccaaagaatctttttcatcttattagtggtatagtaattgtggcactataagcgtttggccaagttattgcttatgagtcccataagctcacactaatgaccaccaattgtaatcaaacctaatcacaaatataaattcagaaaaacatacacttagatgcttctcaaattcatattttgtaattataatgatagctgcaactaaaattgttttgttaataacttctaacttgcacatcctcttaaacaataagtcaactacttaaattccccatactcttgccagcatttaaatcaaaagatgatcccccatactcctaattttgcactgatatttgttatagatgtgctcaaattttaaaactttattctaaacatcgtactcccactgtccttaaacacactacattgataaaaagtaaaccattaaatccacccaatgcatattcatacccaaattaattataaacaaccctccatggcccagtcttgcaaatttcagagttccccacatcaaataaccacaaaaaacatagtttatgataattcaacaggcctaatcttgcaaatttcaaacttccttacgtcaaataaccacaaggaacatagtatatgattattcaacaagcctagtatcgcaaatttcaaggttcctcacatcaaataaccacagaggacatagtttatgataattcaacaagcactgtagaaaacatacaatgtattttaggaacagttatgcttatcaactgaaaagtctaatatctacaaaagataaattcatgaaacataaactaaataatagcctggagataaattacatttttgcttcttccaagcctctaatgaaacgctgcttcttgcacttaaggtgaaaggaagaaagaagtcccctgagaaatgagataacctgtttcactctaatcctgaataaccaaagtg

SEQ ID NO: 17950 - DNA, 1784 bp, Cannabis sativa
aagtaccaattgctttagaacaagaaataaagctcaaggaccaaggtcatatatgtgtattattgtatgtactatgtagtgccaaaaaactaccaattccctctccaagtctcaatgtagctttatttttagcagcaacttcaatgcaaatccttaaacttaaactctattgggcaaatggagctcttttctgttttttttttttctgaagaaaaagcgttatggagctcttttattaattttttttttgaagaaaaagcgttatggagctcttttccctatacatatatacattatttaatttaatggtttcttttcttcagttctctttttcaccaaaaatataaagcatctttttgaccctgcaaattgaccaactacactaatataaatcatgtaaatatgcacaaagggttgtgttgtgttaatttttatcattaaatctaaaggaaaaagggggaagtaattagggctcacagttcaagttgaagaatccggtcaccatcaccattcagattattattctcgtatatatcatgatataagagcctcaagccaaagcttttgattttggagctcaaagatgctttcttctaagaatcctcagtttttcaagattattttggaacacactcttaatgacaacaaacttgtaagcttttatattgcattgctgcatctcattctatttctttctcataatccatacatatatattatgtatttatatatatatatatatatgatactacagctagagtgatgaatctttgactgagcattattaaacaatactaatactacaacttagtatagtttaagtagctgaataatgtttgttatttgtacaatcaaatttttcaaaaaatttactttttctttcatgaaatatttaggattgtgaatattgtgcagaggaaattttgttgttgtttgtgatggattgacatgatagtgcttatttatcttggtagtaaagatcaattctgaaaatcaatgctgtttatttaagaaagttctattttctttgcagcgggttccaccatcttttgtgaaaaaatgtggagaagctttcactgaatcagtgtttgttaagcttccatgtggttccaaatggaaaatgaagttagaaaattataaggaaaagttttggttagaagaaggttggccagaatttgtgaagcattattccatagaaacaggctatatgctaacttttagatatgatgggaattctgagatttatgttatcatatttggtacaaataatgtagagatagattatcccactgctcctgttaatttttgtaagtctagcatcgacaatggcaaactccgagttcccaagagggaagttattgataatgttgacagctttgaaatcttggatgatatctcttcttgccccaaaacaggagtaaaatcttcatgttctcagccttctaagagaatgaaaacaaatcctccaggtaaaactcaagcaaactatcttgtttgaaagttgtagtaacattatagtgcaaaagtaggtgagaattaaatgattcaatgaaggagctcaaagaattctagactagaaggcttgtgaagcagcaactcttattataatttattgagatcttaatagaacaatttatgttatgatattatattatatttgtttcatattacacaggaaaacttgattcaccttctaagagcaatggagatagatttgctacttatcccacaaaaaagatgacaaatgggattcgtaaaactatgaaatcattgactcacagtga

SEQ ID NO: 17951 - DNA, 6129 bp, Cannabis sativa
aaattagaggtaaatttgattaaatgactaataaaagtggtatttttcaacttaccacgatcttattagtaatttttgtctacacaataatttgatgttttttataagaattttgtgcctttaacgatttttgtgccttttacggctgttgtgctatttttatggcttgtctttaattatttagggtagttttgtggtatgatcattgggcaagataagtgatctattttgtgctcaggagataagtatttcaagtctttttaagtctttatatttaatatagattgttttatattatattatagattgttttgtcatcgtcctttcacaattatttaatttttatttaattttgttgtaatatagttttatttattgttatttaatttgttgcttagttttctggaggtccttcaattattaagactttgtcgataaatttaattttaatttaatcaaaatcacacgtgttttgctaagtgttcttagtttgttgcttttgccaaaggttatacttttggttggttctctgtaagttttggtcgggatttcattctccttttgtagttgagttttaattttttagttaggtgtttaaatatgaatttagtctatatagtttaattcaaggattttattttctaatacttgtgttttcttggtgttgtttgtttttttcaagtagtatttctgtattacaagtcgaaactttggctctctagtaaagctatcaacaaagaaagggtgtttttaatgagctggaggtgctgtttgaggatgttatagttttatcgtctaaattttcaggggcagttttgtcccatatggctcggataaaaattttgcagcgcatggtttgacaaagcatgtccttcggttagacgatgagctatcctggttcgaggagatgatgttatcgtttgcggattgctgcaatgttaatcatctgtgattttgatcaccgcgtcaaaaaaaaaattagtaatttttgtccaaaataatatttataaaaaaaaaaaatctatttgttctaataattaatgttagttttattattctaataataataattaatgatagtggaactaattagcagtttttgtttctattttttcaaaattaatttcttttatttttttttaaataatttctctattttgatttgtatttagttgaactcttttgtaagtgtctatagattcattcaacaacggaccaccacagtcacttatgtgtaccaaaacgacatatcgtttctcctttaaaaaaaaatacaacgacatttcactaaaaaaatgaattaagaatttttatgtcatagaaaaaagtgaagacacgccgtttgattatacaataaacggaattccataaacgacatgtcgtttaattaatgatatcaattcacacagcagcaaataacatatataacagcaataacttccacattttcattagaaccctcttatgaaactccctctctttctctctctctagtcacaagatcatcttcttcaattgcaaaaaaaatggatgatttaccattaacttgtatcacaaacaaaattaacaagaagttacaagaattggaaaactcagatgactttcaaggtttagttgaattaggaaatgaacttacttctctccttaaagaagcatcatcatcacttttggggagcgttgaagatcaagaattcaatgccaaatacacagagttaaagaaacaagctttaagtctaatcgatcgaacctatgagtttgaagaaaaacacctaaagtacaacattccatctctaattggtgtacaatctttcaagggttacttggaaaatttacaagagtttatgaaaaacgtttgggagaaagaatccaaagaaaaaagagaaaaaggaggaaagagtttgattgagtggctacaacaccttgaccatcatcatcaatctgaaagaaagactaccattgaagaaatgaagaaggctgtgattgatcttggcactgatatttctgtaattatcactgaatttcttcttttggtggtgattttgggtgataggaatgacataatgaagaatcttgatgatttcaaggctatgataaaactactaagtgttgagaaaactaatgattctattgtgatcaagactttcttatctgtgatccaattagtagtaagaacaatgaaaaagagaaagagtttgagtgggaaaagaggagaaaaatctgaggtcgccggcgaaatagaactcgagatcatgagaatgatccttaaagaaattttgagacttgaagttgctctgtgttgtcctgatttggttatggtgttgacagatgagatatacttatctatgatatctcatctcagaaatttctttgagtgtaaattgagtgatttgaatttgaaggtgaatgaattgaggatacaagttgtttctttgcttatagatgaaaatcatgatagtcaagaagaaaagaaattgaaaattgctaaggaaacaatgggtgctggtgctcataacatatggaccaaatttgacattaattcatcatcatcttcttcataagtatttttctttttcaattttcttttttatagtacttgaaaatattgagtttgtgtttcattttatctgtgattttcttccattaatggttaataacatttgagtattagttcaatggtttccttttattttctttatctttttcttttttgctttctgatatttctcttttgttacaatggttataatataataataattattttcataataaccgtacagaataatataaagaaggtaattaatgatgggttaataatgttttcttgcagtttttttatttaatattttaaatgtattatcagcttctttctattgaattaatactaatacatacttcagatgacttgattaattaaatttctacgtttagaaattcaaaatggtcaattacttaaagtaaaattgaggctaaacttagaggaaaaagttcagaaaatgtatgagctgaagctgcaagttttcttgtctaaccaattatggttgtgaatgaaggttcaaaaaatatggagcaaataatggttatgagtttttttggtttggaaaagtttcatattttctagtactgacatattcattttctgctctttattagattattagttagagaattataaaccaaacgtgagttttactgttttagtgcttgaattcaggattacccaaaatgggaatttttcaatctctttggcttaaatggtctcagaatgtatgtactttttgtgcatcagcaacaaaataaaattccataaactgatctctaattgatatatagtatataccacaaattttatcatggtgcccaaaaaaaaaaaagaaaaaaacagtgttttcatttaattctcattaaaaattctctgttatgatgacacgacacttttacaggtctacattttgcttatgatgacagttggttggtttattcggttagcttgcttagagtcgatgttagtgtcgttagtcatataaataaagctttgtaagcattgaaatgagtagtagtaagtgcatataataattcatggggattttttttaccgttaaaaattccccatgaattattgagattgttagatttaaggacttctatataattctattcaattttacagtttcagtgattgtttatgtactaaattatgctccccaaattttgatatctatcaaatattgtccttcaaactttgacatgtactaaatcatgtcacttgaacttttatccatgttagcctttttttactaaaattggactaaagtccttaaatctaacaatctcaatagttcaaaaggcatttttaacgaccttaaaaattcatagggcaggatttggtacatgtcaaaatttgaaaagtaaaaatcttaattagcctaatttttatagcggtacaagtacttaattttattagtaaaagtacattttctttgtcaatacaaattctattaatattataaagaggatacatatatgattcaaattctaaattattatgttttaacgaaaatatatagtatgagttacgtctaaatctttatttattaaatttaaaatggagtctgtattgaagaaattgagcaaaaattacatttttacaaatattgaatacttacaccgccaaaaaaagtcactaaatttataccgcttacaaactaaaaattttgagtacttttgctatcattatcccaagttgtaataatcagtattttgtccaaggctagtgctagatgctgaggttggaaaaatatggactcaacatgatctgagcttatggtacttagtagagctatttctaacttaattttattattattactttcacatttcactattatattattaattaataaatctctttaccattacaatgttgtttctttcaagattcaatcaataatagaaagaaagattttaaaatagaagtggttgttattgttaaataataattagggttattttttttttttttttttctatattttagtattttatattagttgtctatgtaagactttcttattaattgtatttcaacactttaaagttttggcagacgtccgtacaatcatgtctgtacagttcgacagtccaaatttggtattaaattcttcaacttttttcttgattcgcataacagttttcgttttgacttttgcatagcagtttgcagtttgattttcaaaacacaattttgagatctttttaacacttttgtatttagaaatttgtgcaatttgttttatttttgtaatggctactaatatagacgatttccttcaagcgattagtgtgagatttgatggaaagaattattcgtattggagttatgttaagaaaaaatttctgaaaggaaaaaaatgtgagttatatttctggaacaaaaaagaaacatgcagatggtaatgcagatttgttaaaaaattagaaagtagataattcaaaaattctcacattgataaataactctgtagaacaatctattggcacccaattagcaaagtatgatacagcaaaagaagtctgggaccatcttccaagactgcatacacagcctaatattgcaaagcagtttcagttggaaactaatattagagctctagaacaaaaagatatgagcactcaagagttctattctgttatgacagatctttgggatcaattggcactcaccgaatcagaagagctacgtacttttgcaccgtatattgctcgtagaaaagaacaacgattggttcaatttttaatggctcttcgtagtgattttgaagcacttcctggttctatattgcatcgttctccgcttccttcagctgattcagttgtcagtgaattgttagcagatgaaatctgtctcaagtctcaatcaggaaaaggcattctctcaacacatagttcttttattttggcagtccctcctactacactatttcctccataagagaacaaacctcgcacaaaggttggtgttgatgagtgtagcttttgcaaacataaaggtcattggaaagctcaatgtcctaagcttgccttagatggcattgtgtatcaaacttcttgtactgatacaactgaatgtggctgaaagaaagcataaacacattgttgaaactgctcgttctcttttattgtcatcttatgttcatagtcaattttaggaggaggtagttctaactatagttcactgaattaatatgatttcgtcttctgtaattttgagtttgtctccttttgagaaactatatggttgtattcatgactacttttatttaagagtctttggttctacttgttttgtgcttcgtcctagtgtagagcgtacaaagttatcgtcacgctttgctctttgtgtgtttctcgattatggggaagggaaaaaggattaccattattttgaaccagtttctcaaaaattatatatacctcgtcatgtaatttatattattgggtaatgatttttttctttaagaaaaatgtacatttaattatcttattatctttacatttaatcatcttattatattagaaaacttacaaaaatactgaaatttgagttaagttttacaaaaatactgtcac

SEQ ID NO: 17952 - DNA, 3031 bp, Cannabis sativa
ttaaatttcacacattaacaatgtgagattaattctaatatactgtaatctcaagattgaaactaaagcctaaaagtaaacataccgacggtaagatcgtttccattaagtccctgccatgcaattgtccagcctccacattgattgcccaagttgtctgcatgagttcctgcaactagaatctttgttgccttcttgggtaggggaagtaaaggctgagaagccgattttccgttctttagtagtactagagattttcttacagcttctcttgccaattctctatgttcctgtataaagattaataattaataaggtgagagagtgtttaaagaatgccaaaaatactgctggttacaaaatgaaaaatcgaaaacaacagaccttgcttccaagctggttggtcagactgaaatcagcaagtgggttctcaaagaggcccatgatgaatttaactctcaagatccttctcactgcatcatcaattctactaatggggacaatgttgcttttcacttgagatgttaggatatcaataaactcggtaaagttgtaaggaaccataatctgcaacaataacatataaaatacatttgtcaacaagaattttccatattgatgtataaaaattttcaaatgcataagtagtgaaagtatataaatcatataattgaatttagaatttagaccaaccatgtcaactccagcattaactgaagcttcaactgaatatgaatagttagaatgtggaggtgaagtaattctgtcaataccctgccaatctgatatgacaaatccctgatacaccaaaaaagaaaaaacatgattagttatagaatctccattcaatcaacagctttaaaacaaattatttatagtatctgtttgttaccctgaatctaagttgtttcttaagaaatccagtgacaagttcgcgattggcgtgcatctttttcccgttccaacttgagtacgaaaccataacagtcgagacacccttaatgatggaattatagtatgcaggcatgtgaatgctaaacaaaccatttgaactaatcacagtgttgttttcattaatgccctttgttgttccaccatctcccacataatgcttagcacaggccgcaacttttgttctatgcataagaaaaagcaaacattattagcttttgaggtcatttgataaaaaattcatgtcatcaagtacatttggaactgtaaaattacattactttatgagttcatattaaattaaaacatgaagatgaagcttgcacatgggagatcaataagtgaagctcatgccacacttttgaaagaccaaattggcccccatttaaaacttactgcctaccacatatgaatgatagataccctttaaccacacaaaaaagtagataaatagattattatagatttttgaaacaagcaggctccagctgatcttgattagtacaaaacaatttttgcgtatttgagaagtttgaacatgggggacaattggaaaacaccatttagatgggtccccccccactaacaccacaggaatcaaaatgtccaaaagcaaggttttcaaactatgcagatgacattgaaaaaaaaataactatcacaagtaaattacctcaagtgaccactttgataatgacaagaaaaaatgcaaacaaaattataaaatcaaaagattgcgtggattgtggaagcacattcactttgatgcagatgaatgtataaaaaaaaactcttcaaaccttaacttgacacattcacatttacagacaagatgtaactaagtaaagttgatttttttttttaaataaattgacatccaacaaagattatgaaaagaaaaaaagtaaaagagaaaaaagttcttactttccaccaacaaaaggaacaccctttctagagttagcagggagatctccttgcaaaccaggaataatctcagtcattgcttgaacaatgctgtggtcctcactgtagctttcatagcaccgcccccatctcggatctctacagacctgaaaaacaagatattttagtaaaataatgttctcaaaatgagtataacattgaatttgacattaagttgagcaattaccgcaatacatggtgcaaaggcataaggaattcctgttgctctgacttcaagggcagttgcctctccaatcttcttaataagcttaggatctctaatacacaccaaaaatcatccacaataagataaacagaccaaaaaaaaaaatgaaatgacttggttgaaatcaaaaggaaccaaaattaactttttggatttgtaaatatacttgcctggtcactccaagtccaacgttatgagggaaaatagtagcattgtaaacattgttgtggccatgaacagcatcaataccataaatcataggaatcccaagacgagttgacaaagatgccttttgaatctcattcaccatattaacccaagcttcaggtgaagcttttggagctggtacactccctccaccactcaatacactccctaaagaaaaagaaaaagaaaacccaaaagccattaatgaaaaatagtcacacacacacacaaaaagggtgatcttagcatgatttaaaggactgatttttaaagagtttttcgtaccaatgaagtacttctgcatcacatctggggttgccacagttcgctctacctgaaccatctggccaatcttctcttccaatgtcattttgttcataaggtctctgattcttacacccaatttctgtgttgggtctttgtatttcggggtcgttgttgcttctgctactaggcaacatagaagcagaaaacccaaaatgggtaacgtaaatctccccatatctatgctctgtggagtttttctacactgttatctgcaactccaaaaaacaaaactcatataagaaaatgagaaactaataataagagagaaagaaaggaaaagaataaagctttgagctttacgatgtaaacaaacctgtagactaatgttaatactagctctctctctctctctct

SEQ ID NO: 17953 - DNA, 4418 bp, Cannabis sativa
agagagagaataatgcacactaacttttactttctcttccatcaaaaaaaactgttacaatctcaccacaagatttgcatattggtatcaaaaaaaataccaccgaaaagtttgttgcccgcatttaatttacacgggacggaaaaagtcttgagaaacaagcctaaagcgctttagatatatatagcacaagagaaaaatggatagaatttactataattacatcttaagttaataaccaatcaagctaatctactactaggaatatatggttcaaagagcttcacgcagggatttgggtcatactgcataatttcagctgcacgttcaaactcctccctcagaactcttatgctaaacttgtcgacaactcgaccaagatcgtgagaaacctcaaaaggatcttctatgcatatcaagtgacgatcattgccaactctccttgtccagtccttttcacgtttgctgaacatgttaacaaagtaaataagatttagtttatattaaaggagcaaaggattcgatcaagtcagaggtctcagcttttatttctcacctgattatgcatcctgaacgcacagatatgacagaatccgtataatcgtggcagtatgcccaataattgaaaaagccccacacaagttgaccaattgtttccctgttatgtgacccgaaatctcgaagcttttcgatttggtcaaagtaagcacattcaatattgtctacggtaacagagtaggttgccttcattccctgaaagacaatattttgcattgaaattataaacggaagtaaagaacatacattttatatctgcaacagaaactttcaaatgagaggttctggaaaatccaagatggtgcttatcattaaagatttggtttggcagcaataaaagtaaatcaactgatagtaattagtatagtgccacaaaatgctattttgacaaaaacatggaaagacattaacagaaccatcacagatttgaaggcctacctgtaagcatggaaggatggctggtctacgctgttgtaaaaagtggatgcacataagaacatacctgaaataaaaagaaaaaaaaaaagataacaaaattacagaaggccaatgacaattgtaagctcatacccagatacacggctatttctgaagcaaactaaagtttttatcaggaaatcaggaaaaaactttaatgtgtaaaatcatccacaatctcacttgcttgaaaatatataggcaagtttgcgacgtcaaatgtttacgaaatataacttacgcataactagacagggttccgtggtatgtttcgttgactcctcttgacttggcccaatgtttcacaatataagccaattgccgcaacctcacatctatccgtgcataatcaccaagcaaccttgtgttgacaacagccaaaacattgttaatgcatatgtcacaggaaatccccgttgctggatccttaagttttactataggaactctggcacgtgtcagcgcctgaaaacatcttaaagttataagtccatttaacaaggaaacaaaaaggtaatctaaatgaacaaacaaattgccccaataaagatataaaccaatgataattctcatcaaataggaagcaaaaaataaaaatagttctgtgtctcttcagatatacaaggaatgatagattgactggagatctgcatctggacattatattgctgtcagatgttcattaagcaaattttacatccaatataaggatgctcaacagaaaacttcaactagaaggcaaagaaatcatatactaattttggcgtaaagggtcaagcattgttattcacctgcacattctgaagattgtccgattgcaagatatctgccaattttaatataacttcagccttgttgatatcaggttcctcaattgctaagcagagatcaacgtcacttttggaaactccaaaggagttggcacatgatccataaagataaagccgagctttgggccactcttttattatcaacttctccaatagtgcaagcaattgcttctgcttggccttttcttcctcagcaggtataagcgactcaaaaatggcaagaaaatggccatttagcctgtctatgtcactacgacatcgcatttgacgcttgtagtttctcattctttggttaagcagccgctgccctcggctatctgaccttgattcctaatggcaaaaggtaagaacttaatgtcaagttacaacacaacagaagcaaagaaatgtcctttgtccatataataacaaaaatttatttctattttgactaaataagtcaattttcacttggtatatcaattacaaatttcccccacccctcaaagttcaaatcataagtaaacaggcccttgaatcaaaatgttggccaaatttaagcaaacaaaaacaaaaataccctcaaagtatggattatatctgattgtatagtataacacaaaaataccttgcgttataaattattatcatttacttttttaaaaaaaaatgtttggatattgacgaaagtattgccttttcttctttatttaatgttaagattacatgtaattataaactaaattgaagggttttatttagttttaatttaaccaaaaaaaaaagtatattgtaaatttagcgaaacaaagttgatgaaaatattactataaccttatgccttcgaaattccttttacaagttaacatataagaaaacaattcgatagctacatcatcatacattcaaatatccaatagcaaacatctccaaatccgcataaattatatacttacaccaatgactaataggtaaaagctaacatcttgccacaattttcaaacaatcatttgggaaagaaataaggagcaagatctgtatttgaaaaaaaaaaaaaaaaaagaactgaccttctcgcgagcattttgacgctgtttcgcttcattcttgtcatcagattcatcctcaatcaataatgaatcaacaagccgttggccaatgtcgtccatttcatggccacttctgtcatgtgcaggagcctgtccctttctctgtccatcaccaggcccaacctcaattgcctgactctccatagagatgaaggattctctaaccgctggagtcgaaactaaacgaagactagtgccagacggtggtccatgatgatcaagctgcgccccaatcccaattccaaatccattagacccattacctcgagttctaatatcctcacctgaaacatccctattgctcgtatgttcaccaaaaccaatcctttccctatcaacattgtggtttaaggacctcctattcccctgatccctacttcctcctctcggcttgcttggaaacccaggcggaggagtaaccccatgatgctgctttcccaagcttcctccgctgctgccaccactgattctccgttcttgctccagtgcctcataattcccatgacgaaatccattcgaactcaattgttgattcctatccaactcgttgttaaaattggaagtaaccatcgaagcatccacgttagataagccaacactcccttgaatttcactgttgaaagatccaaacttcagcttgtgctccaagtgttgcttctgctgaggaagaccatgaatcgaattcgaatttgggctcgaattcatcccactcgaaaaccctaacctccttaaatcatcgccgagattcgcaggtacttgatttcccatatattggttcactccaggggagaaatagttatggggaaaccctagaaagccattagggctaaaaggaggagcgagagagtggaccggccactgatgctggtggagaagatcctgaccaccggattgccaaatctgtgggggaaaaggaagactggggccgactgctgcgacggcaggatcaacgggcagagattgctgctgcggttgctgaggtgtttggggttggtgatgctgattatgatgaagatggtcaggaggggtcttttgaagcaaagagagtagaaactctccgccattagccgcgggagacggcggcgcgttacccccaccgttcattggggtctcggtagcgaaaagcgtcaaaccagtgtggagagtcacactccttggaggagaagttaacagcctattaaagcttttatttttcgttttttaaaaaatagactaaagagttcttttttattttatgccaatacattttatgtttattttttgaaagggaccatacttaaatagaactataaaatcatttcaaaaaaaaataataatatatatagaactatagaagagtgatattaacatttttatttcgaaatatcttattttaaaaagatacgttagaatatcttttttttataattatagaattttagttttcttaatatcttttttcataattatagaattttagttttct

SEQ ID NO: 17954 - DNA, 3977 bp, Cannabis sativa
ttaaggtttcttttgtattgttctctccatcatttatgcactataacttttttttttctctctctcatttctccattaacgagaaagcaaaaagagaaacccagaaatccacaaaaaagagctttctttctttcttttttatttttaagtcttttcaggtttcttgtgaaacaagctttgagaaatataaagatattattatttttatatatgtgtatatatagggacaaattagtggaaggttgtgaaattttgataaattaaggataggaaaaaagatatggggggtgatgtgttgaaagaaaagctatgagaaaatgaggaaagtctacaagaaaagagaaaaaagaatactttattttaggggtgttgaaagatgagtacaaaattataagttactttcacaaaaatcttgttgattgaaagctaacaacgtggaaagatgtcatattgataacacattaggaagaacccaattttaaatacacctcagccaaaaaataagtaaacatcactataaaaatagaggtagatatagaatactattctaaaccatccgaaaatttagagataattttaaataataacgatgtacacgatcataaaaaaaaatagataaaaaattacaataacagaacacttattttaggaggtgtactatagatttttcctaaggataacaaagtagaaagtatcacaaataaacattgggtgtactgtctacttgtcctgcataaatgaagtttcatataaatactccatgatcaattcttactcagcaagaaaaaaaaaagggaccaatgtattgttgagttttaccaaattatttgtacaacattcacataagattatccaagaatttacattttggtttcattatttgaccgcatgacatgaaaagatagctagacagaaagtgtaaagcttaaatgattctcacgtacatggcataccagagatagcagacagcttaagtagtggaaccaacattgactagcttaactgtgattctatgttctactaacagagttaaatctatctcataaacaatataacagctaaaaatgctcaggaatcatagccacctaactgagcctcaccacacactgtactccaacagttcctatgacttcgaaatttatcacagttaggcatgtatttaacttcacattaatgcataatgtcaaacaaattaatctgcatcttctaagactaattatacaatatttaatgaaaagtttaaatcaatcaccgagctaatgattaaataccaacacgacacgcaagcagtgtatcgataggcgatagcatcataaaggccacatgggctgcagtcatattgagaggtgagtcaaaggaggatgcattggcactctttttcttgtaaaatgataacaaaggcttgaatcatatccaacttcgagagacagttagcttttgaagagtagatgaattggtagttttggaagtcaggtgaaaagttagccccaaacgggctttgcaaaatcggacagccaataaagaaggaaataattgtctatgatctttcaagtttctttaaacttgtgtctgaatgtaccattttatgtcattcattcatgaatgcccacagcagacaatttgcttaaaaaggaaaggataatagattccccacctctatttgttgtctagagaccaaaaagtgagattggtgtctgcaaaatcaagaacgatggttggaacagcaagctacaacaagaatacaatttgaaaacgaaatttaccaatcaatatgacccaacaaaatgtaagacattaaatatgctatgattaattgtagttgatagtcaaggaaaaccatatacatcacagtataaacctagagcaatttagtttagactttagagatgaatacttcatttactgcattccaaataacagaaaataaaggtacaatatcagcatgtcaaatttaatacagcatccatgccctttagtaagatgtgcttaggatgtcaatataacatttttctttcaacttgattcaactcgctaatttgtcataaaatttactagggttttaccatgtcatatcaggctgcaaagtgatacaatgtagtcagtcagaactagtcattcatacaggcaaaatgttagccaaagtgcctaatcctcctattatcaagtagttccaagtaaaagaattgtaggaaggatctcaatgattatattagatggatgggtgtacattggttttaataattaggatgctcgatcagattaacatgcaagcttgccgacagaaaacgggtaaaacaactaccattccacaactaaaaaacttgtatgccatgctgctcagattcataaagcaagtttggcaatatccaatgtaaatgcaatgcaaatggaaacccactttatgcagccatttgaacatagaactcaatctgtggacatttttaaagaggcgaataaatctaatgaagaatccacactcttacagggcaaagagatagaataatgaaataaaataattaaagatctaaatagagaaatcaaataacatgtaaataacttatgtaggatgagccaacaccaacaacatgtgataaccaaagtactgatgaagaagatggataataaggaataaaaccaagtgatcctttacaatccataatttacttgcataaggtctaagtctgggggtttaattctttattgggcctacctaactaacaaaatgttaaagttttcttttcttctcttcccatcaaatattgtagagttaccaggactaaaaggatatcaataataagataatcatatcctagtatcctattctcatagataaatttttttcacttagtatgactcaaaatgacttcaaacaaatatgaaagatcaatcaatcatgtttaagacaattgaaatagtttcatttcttttatgaaagatcagcaacagaaatgtaataaaatggtgacatgacaccaaaaatcacttttcctctaaaagaaatgtaataaaatggtgacatgacagaaatccactcaaacaaagagtgccataatcacaatagaattttcaaactaagctgtatttttttcagttgtcaaaacagtttttgtggaaatgagtcagatatttgatatggaagtttatctatctgatcggaaaaggattctgagaggataaacttccaagactcaactgtaattctatgataaaatctttcacatggcatcagaatagtcaatttcataagctgaagccggtgctcatgtatgttatacacacatatatatgtaataaagcatgtctaatggctataaaagatgtaaatgtaattaccccatcaagagtgagacttgccaatccaatatgaagtgagagagcacacataaaaacaatgcaaccaaccatcagtaaaatatatacagcacactttgtcaggtcactctcaaacacaattgaaaaacaaaacaaaaaaatctcactaagagtcatactcatacagaacagttaaatgcgtaattttgtagttttgggcaaaaaggaaaaactagttaaatttaaattcataacctaatccttacacaactaattagtggatactaattcgaatccaaattaactaacttgaaattgaaatcttcatcttctagtaaccaaatatagcataattattttttaaaaaaaatcaaacagtcggtgctaactcagctcaggtattgaaaattgaaaacagcattaagaaataagtagtaaataaaaatggcagattttctgggaaagcaaacaaaggattacctttagagtaatgagcgagttggaggaggaatgtgcgttatggtatgttgttcagtgaaagtgacgagtaaatttgtgaaaccctctcatctcactctctcttttcacttcttcactgtcgttttctttttttatttccattattttttttaacgctgcattaaatttcacattttctttttatt

SEQ ID NO: 17955 - DNA, 1863 bp, Cannabis sativa
tacttctattactttattgatattgaataatccggattacattgaaatggagttttatttacggcataaaacccaacagtatggtgtgtccaattgttgaaaatcgcaactccttatgtccaaagttgacgagcctcagtgtgcagatgcaaccagtaagaggaaacattttcaactatgtctccccatgagaaatgcccttgaattctttcctcaaaggctaaacccaagcacgaacccagagataattatgccaaaattccttcttacacatctctgtggacttcccataagttttgctcatcagattccatgattagataaaacgttaggctagcaaggaccaaagagggaaaaatgcttaacgctaaggcagtcacagagatcactcccaaaacttgacctcgtgaatgaaacaaaccctgaaaaggatgtgtggaaattgaaaaagatctaattttgtagaaaggagccatctgcgggtaactataaatgaataactttttgagtggtgggctaaaaaaagtgtcacaatctcgtgaatggaaagatcaagccagaaagcagttcaaaaatcgatcaagagatacttaagactagcgggaaaaggttgaaacactggccatttgaaccacgtgctccaataacataaccagcccctaaaagtcaaccacaccaaatatctaagtaaggaacaacaaaaaaaggactctatttactattatactgccccacggccagggcaaagtttaattgtctttgccgctaaagaagtgtggttaaagtggaatatatataagaaaaagagaaaaaaaaaaaagaaaaagaaagaacaataatattaatctggcaggcctgctggaggttcaaggttagacaccgcctgagtgggagggagagtttgcaccgaacatctgccccactatctttgtgtaaagatcatgaacaaccttcatgctccgtatgaagtgagcctagtgggcattctcctcctctagctactagatcgcatagtgaaaatccccaatctagaattaggcattcgtaagttcaccccaaagtgtctcattgaaggcacgcaagtcacggttggccgccttgacttgctctaactccgtcactagcatgccagcctccgtagcaaccctcttcgttagtagagatgcttgtcaaaacaagccaagttaaaaaaatattgaagtcccaaaaacaaagcgcagagcaaacaaaccaaaacaaagagaaaagtggaggcaatgtctcgaggccttaccctagctgcatgctgcttggcagaatgggctagcgcaaaaacgtctatgctactgtaggatgcccaggtctccataggatatttagaggcactcccaccaacctagtgtaggagttggtggcaaaaggtgcagcctctctacccaccttgaatgccaccctcttctccgaggcctcgacttccatagttagccccgtagagggtggagtatgcacgtcctttgagattttagccttacacaccactgacagcacaatttccctcctacagacttgtggccttttggcctccaagcaccccttcaacgccctgtttgcctccctctacttttgcatatcgagatggtcgaaaggaatcacctgcatggggaagatgagccccaccaaaggtacccttgatagggccaaggggtaggaagactaaggttagcccagcctcaattaaggatcgtgacattgggggtagacccccatccctggggtggataccaaaagtttttgcctcttcttgccagaactataactcacaacttcagaagaacctgtatcatccattacagacttactgtacctgtaacaccctaactatct

SEQ ID NO: 17956 - DNA, 5459 bp, Cannabis sativa
  modified_base (1974)..(1981): a, c, t, g, unknown or other
  modified_base (5095)..(5095): a, c, t, g, unknown or other
tgcaagtgaaagtagcgccacatttcgtggcaaactctttgctgacctgttgagtttgtccatgacacaccatttgatcattttttcatagattgacatccatcaatttactcttgttcctttatctaatttattaatgtcaaggtttagttcctgattattttttctcaaggggcaaaaataaaaattaaaataaaaaagaagagaaaattcactcaattgtttcaatgttgtcttcaatttctgttagatgctgaattttgtgttctttggggtgtaaaaacatgtggggtataaaaggtcattccccattagaaatgtgccatgatgctataccttcttttgtaccttaaattattgtttatgccttgtaaacttatgtatacattgtgaaatgctgttctagtttccatttcatggattggctgaactgaactggctctgttgacaaaaaatacttgtttgcctttttctttttcttttggtattgttctttgcattggaaaattctaaacatagtgatgtggtttctttcttttggtggtttatgatattgatatatatatatttgattatttggaataatgcctagtcttctcattactatttttgtgtgttgattctccatgttaggacaagaacataaactcaagattgattgtacaacatacctggtatgatcattttatttatttttttttacaagaaaagctaataatttccaataacaagtaagtgctgattgcgaatctcaaatggctaatgtggtcctcctaacaagttcatatttatctacagtcatttatctaccttttattctcctacattaccttggcccacatcatgtgcattttgtaattatctatataattattattatgggaaaccctcaatatatattatgggaatggaaatgacttgatctttgtccatcatttgtatttgtagccagttgataagctgagtcactcatggggacccatagtttatcctttttcttgttgcatgaattaatttagataaaaattatagccttgtagaatatatttaatcttcattttgtcaatccatctacgatcgtgagtctgtttgtgctcaaaataaattttaaaaaaaataagagatattgatagcaaaactacttaaattttatggtttgtaatacttaaccacataaactaattttttagcgttaaaatttgaactgcacttttgttttggtttttatacttccatctaaagtttttgttaagtgtcacggtgtactgtttacgtgtacacgtgacaaatttttagtggtccatataatattaattataaaaatattataaaaaaataattgaaaaattataataataaaacaataataatatatatacattttctttttcttttcttcttctgaaataacctaaaattaataaccctaaccctaattctatctctttcatcctctctctctctctctctacccaaatttttttctcccaagcttgaagacgagtcttgacccaatttctcaatcgtgattgcaaatagagccatcaagtccacgatttctcaccggtgtgacaattcttgtatggagcacacacgtctacgagagtacgaattcattgaggtcgttcaagctttaatggcggctgaggaggaggaggttaacagagtgcgaaaactagaccttagggtttcaaaatgggagcttctctaccgtgtagctgagaatccgcttgtgatatttttacactaatctatgtgagataatgttctctaatatttttaggttccatctcaaaaccaattggtgatgagtgaagtaacccatgctcttatatatggttcaatatttttacatgcgtctttacactatctggataggtgtggatcgatcgaaagtccgttagggatatgactctgataccatattgagaaatatggggatctatgtgaaaccaattggtgatgagtggagtnnnnnnnnttcttatatatgactcaatatttttatatttaatccatgtgggacaatgtctccaataattatgacttgagtcagtaatttagttttagtgatgtattttgaacaatagagtaaataggtttgtgcttgagaaaatataaacctgaggcgaaactaaattacaaagcctataaatttctttctgaaaaaaagcctaatgttacattctatatatttttttttgtaaaatatatatttatatataagagtgtttgaagagaaaaaaaaataataaatataccaaatatataaataataaaaaagtataataatttataaaaatgtttatttattatatattaataaatagatttatatttatttatcatattactatattgttaaaataaattcagatttttaatatttatcgtattcctcgtaccatactaataataagtaataggggtatgacaagcatattctactaatactctactcgttgtcatttattgtcttcgtcttcggatcaggtaattgattaatatttttctttaaaattaataacacagattaaaattaatatttttaatataaaatagtaatattaataataataacaaaagaaaatattgggaaatggatagaaataaaactgagttatgaaatgggaaaaattacataaaccgttatttttggtaaatttttttacatttttacgtttaaagttttttttttattcaattttacattattctagaaaaacacacacacaaaaaaaaaaaaaaacaagaaaattatatgaaagtaatagaaaaacaatatcaaaaataatatacaaataacaaaaaattaacaaaacaagattacaacataaaaatatataaaaaactcgtattttctgtaaataaaatattaaaaaatgaaaaaaatacaaaattccatacaactatatttttgtaatcttttattatttttgtgtatttactaaattattccaaaaaataaatataaaacatacaccttaaatgcaggttcccaatttcttaattgcaaattgacatatgggttaagttagattgcaacaacataattaaggtcaacattaattaatgagaaactctaaaaggtattagtgatacttaacactttcttatatattatattgctatttgtctaactaataatcgaatcctatataattaatataaacttttaaatcgctagctaattgtaaatccacatgtgttagacaccactaatacttaatagcaatgctcataattaattcatgttcaatttagtagtcataaacgattaaacagaaactggtccaatttttgcttattatttcatgcctgttctgctatgctccttggcgaaatagagaggtagccaaaatctctgtttttcaaagtgattagaaaacatccagaggcatgtatgtatgtactatgtaggaataggatcaagtacctagctataaaaaccaaaatggcaaagctgataataccatagctaagtgggctaagataggagacaatagatggtaacaactttagttttatttatttggaactcaaagcacaaattatcattgcacttcatgtacaatacttctacaactttctgatttcttattcataaaaagactagatttgagctgataactctggctcccacatatgatattaatgcaagctaattcatcaaaccaccctgcaaatgatcaattcacaaccataaaagagtttagtactattttatggtagtttaaaatgttaagaaaaagtagtactttgttttgtcaactaaacttaaaagattgtaccaacttacttagagcaatcagtggaaggatagactttgtaagggcaggaagtgccacataaagtagcaatattgttaatccgatcataatcgatcccggggatcatagctgcaccttgctggacgcaactacaagctgcccttatgtcatctttcgtatagtaagcagcatttagatctttaatcccttgacagcattcgggggaaactgttcccccgaaaacaccgtagctgatgcacggtgtcagccagtttgtcacctgctcgcatgttatgctggcctcagcttctgctcgatcaggagcctcggccaacatcaacaccaccactagtgtcatcacctgaaagagtggtactacattaagcttattaccagccattttgtgttgttgttataatgaagttgtttggtgatgtgaaaaactaatgagcatatatagttgctcttggtcaattgtcaaacactatacaagtcaagttgataccattgaatctttgtctcaaggtgcctaattaaaagataagattaattcaaagtgtggtattagatttatttcatttttgtgttaattttctctttttaagttttgtacttttgtgatttgaaaattcttgatattgaatggagttataaaatccaaaagggtcttccccacttttgtggaaaaaattagttacgtaagtgtttagctagctatacatagttacagataataaggttaatctctctctctttttttttttggctgaagataataaggttaatataatcttaggccaagacaaccgaggaaaagtctttaataataatatgggataaatgtaaaatgattctaaattttgaaactaagtgagtagatgttcattttttttcaatcaatttaacaaaatgataaaatataataaattagctaataaaaattataaaaatacatttaatatatattaatttttttaaaaaaatattatataataattaaattaaattatataatttttttaagtattgcatatgaatatattataataaaaataaataaatatattataatatttgatatattatatcattaaagattaatatattatagtaataaaattatataccacaaaaaattataataatactaaaactaatatattaatactaaaataaatatatataccaaaacatttatatataatcatcatatataataacatagaaattaaatatcatcttaaataaataatttactatacacaacaaaaaaatgtataccatacaacaaaatatatacctacaataaaaaataaaataatatnatataatattattaaaaaaattatatatactatattacgaaattatatacaactataaaataataataccatactaataaaattatataccacctttatatataacaaaataaaaactaaacatgcgcgatctaaaataaaatgatatactatacagtaaaacttttataccatataacaaaaaacatataccttacaaagttataatagaaatatatataaaataacaataaataaaaataaaaatatatatagcatgctaataaaattatatatcgcgacaacaaaagtacaataaaaaatagaacataaatatcatttttaaaaaatgatatagcgcataacaaaaaatatgccgtataac

SEQ ID NO: 17957 - DNA, 13776 bp, Cannabis sativa
attttataaatttatttatgtaaacttaataattttattctaaattataatacatatataaatattatatttactaaaaaataatactattatgatatagtatcaaaaattatttattattattgttgttatttttagtgttttgattatctttttctaatgtaactctatttagttataacctctcaattagaatataatttatttggtcccaaaaatattctttaataaaagttctactgtaataataaaaataataaaagctacatgtagttttggaagttattagaggattagtttccaattttttggataaagagattgaaaattgtcatcttattaatacttagttggaaacttggaaaagagaagatgataatcacttagcaaaagtaaacagcctcaaatggaattctattatactaggatagaaaatccttgaaaaactaagcttatatttatggtgtaggtaagaaaaacatcatatgtatgtacagatcccaaaaatgagtttctacttctcaataccctgttgcaaatactggatcaaatcatacccagcagtggtccatttgtcgtaagcatcagtgcagacgcggatcatgaaattcgcggcttgacgatcagtcatttcgggatgaaatctgtttcgaagattatgtattggatcacccctgctaaagcaaggcagtccactgtctagcattaactcaactgtgctgataatcccatccatatgatgccgagctgcaaggtatcctttcacacacaaacttacaaactggtgccaggtttcacttttcatgtcccctgaaggatctaatagttgagtcatttcatggctaagcttaaaatgagcactttcaaatcgcatatttcgaccgggagaagtttcaaaaataaaaccaaaatcaatatgaacaagtctcccaacgctgcaccacaatacaaggaataactcaacattttgttactttgacaaattgtagaatagttaagaagataaagatcttacttgtcaaataaaagattgccattatgtctatccttcggttgcagtagaaggctggcaaccgcataaccagcactgctcgtaatgaagttatctcgtgcagtttcgaaattaataggagaatcaacagaaccgtagtcctgctgaaaaatctcgtacaaaccaccatcggttctatcacccatttcatttctactccgagtattaggcaccacctacagggtaaaaattgaggacgagagacatcatacgcaaagaacgatacaatcacagtaaaaatctagttttatctctggacatatataattggaaaagatacacatgggattgagattgggttatgacattacatcaatatcagtctcatatgtaaacatacctcaattatgcctctcccagggccagttggaagtacaccataaggaaacagataaagatttagtccaacagcttcaaatatatctctaagaagtgaaatcacttgaagagcaaggacatcttggcgacaatcatcccctaccttttaaattagaaaactccagtaagataactctactctattcgtaatcaaccagaaatcatactaaccacaacctcagattgaatttattctattaaatcttggtacgagccaatataataaaattagtacttaaatttctgtatattggcaagtttcatttatgcatcttagaatcatggtaaaaaattctaagtcacaggcaaaagaaaattgaaaatattagggaataactaataagctcaccttgaaaatgcaagcttggggttttacaacattatggtctccgtcccgatcagtcacattaaatgtaatcataataggaacttttgctgccgacgtcaagggaattccactatcaaccttaatacccctaacaagcttgttaggagctgttggtagataaaggtcatctccttgcatttcaattttctccaactctctgttcatgtgagtaacattctatcagaaatgtatttctcaatgactaaagtaaatcatttaaagattaagaagcataccttctaatacccgcttttcgttcttctttgggaagtggaaaaagaacacctgaaatagatgtaaccttgtcaaagaaatcaaattctcttttaaataagtcacgtgcctttggggataaaccatcaataatacgttccctaacaagtggcagcagggcttggaagggagtattctgtcattagagtaaacacacaagttatatagtgcataaattactagaacaattaatgttaatgcaaaaaagagtctactcttctctagttcccaataaattatagaaaatagtctgttaggtttatagaactcttattggctgagattgaatgtcttaagtgagctatgttaatagtcctaaagggtgtagctaaagaaacagttagggatgagttagtattgtttagagtaaaatttattctgagagatatccaagtgtcacaaaaagcttggaaagatgtgtaatacttcctttgatatcaataagattcctattttctaattcttttaatattggaatggaacattcgtgtatcataattagaccaaaaaagcgtctcgaggcttaaaaacgttattttgaacatacattatccctgcgtgcggcctgtaaactaggcttaagttaattgtgaatcagcctaatcaactttttctgtttctgcttttaattaaaaggttaactgcttaagtacttggtaacactaaaaaaacaggaatttcaagaaacaacatactaatttggaagtgtgtaaatggagcattagaaattgattaataagagcaggagagagccatgttacaatgaaatataaagcatgggttgcagacataccttcccagagccagcttctttccctgattctggtcctaattcttcactctgtcatacaaaatcttattatttatatgtaaaacccctcatctcctccgcagaggagaaaaaaagctaataatattgttgtcttattaaatagatcattacctgtaaatgccagattaaagtatgggcaaatgtatcacttctttgagctgccctcagcaaatattcttctactaacctctggaaaatattttttttttgtaggaatcagaatctagtattgtgaaaacaaaatcgatgtacaatacatataacaaattatgaaagtctgcaactccaaaacatttatttgggaaaaagaaaaggataatccaagacttggaatcatcagaataactcaccccttcatcatatcgcaatgactgtactagctgtggcatgaagaatgttacttgctcaggaggatatgactctaagaccctaagaacatatgccataacacgcggatgccctttaaatgccggagtaaggaattcaagagcttgtgtaatagaacaagctgcccagtgtggtaattgttgcaaaagcacagagttttcatctattgcctttggggtaacaaaataaggcaatgcttcaggaatgcttcggatatccaatatatgcaactgcaagaaatattcgagtttaagggttgtgcaggatcataaactatgataataaagcatcagcaaagtttgataaaactaggatatttttcatggactactagatcatatgtaaggctgtcttaatctaggtatatcaaaaaatatgactagctcataattttgatctggaatagaaagttgttgtcgtaattcagtgccttttattctctttttagtctggccctacccgaactagtctcacaggaaccctaagagctctgcctaagttggacccaactcaaggaacccttgccactacagcacaaaagccctagggccactgtttagtggccaatatcattggcattttcatgtcaactttgagaactaaactaaggtgtgaaaattaatttcaacaacatgtcacctatcgtgtaattcaccattgctgttaccaatcaactcaagttaaataaattcaaaccatcataagacgtacctgaactaaatgagttacttcagccttcaagaatgtgtttgttgggaaccttgatgctaaggatatagctatacgaggatccacagagaaggcagtccttgcatattcaatccatttatctgagctaattttagaccgagagggagtatttttcctgaaataaaagtaaaaataaaaatgaaaatcatcacttgctacactcaatcaattgcaaggttctttgtttttttttttctttcaaaataatacgacaaagttaatagattcgttgttaagtttactttgcatgagagggttcagcccaaacttcaagcctatcagcctcatgctgacatagcatcaaaagtagaagcttcagcttttctcttcccacagcatagtcctccatcgggccccaaacagggtgatgttgattgtcctgcaattttgtaagtactattattgaacattgctaacaggtcatgcacaatcccaacaatataataactgacttgctgaataaaatattatctgtatattaaaggtcttactctttttattcagatatcattaaaaattcaaaacatttacgttctacaattcaataatattaccacatcaaccacactgctcccattttcgcgtgctcgtcccttggaatcagattgacttgcatctactcgctcatttgaaaggtagtgcacaaataaagatacagattgagcttcactctgggcaaaactcgaattgttggcatcataccactcaggcccaaacgcaaaccagcccaacgagaccctgtatcaaatccaatgataacttacaaattcaagtagataaggtatacatagaaacctatttgcacatgccaacattatttgaacaagacgttttgagaattcaagaaaaaaactaattaattgaaatgtggagttgaagtttatgcacaccctgggactttgtgggattcaaaattttagtagcatttacatgcatcatagttcatgatactgagaacatccaacaaatcaaagtatttcaagctacatggatactagttagagaaacaaatgacaaggaaccaaccaacaaatcaacttatttcaagctacatggatactagttagagaaacaaatgacaaggaacgtattagaccagttgttcgcctaaaatattccagcagcaatgcaagcaatgataaattgctgacctggattaataattaatgtacaagtcagcatgttttattaggtgaaaatctgtgtttgagtggttattctagtgagctagttaattattctaatcaacctatttgtattatagataattaaatagaatctaaggcagtaaaaaaactagtagattattgtagttattgttgagactctctgtggagatattccaaggtctcgaattgcttggaaaactttgtaactttggttctgtttatcaatatagattcactcaaagcattcaatcaatttagtttatagtaagagaaatactcaatgaaaatagatgcactagatacaagtcaaggacatgatatagcgcagaggactgaattgcaagtcagtgagtatgcattaagtatgaagaagtgactttctcacctgtagatccaatcttccagcaactgaagctctgttttaaaatttagaagatttccctgggattggcatgagcagaacttcaggccaagaagcattagagtgaaaaaggtaccagtggcagcaggatgacgtgaaaagttccacgggagctttgttgacacttgtaacattcgaccaataagcaaaagttgctcaatactatgatgtcgaactacctaagcaagcacacaaaaaacataatgtgaatcatcttaaacaaccgcataaagaaagagaaaatacacacaccaacacattgatccacagtaatcatattaagatatgacacaatgaaaataaaaatgtacatcaagataccacatcaattatcaaagaagcaaagatataaatattgtgatatgacacaataaaaactatattatacatgaagataccatgtcaactatggaagtagaaaagatataaatgaaaaagaaaaaaaaattgtcaaagacagatttaatcatggtcaaaagagctaaagatttctatttctcaacaaaagaattgaagattctcatcagtttcaacaaacaacaagatgagaattatcaaaatttgtacaaggtagtaagcattcctactagaatgagaacaatcccggattatctccaggcaaatgataaagaggaaatcatctattacaccatacgtatctttcttatagagaaaaattatatttggtgcaaataatttatgaaaaatatacattttgcaatttaacaaaccatggttgcatttatcgattcaaagcttccctccattaccaaatgttcagctcacgcatcaatttgagcaaagggaggatcagagggatataagttatgtaatttcaaacctcaaagcgatcgatgaaaaaaccaagccacaatctttgagccattatttgttcaacaggatcaacttcaggtggcccttctggctccgcgggagcaaggtgaggacttaattttgcagctggcccagaatacttcacatcagacgcaaaaagaccttgttttgtatcacttgtccacaaccatgcatcgacaagttcagcaaggacaagggaaccgaattcaggtgcagcagaaactaaccaggtccaaatgaaaacaccagtttccattgcatcttgtgtacagatgtaagctggacaccaacagagtagacgaagaagttgtgaacagcagtctacattttgttttgaatcagaactctggaataggatagataatgaattcaggcacacaaataccaaccctgatttttgaaatacaaaaaggtaaaacaataaatttttttaccagatttgataaaagtaatgcagttgcctgggaacaagtttcacgaaattgtgacttgtcaacttgcccaccattttttgcaatattaacaaaatttcgaagtaaacagacaaacttgatcgacaacatcccatcctcagcctgtgatcggcaacttgcccaccttctcattccagcaatttctccagcaattcctccaacatggtagcatttcactgttgcgctcactatcccagtactgagcaccttcaaattaaagtcttctgtcaatttcaaatttgctcctgatgctgctgcagcagcagccatgacagctgggatatttgctgtccgtgtggcggtccagcactcactttttgctgtaccaatatgtatctcagttagaagagaaaccgcatcagtatcagttgtatgttgtgctcttttccgtgtgtattctttacaaagcttgtcctgcagtatgataataaagcaataatatcattcaaaagagtatgctgagagaataaaggttcgcatttttacacgtgaaaactactttttttttttgaaggaaaatggacacgtgaaaactacttaaaatcaaaataaacaaataaaacaaaacatgtggtctgaaagatgtatcatcatacttattttcaggaggtcgtggaaaattaaatgagcttccacgaaacacctcctaatgcaaatagattagaaataaaaaggggatggcttgcaacctatgaatagatgtgattttatgaatttcaatgtaaatatggtaagatccaaaaccagtgaatccgttcaaaatatgaccgtgtaagagagcaacatattataaattgacaaccccatcattcacagtcaaagaaacaagacttcttagcatgtgagaagaaaataatattttttttaggcaagggaaaataatgccactaaaagttcacatattttgatacttagagagatggacactttatttgagagcagagttttcaacctgtagaagaccttggctggtgcaaggagcataggaaaatgattcaatgatccattctcgaacaactttttggtacaaagaacgaatagtcaccacccgagtaggatcattgacaacagcagaaggagaatcattatcaatcgagaacagcaggaaatcgaaacatgaagagttccataaaatctgtataaatgttgaaatcttttatgacttaaataggtaagggaaattgcacaataaatgaatgagcaatgttgctggcataatttacctgtggaaatctatctctaatttgctttaacaagctcacagcaacttcacggatacgttcctccctctgggacatacttttgataagaaaacaggcatgtacagaaagagttgattctctaacctcagcttcctttccggtttctgatatcctatcctcctgaaatcatataaaaaatggtgacattggcaaggcatagacatagcagctcttctaaataataacaaaatccattggtttatattaaaatgggtaaagcaaccacctacaataaataatgtaaatgcagcatccaataaataatgaaaatgaagattgactccatgtaacatccttcaggaaaagaaacagctatttttgggaaaaggaacaaacgagaagggttaagtttggaagttctcccacaaaaaatacataccagccataatactgctgtttcaaaagctcgatggacaattgccattaagcattgaataacaactggcataagatttggtgtttttaagtactcaaatacacaactaaacgcacttctaggtttggtatctctgttgaggatgccaccattactaccaaagcgagttatctccaaaaatgctactgcaagaatatagattgcctttactcctgcaagcattgaaaagtaccattcgaaacagtaaataaagaatattgaagaataaagagaaattctaccttaagaaaaacagtgcagatgaattcttgtaaacaagtaataaagcagcaccaaaaagggagaggaaagagggaagaaaagtttttcctaaaaccgacaaataagtatattgctctcagacagtctcaaaggagcacaaacacaaatcctaaaagttataagagaataaataacctgtaattgtgctcattgatccaacatcgatgcgccctccaagagcagcagagagagcagctttcccattgccacttccttcacagatcccatggttgtgaagagcattgagctcaaactcatcctctagccatttcacggagccaacaacctaggaaaatggaacaaaagcctcaaaattactcacaagacagaacaaaatacaagcatatatactaaaataaatgagccttagttcaacatggaaatctgaaaagtacaacacgtgtaaaaaatgatgattgattagatgactttgaatgacaagttctgatacaaggagattaacgaatagtgaacacaatgaacacacaaagctattaggtgtagcccaatcatcaggagttagatgtaatagacttattcagtccaaatatttttatcaagtttgatctcccagctaccgtcaagctctctaggataaactctacttgcacgcatagaaactgggttttgagtaccaattgcaatttggcaacaaaacggtgctcttaactcaaactcataattcttacataagaggccaacaatgaaaaagatttttagttctacatgatccagaaaaaggaataaaaaaagagagggtattttgagtttaaatattttaaaagaaaaaaaaaatgtattatgaaaaattaagcagacaatagtttggtgtacttcccaaaatctactgactactaccaaagatgttataatgaactcctaggttgaacatggatttctaacacagttcatccttccatacccccaaaaatttttcactgataccagtatgttattcttaatataacaaacattacccccaaataaactttttttctaaaaaaaaaaatgttccaaagaaagagatcaggaaaaaaagtaaataatccaggatactcatcacaaacttacaagtggaggtgtcccttgagcaattcgctggacagcagaagaccattgtgtattccacatgtatggacccccaacagcttgaagagcaattgtccccgtacccacactgttcaatgaagtggatgttgacttcgttgttggtggttgtgttttttgtatgggaggtgctaaaccaaacaaagtaacatagaaccacaggttacgaaataacttcaaaagtgaaggttccacgtctatggtcggatcaaaatcagaacatatttcagcaacagcaggaagtagaggcccgaggaaatctgctccatttctgcaatattagaacataatttaagaaaaagattaaaagaagaaagaaactagataaatccacatcattgaagccttgcagaacactgcatgcattgtaaaatcaaagccagaaagacaagtacagcaacataattgtttcctaagagttctaccttccactttttgatgcggcaaagcctacatcagagcacaaagatagcaaacggtgacgataatctgaacgcaactttatattttttagaccactagcaatgagaaggaaccctgcagggagcgtctggaatgtgattgaatcagtgagaatctattggacaatatacttcaccaagtaacttgtaagtatcatggtggttcatatttctgatgaaacactgacctcaaccagctctgttgtagcttcaggcaccaatgttctactttcagcagatcctacactcaaaagtttatgtaagaaacttcttgtcatcaaaataaccgtttcccgataggacttttcaaaacctaaacttgccatgcgtgatacagcatcaagaagctgcaaaaaattattagaacagattttagaaactgccatcaaattgaatgaagcaataagcaatttgattacaatcaagtaacattaaatcacgagttgaaagatagttataagaaataacataaaatacatgttttaaagactgaggttccatactcggggtcgcaataaactaggagccgaatcattaccctcttccagtccatcaataaaggaaggtaaaatcttgtccactacttcagacttgttaacagcaacacttaaatctgctagcagaagaataacattaagctgcacaattggtactgctggtttgtttctctcaacctgaaataagaaacaacataaaatgaaatcatcaataaatatgaatttactcctcttaaaacactttgtttagaggtagctatctgttttttatttttttttagttgattagagcatctttatcctctcttcttatttgtttagagaattttacttcatcttcagctatctgatcattataaaagttaatgttttccgatgccaaggtagatctgtcatttatatagtgtttgcaaatatattaagattatagtgctatttataattaaatctatataattcaatcacaagtatttggttacataagaagtgcaagtccaaaagcatatatgctaaataaaagcataaaccaacctgttcatcatttcgttccctaatacttttaaccaaaccaaaaatgaatgtatcgacaaaatgtggctcattgctcctccagcaacattcaattatttcacagctcgtcttcatgacgctctcaaacattgctccctggttaactacccaagtatcagcatgttgctattacatagagggaaaaattaaacagatatttttcttcaacacattatatactgttttacctgaggacatagatctattacaacatgcttgagccaggagaacaaataacaaaatgattggccccctcgagttgttattgcaatttgtgaaagcccaccaagcaaggaacaaaagagttcttcacacattctcaacttacgccatgctgaaaataaacatgcttcagcagcattcgtaaacaatgttagagtctgatgtgtcaacttctcatcagaatcaaagcaagcaagaacctttatagccaacgtaacagcagctttataaactaacagctttgcctttagaagtgagccatgctcagtccaatcacgcttccttatctataaaattttcacattactaattatccttccattccaggtcatctgaattaaatatttctttttttttttgtcttcaataagtccaaagattctcaaatgatacatctaattctaaagtagtaaacatgtatatatatatatatatatatatataagagatttaccttcaaaaatactatcatcgactggagatgcttctttactactagcctaatatgcttcgatacccttttgtcgtcagtactacagactttatctaaaatgtgagtaatcaatttgaaagcaatctcttgcttctccaaactctccacagtctcttccttttcctcaaaggaagaggcactagtagtagacgaacacgaaatttggttcgtttcatttggtgagctttgtgacgaacaaatctccgagttggcttgaatttgttcccacggagtaaccggagaccgaacctgatgaccaggcgcgggtagctgatcaaggagaagattaatcaatttttcagcgtcggaatccgaaattggagggaagctctcagacaaggccataagaaaagccctagatatactcaaattttctcctcctccaatactgatggccgacaccacaacctcgcctgtgaactccactatctcagctgtgaaatccggtgacaattcagcggctttgcatacatatctcaaaaactctgcaaagaacgacgccatcgcatcagtgccgaatgcttgcggccaaaatgatggactgaatgaagccagaatagaatgaaaaaactccaagaccagtgttttaggacggagattggcggaatctgggcatttggagagtaaccgagccacggcaaggagggcattgatttgaggacgcgaaacgctagcagaaccagcgacaagatcctcaggcgaagggcattggctacaaatccaagacagcttctcagataactgaattggattctgcgcaattagatcgcagagctcgatcaaagcttccatagagaccaatgaaagaacaaaaatatctttcttactattataaaagcgatgtattcgaatatcggattaacgttgagaacaacaactccaagactgttccccctaaatccctcgcccaaaaccctatcgagatagaagatgacgatgataatgattctcaaaagcctacgagtggctccaaggagaatgctaaagctttggctaatgcgtctcaggagaaaagagagaaccctgagattgaggagggtttactggatggttcaccggagggcttcccgatcggttcatagagattagttctattgatctctctctctatcactcgaagttttctatttgtgatatacgagaaaaggaaactacaaaactaaaccgcttttcgcgcgcttgtcttaatatttttttaatatatatatggaaattcgaaataattttgtaaaattttttctcaagtgaagacattattcaaaattttaagaaatttggaaaattcttaaaattttgtaagttatcttaaatagttataacgtacatgaatataaaaaaaaaaaatagactaaaaatttttctcgattccgaaacaaatcaagagtgtatcagtacatccttttaaaggggtgcattgtagaatcacgttattgaagaaaaattgtatttggaaattctacaatgcacccttaaaatagatatattgatgc

SEQ ID NO: 17958 - DNA, 4778 bp, Cannabis sativa
aatttattattgaaaaagaaccaattgaagtgtctagattagatcaactaaatttatattatgtagcatgtatttcatgtaataaatagttgttctagtatttcctgatgaatttgcttgcatgtcatcagtattaccattacaccttttactgtatgaacttgtaaataaaaaagataggacttataaaccttctctctctctgaaaattctcctcatttcaatagagaatatgtatcagcataagtacccaattatccatgcgattgaacttcaaagaaaataatcaaaagaaacgttgggagttacaaattgagttactgtactcaatttaataacaatggaaaatggatttaaataaaatggctgttaaattgagtctttgaaactgctacatgtggtctgttttttatgcaggaatgtgagtctgaattgccagaaaatctatcagatttcagaactcccccatcacctccttcgagctacgataaccaatgcttaaacgaagatgactttagtaggcctccaccggagacaccctctcaactacattctacaattctaaatattgagccatctttaaacgatggtcagcacccgcaacacacagagttgaaccatttgtacattcaacaccaatttgatggtcagttcatcgcacttggttccacgcgtagatttcgccaaaaatatgttaggatggtattgtacaagcctgttagaagaacaaattgattatggtttggtgggagtaaatttatttgactgtgataatgggatataagaaggttttgtggttatggcttaaggggttttggaaagcagtttgtgtaagtaatggtaggactttcttttccaatatacttcattaaagcgatcatttttcatgatcatgaaattaagtttcagattcctgtccaaagaaactagtggttaaaagctcatcttttcaaaaatttatcagaaatcatatcaaatcagatgcaacagaaagtagtaaggcccaaatatctattcttcatccccctcatttaattcaacacattttatgcatcatgtactcttgcaaatgaaatttatagacaaactacaagataatacattaatgtattgattcattcgtatatgagaaacggatacatatatacatatctgaaacaagtgtaggtgtagacaaaaaaatccattgaagatatcaaatggtggcaattaaggtggttattaaatactaaattagaaaaactcatcatgatggctctgctaatatttttggtgctgcaattctaaccaactcatctaataggtattttttttttttttttataaaatgtcaattttattgaattaattgcattctgaatacaagagagtcttcaaattaggccaaacatcctgttaaaaaatgctacaaccagaaagaaatcgagcatgcttaacaacttgatttgctgatcgtttaataaaacgtaaatgtacatcatgtagagaagacaataaaattgacaatcctgaatgattaagccaaaggtggaggacatttcttgattacttcggatggcttggactgtaacaacctatcagattcaatctctacattatgccaatttctactcttgatccaactaagagcttctttgatccccaacgcctcaaaaacctcagccgaatatataccacatttgtgggctattttagcttcaattagttggcccaggttgtttcttgcaacaataccaaagcagtaggaggtatcttgatggaatagagcagcatcaacattaatcttgatgtgatttaaagccagttttgtccaatgctcagctcaatcacaattgttttcgaaagtttatgacaatagagcatgtttatcctgaacttttctccaatagtcaagagtaatagatgcggagactaaagtatcatttacggttgaatttcacttgttccaaacgacattgttgtgagctttccacaccgcccaacacaccatagcagtacggcaaacaacatcagtagttgatgcactctgcaatgtctcaaatcaactaccaaatgttgcaatagcagccatgttaatgggaaaactgaagagtgcccaacaatttttggcaaaccgcagatgagcagtgcgtggtaagttgtttcagcatgggattgacacacagggcagctagctgaaatttgcacatgtttggatacgaggttcacacaagtggggagggagccagatattgcacgccataggaaatttaacattttgggtgtcgtaacttacgccagaaaccagagttgttaagcccaggtgttgctggtttttgtttctatagcaatgagtaggcgctttggacaaaaaaatgacctttgtgatcaacagcccaagaccagaaatcagtacctgttgtgttacccaaaggaatgccaagaatcaagttggcatcacgaactgaaaacatgtatttaaccacatccaaatcccaacttcggttattaacatgaaaatagagaactgaccattgattatgcagtccaggatgtgtagaactaatgaatctatacttagggtttggcagccaaggagtaccaataatattggtggttttaccatcaccaacaacccgcaaagcaccgaggcgaaccacgttttgagcactccaaatactgcgccacacaaagcttggattattaccaagttcagctgaaagataatcaccattggggaactatttgactttataggctctaccaacaagagatttgggtttacacaataagcgtcacccttgtttcgcaagcatggcaaggttgaaatcatggagatgtctaaagcccatgccgccatcttctttgggggaagctaatctatcccaagacatccaaataataccacgtcctttacttgagctagtcttccaccaaaagctggccattaatttctcaatttcagtacaagtgcatagtggtagaaggaaaacactcatagcgtaagggggtagagattgtatgacagttttgaggagaatttcctttccagcacaggataggaattcgacatcccaactgtttatccgagcaatgattttattcttgataaaaccaagcacgacatttttattacgaccaataatgttggggagaccagggtacatactgccttcaagagcttcgatcatatggaggatgtagcaaacctgagaccgagttagagcatcagtgttagggctgaagaaaattgaggatttggagcgattaaccttttggccagaagcttgttcaaaaagctggagaagtgtggaaatactgtcagtagcacctcttgtagcttggaaaaataagtaattatcatctgcaaagaacatgtgtgtgatagggggcgcacgatgagcaacacgacacccttgaataagattgttggcttcaaatttctagattaaagtcgaaagaccttctgcacatataatgaaaaggtatgttgaaagagggtcaccttggcagattccacgagacggctggataggctcaacacatggccaccgtgaacaactttatgacggactgttgacacacaagtcatgacaaggtcaatccatctacccacaaagcccatacgatgcatgactgctcttagaacatcccattctactcgataataggtcacccgatcatttccaacgactcccatgaaattcataattttttctattaaactgagtcactggtcagccttcatagcatccaggcttcccaaaaaaactggaggctcttgcttgcgaaacctctcatacaatggctccatacggtggccaataataggttgttttgttggcaccattggaaccaaagccatcggcagttgctgcggaggcactgcaagaggaccctgctatctcagcctctgaatttgttcatcttgctggaggattcgagcttgcgattcttcaaacctttgcttccaatccaaaggagcttggggtggattctcatgtctaccaccttgaaacctttcacagcctctgtcacgtccacagggattcgggggattttgacctccccgaccgcttccgttctcaaccatgttaccctaactccttgtatttcactaggcctccatttaataggacttagcatgcaaacccatgagtcaggtaggtcagaaagcgatcacataaactctatgtatcgcactttatggattttaaggcaatgcatttaaataaataattataaactattatgctccctaacatgcttttctaatttactaaataagtaaaaacttattaaaccgtaagtcgagtttttctctgatgatgattgtacatgtcttgacaatgttcggtagacaaacttggtggctctaatatcaaaattttaacgccctaatacataggcgcgctatagtgattttctaattattgtgccacatttgataatcaaagggttttccttgataatcgtgccaaattaaatttttgatttaaactattaaactttataaacatatacattttataaatcggaatctcatgtttaaacttttacagtcataatcaaaataacttttacagatatgtcgcacagtgactacaaaatacagcctaagtcgtcccgagacaaaacactcagggtcgtatcaccttgacatgtacaatcatcacctaagcttgaaactcactgttgttcagctttcgtcttccctttaccaacacacaaaaataatatctgtgagtcaacagactcagtaagaaaagcacatgacataaaatatattaccgacttgt

SEQ ID NO: 17959 - DNA, 2952 bp, Cannabis sativa
  modified_base (295)..(297): a, c, t, g, unknown or other
accttaaaagttcaaggggcaggagagataaaaatcctagcatagatatatattgcatcagcagtttcttttcttattgtttgatatatgcatcagcagttttggttatagtcttgtaacttgttatgtttgtttcgtggaacaaactaaataacatgtagtttaacttattctgagtatgaaacgaacccaaatagtacattatataagtcttcacggaaattacaagtaccttaattaagctagctagagaggtactactactcaagccaacctcttttctctctctctctcnnnctctctctatatatatatatagtagtgtgattaagtgcaaaaatagagtcatcgtctatttctttttggttgatccaaaaagaaagaattattactctaactatttgttcttattggaaaaaagtcgaaaaaaatagccatatattttctcttggtttttttttttccatagaaacaaactctcttaccttaatcgatcaagggaaaggtaattaagtgatcaattaaagttaaaaatgatgcattgttctcaaccaccatctatgtcgtccatttgtcgcccttgtgcagtttcagtcccaaatctcaccaggtatatatatatatatactttgtttttgtgttaattatatatgttttaattaatataatatttattgttttgctaattatatatttatctatattgtgatcatgcacagatcagtgccgttcatcaacgaaaggggaggaaaggggagtaggtatatatatataatatatatatttatataattatgaactgaacgattcatataattaaatcctctatctctacttcaactaattaattatatgtatatatataattaaacaatatttattaattatgaataatataaatattgtcaggtcattgcacaagtgtctcccgcagtgtgaatatggagagcctccgtagtggatatctgtttcctgaggtatatatatatatatatatatggcttaattaatttgttatataacacatataaatgattaatattaataattaattaaaaacagataacaaaacgggagttagagcatagacagaaatacccacaagaaaagttgattaggcttggtatcggtgataccacggagcctataccagataccataacatcgtccatggctgaggtaatttaattaattaattatatgaaagtatatatcacattattattcttttcacatcagtcttcctttattattattattattattattgttgttgcatgttgctgtttaggaaattaatggacacagaaaatataatatttattaatttatttaatatatttataattaaacattatgatatagttttgttatattaattatgatatattaacataaattaatggatcgtacctcacatttgcagtatgctctcgctctctcaaccgtgaagggctacagtggatatggagccgagcaaggcaagacggtataaataaatacatttaacttttacacattttttctttaaaaataagtaccaaagagtaaaactttattagtaaaactaaaaggagaatgcaaaataaaaatttgaacttaatagtagcccataaagtcttaatttgtacacattaataatgttgcatatatgtaatgaacttaatttaatcaacatcatgatttaaataattttaaaatgtacaagtttatatgctttgaatttcaaagtcaaacaatacttttctcaattttcaactccttaaataaatcaaccttgtacgtataagatgatgacttcaaaatttcgttacatgttctcagtattttgccttctttttaggtactttcttagaaacttagttttatatttatgatcaataaagtttatttctttttgctaaagatttatgaaaaattaataaaatcaaatacggaaaatatctctttcaaaagaaaagaatatatatcaatatataatatattgatatattatatattatatcatgatgattatgacccacaaatatcaaatggtatataagataatattagagagaatttggaatttttttgatttttgtatgagataatcttagagagaattagtttttaacattagccaaaacagaggattttcaagaaaaaagatgtaagaagttatgaatattaaattgaacacaggaattaagggtggcaatcgcagaaaagttatacagaaatatgggagtaaaaggcaatgaagtttttgtatcagacggcgcacaatgtgacatttctcgccttcaggtatattacacagtatatttttggaaaatatcaagattaaggttcaaataaataatatgtttataaattattataattttttcatgatcttctaagttgtaattactacttagtattacttataaatttttaaaaaattctagataatttagcgtataaaaaaaatagtcgcgtaaaataatcatcgtacgatactaactagtgctagcaatgccttatttatctatataaatatatatatatactaaggttattattaatgtacgtcaatttaattatatttttagtttttatttttgttattatgtgtattttaaaattttataaattaaaaggaaactatttattatttttttattttttaaaaaaatattttaaattttaaaaattttaaaaaataaaatttaaaatttaaaaatactaaaatagaacatactcctaatattaaaaataataatattataaataatatattaatatttatatttatttataaaattaattttattaatacggttaaatttaataaaatattcttttatttttaaaatatattctactaaactaataaaattagttagataacaaatttttatatataaatataaaagtagaattgttgttttcatgtatttattggtgttattattattaaaataatgt

SEQ ID NO: 17960 - DNA, 4564 bp, Cannabis sativa
  modified_base (657)..(670): a, c, t, g, unknown or other
  modified_base (4190)..(4190): a, c, t, g, unknown or other
agtatcaatgacaagttcttcttgttcgacacgtgaagcaactaagccaacctcatcctcttcctccaattccaatgatgcccattgatcttccaaaccttgtaaatccatgtatcactcagccagaacagcaagacaatttcaataaccacccagagcactcaatcgagagactttcctaacataccaataggcagacaaatttgtttgttcgtttttagattatgaaaaaaatttttagattatgaaaaaaaaaaaatttaaaaaaaaaaaaaaaaaatgtgactctcttaaacgtactctagtgactctctccctcctcaaattcctcgaaccaactttcattcatattgtcccttcctctctctctctctctctccccataagcacaacacactacaaaaaaactttacttacttttagtcacaccaaaacttttaaaagtaaaaaagttgtgactaattataaatcaacattcctacattgtgactaaaaggttcgtgagtaaaaatattagtcacaaaaattatagtttgttgtgattgattaatgtatttttagtcacactatttgttgtgcttaaaattaaattagtgccaacttgtttctaaattctatgttttaatcacaagttacattttgttgtgactaaaagtnnnnnnnnnnnnnnaaaaatttatgttatgactaaaagtaactattttttatgtgacagatgattgaagacgccggagagaccactagggccacgaatcatgcacattcatcgtggaaaacccaaacataatgcacatcccctacaataatgggtaagtgtttttccaacaattccttaaacattcagaagagtgtagttcatttcttgtaaattgtgtggtcattgtttgcatttgtgttattttgctattttttctttgaaattgtgagatctggttttttgctgaaagctgtgtttttgttttaaaattgtgacgggttttgatattatctcaatgtgttttcgatgtatagtgtaccaaggttagagaggaccttttttgacagtttgtcaattattttgtgacagttttttaataatttctatggttgtttgaatgttttaacttttttgattatctttaaattatcgacaagatttcgatgtcttttcgatactttcatgattattccttgaaaaattttattctctatctttcacgattatttctcgattctttttctatacattcttgatggttttttggaaaatattgtcctctatatatcacaagtgtttctacattatttttggataattcctcaatcaatgcctggaaaatgttgttttctacctattgaccgagattttcagtaactattaattagagatatttgtagtagttaatgaaagtcgaaggaaggaattttacgtggttggggcattaatgaaccttagtccacgagtcacttgtatttataattattttcttacagagaatccaaaaaagggatccctatttcatacattattggagtattttataggctcataataatggtaaaaaaacctatattgcagtacttatatgaaccatactttgcataattttttagatttaattatagagcatgatttcctattcttttttatgtgcttaggcttgatataggagtttgatgagactaaacttgtctcttgccaataatttgatggctcataatgtagccgtcaaatcatgtatggggcatcatgaaattagagaattataggtttaaaccctcgagcatgtctttttaaagtaatgtgtagtatgatcttcctcatgccgcattaaatgtgtgtgtagtaatttgacctcaagcagtatgccatgcttcgtatgtctttctatctcttctttaagtcgagttcacttacggagaagaaaagacaaaactattatcctcctggtggctccttttagagatgactaatctcttgaaagtcctaccaattaccatgctccggaggttatttattatggcacatcccgtagcaagggttccactgccacatggcttactcctgaagtgccacatattttgaaaaaaattccaggcaacatttacccccaagtcttaatttgcaattttgtgaaatggggcatgcaacctgccttctagagcacagacatcacgctcatgtaggcagcacacgtgaccgtatttaatgttatttaatatctttcctcaattttggtgaagctgatttgattttccttttaattgattttgatgctccattaattccagggtatcagattgttgcttgagtagtgtaaccgtctattatactcatgcctctaacaaactagccctagccatcgaatcgtgggggtttacgtaagttcgaagtgagaccgttggatgagcaacgactcgagtcacccccgcaactctataaatgtctttcatatctttctttttcaaaatttcactttcacatttcttagaactcaaaccagcaaaaatttcatgcactccagattttcttttgctttttctccaacggtgccaagttggattttatcatttttgtgtaccagcacttgcaaccactcgagcttctcctgtttgtaagtcattttccatgcgcatatatatgtattattttctattattatatttttttgttggcgatcctttttcaaaaatactacatttatactgtatgacagttactttggagattttcttcggtcgtcctcagcttatgtcttaggccatggcttccatgcctagggtttatagatgtaaagcattgtctcacaggaacgccacgtgtgtgcttttacaaattaattttattattaatctatcaggttaagaaaagtgtagtttaattaaaacttttttatttaaactaaaataaaacttttattcaaaataccaccataatacagggatcccttgtttataaattcctttacaactagtttcaaaactgctattacaaaagtagggttacatttccaaatatagtcaaagggttgattgtgttccctgaaagtcgagacactgcggttgataagtacatcgcatggagacctctgactcatggctgattcacttttcccttccctttactagcaccacgaagcacccgtgagtcagaatgacttagcaagaaagcaagtatcacaaacagtaaataacatgagatagtaatacaaagcatgtcacacaattccatactacacaaagaaatgcttatacaacacataatcaaacattacatgacaactatttgcttaataagacaaactgttcttgatgcctcataaagcattattaccactcatcatccacgagctacatatgtcactatcgatgcccgatacaacaatcgataagtaagaaacctatttgcggtttaaagcgagtaattacccattcatgataaacaataatgatcgtatctttatccattttcaataacggtaatgatcgtatctttatctcgatcataatcgagctacgcacaatagtaatcattaccacgatcataatcgagtcacaaacgatactaatcgttcttcacttaatatgcttagcagtgtaattagctttcttacctcagtccagtaattagatgtgtgcgtcgacctgcatggatcaaagctcaacaatcccgggtcctatgtcatgacaacaaaatctgatgaataacttatccaaactccaaatcaaaccctaattctataaccggataaattctaactcccccactggttcaaacactactacaaaaatgggttttccttacatttttaaacagtcgtttaaagtattcccgtcagtttctataaccgtcgcctatacgaccgtcgtaaagcgggcagaatagacgacgatttaaaactgtcgctaatgtgagtttcccgaaggtttaaaatcgtgtcctacactataggcgacggtttaaaaccgtcacctatagtgtagggttaaaccgtcacctatagtgtagggcatggttataaaccgtcgcccatagccagttttaggcgacgattttaaaccgtcgcctatacccagttataggcaacaattttaaaccgtcggaatgtaaaaaaaaaagagaaaaaaaatacagattaattttacctaaattaaaataaaacactttgttacaataacaactaattttaaaacacattaaatttatacantaacaaaataaatatatataataaataaataaatgtatttataccgagcttagagagagggagacggacgagaggtggtggttgtccggcgtatgagacgaagatgagagggacaatgacggaaggtggtggtggttcgacgtatgcgatagagagtagatggagactgacgggaagaggggtgggtggagattgatggacgagagagacgagaagaaagggagatgattgcgagaaagagggaggaagacggcgagagaaaatggcgatggtgcggaggcgtgggtggggttttggagagtcaagatttttgtgtttagggtgtgggaaatggagaataaataggtgaaaagaaataagtgggcatgtgggaa

SEQ ID NO: 17961 - DNA, 4939 bp, Cannabis sativa
tttttttttttttttctaatatcaaaactttatttatattgatagtgaaaggcatgcatgcatacatgcccttttggagaatttgaaaggttagagaagccactcgtatatatcatctttgagacgtggaagtggaccccatttccgattgatgatcccaaatgacaatgactcatatatggttggacccctttgcaccaattccatagaagaagtggaaatttcaagatgtcaatttcatagctgaacatttcttttttggggtaatataataacatgggtttggccccatatatattggtaaggattttactttaattatagtgcataatgtaaataaataataataataatgggattgaattctaagttagcaaacttcattattcaaagcattcaaattttaaaaaatatatcttcgacttgaagagaaactcaaaacaaaaatgtgttggttacgaactaataaaaaagtaaaaatggtgaaatataatttcagcattatgttatccaaactgtgttttttattcttggtaattatgttacacgtttagatgatgtcaacacaagaacatgattaacttcaatatttaaacacttaagtggtttggtaggattgaaaatataagaatgaaaatgaccataagaataaaaatagtaagggaatggaataaaatttaaaatatacataaaaaaaattgataaacaaaattattaaattttttctcaccgtgcattgaagaataatattctaatactttaatatgcaatcaaacaaaagaatagaataaaaattatttcattttttttcattccattttattacctccaaccaaacgtcaggaaaacaaaaacaagatacttaagtgcctagttattaatactttactgtaatgagtaagatgtcagcagggaaaatctaaaatttcctacctttaatcaagttagaagaaaaatacctacctaactttttttttttttgataactaaatacctacctaactttgattcttcatcttcttctcttttttcaacattagtttttagagggtcatgtttttgaatgtttaaattaaaaagaaaggatatttgcggtgaaaaaagtatttaattataaccttgtaatacaaattaattttttagaggagaaattaatcaaattattatattttggcactagtacaaagttatttttcttgttgtgaaagtactcaacgcataaacacagtattaaaaataatttgagtacttaactattacaaatataataatatttgtatcggcaaaagaatgatctgaatagttaataattagggatgattttataaatatacaaaaatataattatatggaattttaaatatttttatagtttttaagatttttttttatagaaaatatagttttttggtgtatgtttatattgtatttttattattttgttatttgtatatttatttttatgttgtttagatatttatgtgattttatttctttaataaaattttactaaaaaatagtaatttatgtcatttttcttaatatttataaacgaagtaattttacttcaccactaaaaagacaacgtaaatacttaaattcaacaaaggtaataaataactaatgtaactttgccgtacatacgtggaatttttgtaaagttatttgctgataaatttgaaaaaagtaaaatgaaaacacaacaaagtagccaagcaggccttgaaggcccaaatgtaggaccagaccacactgtagagcgatatatggcagcagtacttggactacgtcagggatgaggcccacaaaatccacttattcgactattcgagacgtggacagctggggcttattttttgttaagctttttccttttcttcacaaaattatgttattttaacgaaaataaagtgtgtgatagagagtatatggacacatgattattagaatttttgataaatttttatttaaggacaataataaagagtaacccaactttactctcttttttcaaatatatattaatcaaataatcattaaaaaaaaaaactgtaggtttctttattttttgaaatatgaatgctatgtgtttgttcaatggtcctatcctatcctactattagagctcatcagctgacgtgtcatgttcatctcttctctatttataattgtgtactactcaactctggtctcatcttcatctactttctctacaaccaaatatagaaatacataaaacaattttctttgatttttatagtatattaaatatctatatattcttttgaagtcgttttcttgtttatttttttggttaatttaatttgtctggctgtttgaatttttgtacattttattagtgagtctcagctcagtctaataatttttacaaaatgaccgaactcttaatttaaggatgctgggcctgttagtccagcttataccgtggcccttaagtctacaagtttaacctttacgggcccaccaccataaccagcccaggccaccagactagacaaatattcacctttttaattttataccttttcttttttacattttaaatgatatcaatatatatgtgtaatatatcccacgtgccaatttatatagaaaattacaaattctcctgtattgacatatttttataacacaataggacaatttagtccaaaactttaaaatttacagttttttactttcaattttaccgtattatattagttttatttgtatctctataatctattgcaagacaagtatattctaattttgaaaagagaatggaattttatttctcattctactttaaataatatttctttatagtgaactttatcaaatgtcaagaaatgagatatcaaacatgtttagataaccagaagaaaaacatgtaaaataactagtaaaaaagaggtgatttttgaatactcaaataacaaatattactaattgggaccacaataaaacacaattaaaaatttaatggtagtagaaagtgactatttagtaatgatgaagaaatttccaccgtacaaaaaaacatgtgtaaaaagcaacgaaaaattgatttatatatctctttagggtattattttcaagttttgtcgtatcctattattatattctaaaggagggaaggaaattaggaaagtagattaattatacacactagatcactcatgttataataagggttaataataggcactgtactatattggtagccaagagatgaagcggcacgtgcgaggcacgtgagcgtgaaataataattagggaggtttggattgaatgtgaacgtagaattgtattgtattttgtattatttatggtccagtctacattcaaaacatggcaaaggcaattacagtaaatattatagtaataatttattatatgagctgggttgttctggctagtggctgctgctgcctttgaatttggatttgaagaaaatagtcaagttgttatatcataagtgggccaattggtcataaccgtagtctaattattattgttgggagtttatagttgagttaatattactctttttcaatcttgtaaaatattctgcaaataaaaaatagtattatttgtgtcataaaatattaaaaaatttaagtttgtaactagtataaatttaatgattatttttacttatttaaaactttaaatatttatactacgaaaattctctttttgtattttttttttaataagaaaaacctttcatacaactttacgaaatgaattctacaattttatattaattatggtaaagatcattcatatagggagtatggagtgtaaaattttgatttatattggtaaaaaaagaagtgatgtaattttattaaagggcaagcaaaatcaaatttgtttgggtttggcattaggtaactaacaggtacaacaaacaagagaggaaaccaaataaattagtggaagacagaatagaggattagatgctttcgatcttcccaaaatcaatagcattgactttttgcatccaaattaggacccatcaatgagctcgttttatgttttgtcagaaactgcaataatcaattattagttaatcaatattaatttaatttaaactctaattcctcatttgttttgtcagatttccctggtaaaaaataaaaaaaaaaaacccataacctaaccaaagaaaaataattggagcttgttcagagtgttctattttatctttattaattaattgctgataagattggtagtgtaagtttcaatattgattcgacacgaaccaataataagctttaaattatagtaatgataatgatgtaattaaaatgccagatatcattgattggaaaataatgaaaatgacgtaaaaatcatgaaaaagaacatttggatctgatttattatgtatgaaatgaagaaattaaaaaaaaaaaaaaaaagattctacctcataccaatatggagctggtgcagatttacttgactatacttaatttacatttattgaaatatcactctcttttttttagtagtaataatagtaatactattggtaattaattaagtttgaaaagtagtaaaaaaagaggatgaaataaatttaaaaaggaaagaaagaaaggaagggcatatcacatggggttatgagactgtattgcactaagaggaagggagaagacaaagacaggaccagcaaagcaccgaaaggcattgtgtccacacgtttatgagttataacatttactattattagccttcaatatatgttctctagtctctactctacacatatatatgtaatgtagatattatcattactaatattgttttttctgctatatatatacattaattttaatttcccaaataaatgaatcgttttaataatctataatatatactatcgtacgaataaatgaaagatatagtgactctgatatca

SEQ ID NO: 17962 - DNA, 3868 bp, Cannabis sativa
tattatatctatcctcattctctcccaagggaccccacaacaaccagaagcccaccctaccatgtataattttgttacttaacatacattttagtataaataatcaaggaatattcttgggtaaagagctacttaattatatcctaaattatataaaattatagcaagttaagttcttcacatgacacgtgtcaactacccattaattctgaactttagaaactatatcaaacatacccaaagtacataaccactactacaacatcattaattatatcatcaaccttaacaaagcataaatatataaatagctataatcaagtagagatccatcattaattaataattagaacctaactataatatacacatatatataatattattatatttatagttttatacgtttcatcatgcatgggagtccggtgagttacggctgtaggaattgaggcgaagctctagggaagctcgggaaccgccgcggccaccgtcgggacaaaaccacctggagtagtaggcactgccaccgccgccaccgccggagtagttgggcttaaaactgttggagaagcagccattaatgtcctcagcgtggactgggaaaagagggagggtttcaatcttctgggaatgaatttcttgatgatgttctacttcaatattatcttcttcttcttcatcatcaagaggtctcttctcaaacaaagtattataagttgaaggataaggatccacatgaccaacccatccaaaattgtgaccattattcacttcactgctaccacaatcctgctaattcattcaaaaaatatttataaatataataataaaaaaataattcattttgttctcttttcataataaaaaaaaagatcatttaaagatcacttcttttttcacattttgaagattatgtacttttttttttgcaatatattatagttgtgagagtgtgtctagctcatttattaacattaaagaacccccccataaaaagaaagaaataaaaggaatttgatctctttaagatcaatatcatttcaaaacaaaaaagaatatatgtatatatattttatcatgaagattatagaaaaaattgcttcattcactcacatggtgcaagtttatgtttttttttctccatattaaaagggtaacaaaacaaaatagctatgaaagttataaaaagaagcattatataattttgtgtaatacacacatatatcataactaataactacctacatataaacatagaagaagtatataacatatcttttgcttggtaccaaagttatatatatatttatatgaaaacatctttttccatagttattataatcacgtaatacttaccctaaaattcacacctccatatccaaaatgccccatctgaccaaccccattgttagcacctgaaattttttttaaaaaaaaattcaacaaaactgtgtcgttttatgcatatagaatattgttttgttatagtactcaccattaccatgagcgtagttattgaaagattggtattgatgatcttgatgatgatgatgatgatgatgtggaggtttccaagccgttggattaatcagaccaggtctttgcatggtagtagtagtagtatgatcagacgttgttgtaacaaacctcttcttctgtctttctctagctttatggttttgaaaccagtaaaagacatttttaccctcgatcttaccatactgtcgtaacctcgctgagattttctgaatctgttctgctgatggggatcgaactccatcgttgtaataaaggcttttcagtattcgaatctgatctgttgttggtgtccaacgactactgctttgtctaaccaaaaacccaccaccaccacccccacatttagatgacccatttccatcttcatgattttgttgctgagaaatctccatagttaacacacacaaagaaaaaaatgaaattaaaagtgataattatagtaattgggaaaaggagaaaggagaatcagagaagtatctgatggagaaggactggatttgacaaagtgagtgagtgagtgagagagagagagaatggaagctatatacatatatatagagagagaaagagatttttatttaattatttttattttttaggaaggaaatgaaaaggggacaaaagaggggttaatagaaaggttttgattactttcatcaaaacctaatgttttttattttttctatgagaaagtttcttctgtcctacactaaaaatactccattgctggtgctatactatgtttaattaatgagaaatgcaaaaaagtaccagtggtgtcatggactctcctacgtgttaatatcgttattggtctaattaagtatcgagtccttataatattagtttttaaggaatatcgctagcaatcgcaacatagacgtcttaagggtgctaagcaccactagttctcaatagcaatgcttttaatcaattgacctacttaatgccaaattattcttttatataaaattataccaagttaagttcttcacatgacacgtgtcaactaccccattaattcttaactttagaaagtacatcaaacgagtatttttattaagcaaaatttgtgtctaatattttttataaatggcatcttgcaattaattagcaatattttttaaaaatatatatttttttaagttgtataagactcgatacttgtttataccaataacaatataacactaaaaaaaaatattaagcactaataatatttttcaacaattctcatatatatctaacatacccaaagtacataaccactactacaacatcattaattatatcatcaaccttaaaaaagcatatatatataattattcttattcttgtgtactttaaactaaattcgtgcgtgccatatgttattttagctcatactataccttactttttaaaatataggtagtgtcatgtctattataaaaaatatgagttgtgttgtgttgttctaatatttttaaagattataggtttaaattatttaaagctacttaccactaataaagtttgtatgtatttagtacattaattaatcttttattgtttttttttttttttactttaaactatatttaatactataaaaatacatcattttaacatgttatattatataaaaaaaatatgccctcatcttaatttgcaaaaagaaaacatcccctcaacttaaattctaagtccgttatactttttttttttttttgcaccttaaactatttgatacaaaatacatgatcatacaaataagaaaaaaattaaataaactagaagcttttataaagacttaattttcctatcacttttttgtaaggggtgataattcgtgtttgtgggttgtatttgtgtcatgtcgagattcgtgtctaataagtatatgctcgattcgaatacgacccgtttaataatcatctcagaaaataaaattcaaacatgactcgtttataaacaagttgatactgacacaatcagtataacctgtttataaatatattttaattaaaacatgccaactgataatacgtttatgatatatttaacacgtttatgacttattaattataatctgttaaagtattaaaataactttagataagtcattaacgagttaattttgtgttagttgtattaactcaaatacgatctacttattaaactagattagacgagtcaacccgaacataattcaaatctattaagacaaacccaaactcgttaactcttatgcgggtaccgttttgatgttcctaactttttgtggtgtttaacttcacttatgactcacatatatagttatgttattattaattattattattat

SEQ ID NO: 17963 - DNA, 7019 bp, Cannabis sativa
tattaatgagtaaatctgattatattgaaaagggttttatttagggcacaaaacccaacacttaccccaagcttcttcaatgacttgccataactctcatctctagatcatgcatcaataaactgaaaaaggcatgttaatgtgatcccggtcacaaaaagtgtctaacacaaccatcgcatggtcagagtgcctagtagataaagtcttcatatcaactttcttaaactggatcacccattttacagaccccaacactcaatcaagtttttctctgatgagattttgccatttctgaccattctactccgtggaaaaggcccctacgcattcatattcatcgcactagtattaaaaataaattcatgcaatccccttccttctttatccatcatcgacctaccaccacacttctcatcttgagtgaacacaaaattaagatcttccaaaataacccaggggtctaaacacgaattcatctccctagcaagttcaacccaaacggtatcacaatgatcgcgatggggaggagcataaacgaaacaccctacctagatttttatgtttaactcacctaacacatgaactgcaattttgttaatttcagtgctaataatttgtaaatcccaacctctacgccacatcaaagccactccaccagaagcccctatagcagagacaaccgccaccccaaaaaatcccagctatctacttaagacattcatctcattgcttgatctcttggtctacatttagaaaactagatcaggattttcactacgaatcaagttgcctagtgaatttagagcctgatgccttccaagccctaggattaacatgaggggttagggggtttgtataggcccacctcctcagccttgagaaaatccttctcactctgcaccatcttgttttcatccacatctttcttggactcacagtactcctgagtttcctcttgatgacctccttttgaaccatcttcattgataggaatggagccactatccagaatggagtcgtttgcaagacggaccgtagagcagggggtcaaacacgatttcttccctttcccatcctgatttgaaatcattaagtctcccatccaattacatgggccctcaatctcctcgatacgcctcttttttctactgcagacccattagaagaagaagaaatgctaggcccaccaaaacaattaggagcacatttgaccctgcttttagtattgggcttagcagctttgtgggccggcctgtggtttggatcaacaaaccccttaaacaccatatctaagtttatcttcagtgagaatttttatggttaggcctgaaatcacattgtcctatttcatactaagaccaccaaaaatcaaggactcctaagccatgttctctgacatcccaacattcgcttgcacctcaacattaccaccatccaaattcgactggccattcataccctctaccgtactatccccatcgataggatgagttgtttcaatttctgggcccagaacaaccggtaaaaccaacatcttgaatctcatttactcccatatttcgactagtaacagtcatggggtgtaggaaagcttgaagctcaaatatggttctcaaacactaaaaatagagacctttagtttacttgtgaatactttaatttctatcaagagagcacatttagtttctatcctgagaacactttgttagaaactttatttacgctttgataaatccaaaaaattattttcatcttcttcttttacttaagtgcttgttgtaaggagaaataagtttattaacaaaagtgtaaaaccttgttgaagtttagtgattttctattatacaccttgaaatatatgtggtgttgagattactctcacatttcttttattttttgatattcatttttgtgttttattcatttgtaacttttagtttggtgttgtacttctttctcctcttcgtataaactttatttgagttgagttgcattttgttagttttattccattgagcattatttttacaacaaatattagatatatttaccgatatatatacatatattatataaaaatacaatatttcaaaagtagcatttacattatgtttaggacataataagagtaaagctctaacaggtcattttctcaaccattaagcaaagcctaattctttattgttaccaggttacttaaaaaaatcttgaactatgtttggtagagaagagagaagtagagggattgatgaatcattttgtttgacaaaaggaaaagtatatacacaaatttcaatcccaaaaaaaaaaaaattgggatatctaagaagacaaaaacattatataatatgtcatttttatccttttaaaaataatatataattgtctttttaatatactcttcattctcgcatctttactcgtaatattaagtaactactctttccataatgctagtaactatagattaataatccaatctaccactaattgaaaccgcaaatattcaaaagaaagtttttaagggttaagatattttttgtaaaaaaagcaagtatccttttgaccagcattttttgcttccaaacatgggacacggttttcctaaaagtattcttttgcaatttaattactaaaaataaaacacacatcgccaatggttgctttactatccattccatgagcatcttttttcttttgcttttaagagctttttcataatgaagcttaacagaagagataagcaaaacaaagagtatagtataattatgggccccttctttagtgctttacccttcacttttgatccctacaatcattgctatacacacacacacgtatcacaataatcttcaccgaagcccaaagttttgttagctaatgaccttgttaagtacactcctaattcctaaagccatccaataccatttacttcggaaactaggcttctcccctaaccttacaattttttgagggaccaacaaattataacaattaaagtactcagtagggacgcaaacatcagatatcttgtggcattttctttctttgaaaagaagactcgactgctaataaaataaataagtgaaactcttttgtatacataaagcatataagttacagaaaatttacactcataaattacacacaatactgcaagaagtagcagttgcattgcataaacaaagtacgtggatatatttttaaacccgggaggacagactacgagagaaatgagacctttctcaccttataaattaaggaaaaaactcaccatgaaactcaggaatgaacagcaatgtcaacattttcctgtccgtttggaatcaccttgtttatctcatcgagttgctgagaattatcactgaaattgcaatctgtgttactgttgccattatcgatgtagctcttgtccttcaggttcatggagctagcagtagtactatggcgatttcctggaccataggttcctttcactttgttcactgtagcactgcagctctttcttcggccaagctttggtgattttgcacgggttgggggaagctaacatggaggaaaaccaaaatatttaaacttcagtcagtgtatcaatattactagtgaacattctttttcctaaatctaatctgctgttccattaatttcaaaatctaacaaagccattaacagcagaagaacaaataaaatattttaaagatatttaaacttcagtcagcgtatcgatctgctgttctactgaattaaaaaaatctatcaatgctaagcataagaacaagtaaaatatttgcaagaccttcttaagttcagtcctgggtggaggaccctcatggtagaaactaggcattgggtttgccttaaatgttaaactcttccttaattgtttaatggctgcctccttctcttcctacaattccaaaatcgagatattaaataaatataactccccaaaaacagagcaatgaaaacccacaagaaatgtaggagaagcattaaaagattaaacattgtacatacacaatcatatatgtgttactaagctatacactagggctacaaaacactaagaaactatcagaccttggtccttgcttcactttgagttttctcagcctctaatgcttgctgcttctcctcaagtttagtataaaactaataagaccatatcaaagggaggtcaataattattcatcctgagcttcagaaattaaactttagatgataaattaaaattacctccctccttttctcagcacgctttgaacatctaaatattggagctgatgccacagttgtcctggatttccgtgcagaggcttctgttctactcatagtcaagggattaaccttactctaaggaaaagacacaattatgaataaagagcagaatgttgatattagattgaaaattgttttaaggatacgatgaaacaacagagaaagaatcttcctcgtcaggacgcttcttgttagtgggttgcaatggttttcttggtactgaagatgaaactggctgcataatgattaacacaaagatatcacaagaagttacaaatatttgtggtggataaatcatataatcatgtctaaggaaaaatcagtcaatgataccttatcagcctcaacataagaaaatctcatgtatcaaagattattacgaaggacttcccaccccagaatccagattactattattattttggtgagatgtccaatcccaggtttatttatttattttttgaaggaccccaggtttataaaacagctaaaatgaagagcgatgcagccctgattaaagactgtcatggctgtgccgagtgagtgtaattgagtggcaaaattatatttttaaagaaaaaaacaccatatcacaagtctaaagcaaaggcctagttgttgttgttttacctgattcttctttacagtattaagatggagattatttgtgtttgaagatttattgactccattgccagcatcaggtacagcaccaacaggacgaggtccgcttgaagcacgtttttcagttgctagagcaaatggttgaggaatagtatgttttgttttaacatttccagcaacagttttagatgcacaatttacagataatcttgatttattttgatctttcgttttctcactgtccagatgagctttctccacaggttggtcatttcctagatcagagcttactatatttggttcctcattagagctttcattgtcacataattcagaattattttcgttagtacactccttcacttcatattccttcacttcggttttctcttccaaattcttgagttcatgttctccatttatgtccacacatgactctgtaatagcattatcagctggaattgattcatgatctgaatctggggaagcatcctttggataaatgatgacacattctgactccttgtccatgcaaatatctgtaacttccatccccatcgcactgtaatacagaagaaaccttagaatcacttccttgtgaagatagataattgactatagtttatattttcgcaacatatgacatgcatgaattcttataaaattgctaaaagtgctgagactattactcatcatgcaaacaccaaaaaactgcaactgaaattaatgaaactccaattgtgtgaaagtaacgcagcaatatcatgataaacaactgtcaaatctaatcttttaagataagaaatttcacctaaggaggatagaatgtccctatcaggctacacatacattgatgacaacaatgaaaataattccaaacataaataaataataaatgagtgcactacaaatttagtatggaaaaggtttggctatgttaccgatgctaatattcctattataagcagagcaaacaggtaaagataaaagtcaatacaaatcatctcatcatatatattgttaagaataaaatgttaaattacactaaaacaaaacaccaaattctagtcaaataagaccatccacaagatatagaagcgaataagaatattgttatgtaaatttaagtttaataatgtcaaaagtcttcaactggtacagagaggaaaatataggactctggattgtctaaaattgacaaaaatcaatatgggtagaaactaaatcctcaatagatactgtaactgaaatacagaagttcatttactacgataattcaaaaaggcagatgtaaaaaaccctagaatctataagaactgtattgtgctagccactacccacaattcccttctttttccaaaaaatgaaatattggaaattcctgtcttaaagaacaataccagctatacttattgaaatcctatctacaagtacaacaacttcatagtgaaacatcaaataactttataatgagacaaccattaaaaacacaagccaaattcattttgaaccacgcagatgcaagaatatcttcattttatctttttacatatgttcagtaaaatacacaccagtgacaacaccatgcaccatgtgacaaatttatcaaaaagaattatgtattactcaaccagaaaaaaaaatgcttgaccaaactatacaataaattggtgaaaaaggagccataattttattatttacattaacaaaaaacacaacagccaactaataccgaaggaagcactctctaatgatatagctatttacttacatgtaataaaagctatgatgtgcataacaccaataattaattaaaggtattccagaacaaaacagttcaaaaaataaataaataagaacaagaaacaacaatatcatgacaaaaccaagatctaatgaatgataaaaggagaaacttgaagcaaaatataacgaaaactcaaaaagctttctggcactttaagaccagtgggcaatggcatagacgtgtttatacatgtacatttttatatatctatagccgaaacaataagaggaagatttctcaaaatcatgtctcatttggtctaactctttatcttttctttcgttcacccttaaattaatagaataaa

SEQ ID NO: 17964 - DNA, 2274 bp, Cannabis sativa
tttgaaaattgaaaacaatattttaatgttttctattttctagtttttaaaactcaatttttaaaaaacaatttttaaaaaattttgtcaaacgacttttattagtttttaaaaactgtcaatttttaaactgtaaagccaaccaacctctaatagtgtctagtattttttgatgcgttaatattgttattgaaccaactaagtatctaaactcatctaatttaatataataacaagaataatcatttaaaatcattaagccgcactaatactcatagtaaatacatgttggagtgaagaagtgagtattgaaaaaagagattgatttagtaagggaagtaagtagactgtttttgggcaaaatacaaataaagagtcaaatactctgaccagctcccgaacgcaatccccataggccaaatgttatgtgggtcccaaccacctacagatacttataaaaggagatctttttttatcttgctctccggtggaattattccacgcggctcctggtgcgtgatttacaaacgcgggggttggtgctttgctttgctccgcgacaaaattaataggtggtggccattaataatatggagaaattacattgaaatttattaaatgtttataaatttatgatttactttttttaatttatttgggccaactttcaataatatttatatttttgttatattttataatatattttagtattttcacaatttaattatatatatatttttaatagttacccttcttataaactcgttaatataatatagcatataaaatctcatgagaatttattaatttaagcgtgaaaaacttttagggtatcggctaacatgatctatataaccatagcaaaagttgatcattcacgatccattgttcaaagacaaaattctcttacacaataaactgatagtaccatctagttttgttgctaatggtaagagctccaacaattcggatagagttcccttgaggtaaccatccaattaaggcccacgaacaatggctgagaccattatcttctatagtgaaaagttgttaggatccagcatcaaaatgaactattggtttagagtgctaccgaattaaggaataatcacacctcaagctaagttttaacttgtgaaaggtgcgattatatctccaccagttattgaacctctatatgtggatacaacctccatgaatctcgacgcacgccaaaaattgagctctaataccaacttgaaaatatacataaaatagtagaataataaatgatatttgctcagctcaattcgagattaaggaggtgtgtttcattatataagaaaactttacataggaagattctagataggtacatctgtccattgatagctcatgattggcatagaaatatttataacagaaaaaagaatattctatttaataaaaaaaataatattgttgaatacaacgtgctgagttgtccctctactcttcgtttcaattgcagacctattgggtcgttgtgtcattttctcaacaattggggtccatcaccataggatcacgaagttcagtcgacaaggatcttcttgtcaaaaccatgattgccgattcaaaagtggattgaaaatcgtaggttgatgagagctagaaaatgcttcaatgctcttaatgaaggcactaaaatgttgacctcgcttttagccaacgacactctttaaagtaatagtaattgtaaagaaatcaatgatgaaataagaataataaatgacacacgatatttatagaagttcaaccccttataacagtaatagcttactctcttttagttgtattaatatgaagaactattaagatcacaaggtccgcccaagtgagtttctcgatacgtctcaaaaagtgtacaaatatttgtgtagagcgtctgttctcaataatcagcaacaataaatgtgaatcttgatattaaagaagataaagtagtgtgggaactcaaatgtgaaatcccacgaatttctctacttcataatcaaatcttgcgaaaatatagatttaattgagttataattgtagaagcagttaagaaaaatatctctaaagatcttcacttagtgcgtacttttagttggcaaatggcactgtttgacacacatgtctaatcgacgtgctataaggtttggcgatctattcggatgatagtcattgaaggaccagattttaatcaattcggcttagactctatctggatagtataatagagagatgtgctctgcccaggtcaaaatatgt

SEQ ID NO: 17965 - DNA, 3031 bp, Cannabis sativa
ttattttaaattaattaactttttattttttatgttattttaaaatatttatttacgtgagccaattaaattttgccacatgtatattgtgtacatgtggacaataccctatctacacatggataaccaacttaacactgccgaagatggatgaaaatggctaaatattaacagaacatgagttttgggagtttggccactaaaatttaagttttggcagttaattgctagcgaagtgaaagtattagaatttttgccgcaatttactcttaataaatataattttgagtgtaaatgataagtagttactacaatcaactatgaataatgtaattgtttttttgagaaaaatgaataattccattaaaaaagacatgaagccaaagagatcatgagatcaatacaagcataaaccatctacagtaagttggggggaagacccggccaccaaacttgagaagtttctaatgaaagagaaaaattttctagagaatgggcaagaacattactagctcggttataatgagaaatagaggcatgagaaaaagacttccaaacgtgaaggatatcagtaagaacaatacgatactcattgcaatcattctttttgtttgaaagagagttcactaggcgctaacaataagagaatatattgatacgagtatatcccaaccacacacaaaggagaagcccatggagaagggcagaagcctccaccacatgcaagcaaatccgagacaggagtgtatgggcgtctggttataattatgtttatttttatgttttgttcatgcttttcttactgagcctatcgactcacatatatttttaatgtgtgtaggtaaaggcaaagcaaaggatgagcatcaatgagcttgagctatatgaagattgtacatatcgagaagattagacttggagtgtttaaatctttagaacaattagacattatttttatagttgctaggcgacaacttttgtaactgttgtatttcaaaaaatgatgtaactttataaatgagaccccgaaatatattatatatttatgtatccaagtttaattctgaaaattttaattattcacattttttttagtaaactctttgattagcgaagaagtgtacagtaattttaaaacatgatagtgtgccaaatctagtagggcattatagagaacttcagataatctcaaaaatagagcgtctttgatgtgcacttgtaaagcgtattacaacaagatatgggtctatagtcatagccactttcaggtcctcaattttgggaattaaagaaatcactatttcattcatagacttaggcaagtgacctttctaaaagaattttaagactgcttaagaaatatcatcaggaatgtcctcccaaaaacccttaaagaaacccgagctgaacccatccaatccaagactatttgaggagtggatactaaacaaagccttcctcaccaactttatcaccaactttaaaagtggtaatttagttttcaactcttctcttcctaatactagcatgaaaagatctcgagttttcatcattacacttcacccaactgattttactctattgctttagatagctagtataacaaggcagcaaggctaaataaatcagatgcttttgatgttcctgctactgtaattgagcatctgtaggattcaaagctagagcctcttgagctttgatgaattcttccttattgaacttatactccataaccacatcacccacttcttctctttaaatttttagcacatatttgacccttaataaattctgcattatctctttgagacctccctgctctgttactattttccaacatctcatgacaactttttggtatcctcgatagtgcaaccagtggttacaatacctaaaaggtttgttacccactttaccaactttctggcttttaatcacacaaaaactatgatctgaaacacagtcccattggaagcaagcttcagttttaggaaaagtgtcaaaccagctgtcattagtaaacattcgattcgatcaagtttggaataaatccgatcaccattgtcatgcttgtttaaccaagtataatgagcccccgaacacttgaactcatcaacttggcctaaagaaaggcagttctaagcatcttcgatatctttagctgagatttgtttgccccaatttctatcttggaagccaaacataacattaaattcaccaaaaataatccaaggatcatttaggtgacctaaattagccaacctatcccaaatactttttctttcacccattgaattactaccatacatcacaattgcaaagaaatcattttgctaccaacacactttaatcttgcaatggactatttgaggttcctctaataagatagtcaccttcacaaatttattttgccacatcaataacaaccttcccgataaagtagtattagaaaaaaaagtcccaactgaggaaattattctcgaacacttctttaactttctcatgcttcaacttagtctcaaaaagagtaccaaatcctaccttattctccttacaaatatcgaagattgcttttggctttccttttttattcatacccccgacattttaacccaacatactaaaaacttccattaatcctttaggttagaattagtaaccaaaatcccatccttagcttcctgtagaactgcataaccattacttgtgatggccttgtgaggaacaaccacaacctgcttagtccctcttcttttaggtgtgaaccaactgttactgttatttaaattgtcatctagctgaattgaattatgactagactctacttgaatagtaggaacaattgctacaaagatgttagctcccctctcttctatttctgcatcctgagcattgtctagcctcttatcctgctcctcaatccctttagactgctgcttctcaacccttacatcaattactattttaacctccttcgaatgttgttgtttcacctcagtagctgctactttattcccaccattcttgtcaa

SEQ ID NO: 17966 - DNA, 3718 bp, Cannabis sativa
acacaatattgcacattggcatggtaaaacaaactcagaaagttggataaaacatgcagtatcaatggaaattattccattgaccagaagggaaaaaaaaagatcatgagtttgttgacaccatcagttcattccacatgagacatcccaaaatggattatgtgaaattatgtcactccacagtttgccccagcaaaagagcatggactaaaactagataagttcaaatgcaagattgtcctcttgcaacacagttcttgggtaaattatacagcaggagatctgttttaaccatttgaatcatacatctatgagaaaaatggagtcacataagttgctaaaagaaggagaaaaaagactacttactactcgggctgcacttgtagtgattgaaagcccaccgaagaaaaaagaaccccagatgataaatagcaaaataattgccccagtactgttattataccttccatgaaatgcatcgtacaatatctgtgctggtacaaacactccagcagtctcattgctcgtatcaaacagataatcaaaatcctgagatgaaaacatataaatcagttctgtaatttaagactatgagcaaggataggacatactctaacaggccattcttgattatctaaataaacatacatgaatgctgaaagtaagagccaagatataagcccagccgaagagtgaaatgatcccaatgctagacaaaattgcaatagggccattcttgtctgcgcctttggtttcttcagtcaaatgagctgcagcatcatatccgtacagagaatactgactgacaagaaaagagagaatgactgcataaggtttgcttgatactccagtttgttcagttgccatttcaaattttgtgaacacatatgacgcagattgtgtactcagagctaccaagggaagcattattacaataatcagacctccaataacctgccacaagagaacttttggaatcagaagtttcccaaaataatcgataaatagatttcacgtttcaactacttttttttttcagtaactcattgctaagacagtgggctgctgctaaccaaattgttcatattaggaaacacacaaataactagttcagttgaaacaagttacttgaagtaaaaacatttgagtaagtcaagaagttaagacacgctttagatataaatcaatgcctcaaatgtactttcaatagtaaaggaactgtaatattctagaaagtagttggaatatcaaattcaaaacctgccaccaaatggaaatcatgtcgataaaggcgatcacttccaaggcaaatgtattgagaaatgcccatataagtgtgaggcccgtatacatgcacaaaaacaaccattttggagcaagatagcctcctcctttgtttgttccagtgcataacagaatgatactctgtagtgtttgtgatcctgcatatgcctttccagccaagtaaaatttgttgattaagaaaagcctatatatacaaacaccacacacaaattataataatgaaagacatgaagaacgtccaggatgttagtacctgagtacctatgccagcaatgaggcctatggtctcaagccaagcacaacaccatgatgcaaatggaccccactttgggccagctagatgtgcagcccaaaagtaaagagatccagtagtctgctcataatacaagattagttagctgtgttataaagagtgtgaaagcaaatcagtacattcaacttcatcttcaaattccaacacaataaaaaccagcttcaattgtttacgtcaagatccttgatcctctcaagcaataataaaatgtctcaatatggcactatttcggaatttcaatggttcaaaacatttaaactaaaatcaataacatgattgatatgaatatgatatgattttcatggtggaaaaagaaaataaatccatgtgatatatgtaaatatgtagaagaagaagaaaagaagtttaaaaaggaggactaactggaaaagaggaacagatctcagccatagcaattccaacaaaccatgtgaagaatgacacaacaacccacccccacaccagagaagcaggtcctgcatataaaagacttgaaccatagagaggagtaattccagtgaaaagtgtcattgttgaaaatgatatcgccagagtcttgaaaagattctgcaagaaataatataattagataatctttaacaaattctcatctgggattcattaaagattatgctaggactcagtaccatttctctcctgagttcttgtttgtatccaagctcattaagacgtttctctccagaatccatttctgggatttgctgttccatgatgcgaaattagtcagggcaacaatctcttatatatatatatatgtgattttcgtatcagggaggctcaggctgtagtggtacaactcatgaagttagttaggtgatttctctcttctttttcttttttgacaaagttacatagcttctctttagtagagaagaaaatggcaaactaaaggatgatgagaaaattataataataagcgaagttgactatgtatggatcttttaatatcttggtaatattgaacgaaaataaaatccaatgtttcaaaccgttgaaatgtccagattgtcgttattggttccctcctaaaaatgtttacgtaatcattgcatatttgatgtttaaaatcatctcaaagcttggtatggtttcacattaaaatgcatgtgaaccaagggggtttgggtttcaaagttggaatgttttgcattaggtagctgccttaagctatggccccattttgaaaaaaaattaaaatataatcaaaaaataaaataaacaataatactcatagtactaaatatacattgcagtttagtagtaatttaattagagtattatttaggaggtttaatattcaaatctcaataatcttacttttttattgggtcttattttttatttttacctagcccaaattagtatatgaaaatttatgatagggttgttcatttgattaaattcgtacttttttggtcaaacaactttcaatttgcactaagcggatttaatattttggatccaatccaatccgcataacagtttaaatccaattcaatcagcaatagtgcggattggatcgattgttttaatgtagattgtattttattaatttattaaaataaaaaaaatagtaacacaactaaaattggagatagagtttccatctattttaatacttgcacaatggtcttaattatagtgtaggagaagaaaaataattaggtttagaaattagaatttagaagtttgtttttcattaatattattaaaaactgatataattatatattatatatacatttaaatatatatacataaataattaaatgtgaattggattggatccattattttttaaggtcaaacaatatttaatctacacaagtgaagatttcatatttttcaattcaatccaatttttggaagtgtggatatcaacattttatggattggattggattggattgtgcagattagattggatcggatactttatgaacaaccctaatttatgagtactttactaattattttattagagtgattccctattatacaaatatgtgagtcataaattagaaaattaagagaaaataacgataaatgcaattcatgataattggtttgaaaagattt

SEQ ID NO: 17967 - DNA, 1421 bp, Cannabis sativa
ataattaataaatttatatcttataattattattactatattataaaattttttaatatgtcatgttgtgctttttaggtttgtcgtgtgttgtacttttcgggcttgtatattcgtgcttacgtgtcgtgttgaaggacatatttttcgtgctgtgagtgtcgtgtcaatttgtagcatcgtaccatgtcatgctcaaacttgtattttttcatgtctagtcgtgctcgtactttttgagttcatgtcagtttcgtgtcatgtaaagaagcccgacgtatattactaacactaatatgaatactttataatggattttgttatagtttagacttttttttggcaaatttataaaatgttctaatagtttaccaaatccatatcaaagttcaaacaatttcttactctcaaattatttaaaatttctcaaaataaaattacaataggtaattttatgactttcaataaagcattattttataatagtaatacaaaataaataaataagcttctcaattaagactcaagagcgtgcctatatgtatgcgtatgtttatatcattttcattagtgattttactctctctcctctctctctctcaagaccccaaacaaatcaaatcatgtggccaagtcaaaaagatttcaaaaccactttaatgtatagtagttggtctacttaccattactattttcttctctttttatagacccaagaagtaaggcataaataaattaaaagaaagaaacatcaacatggttgcatggttgatataactttggattttggagggtaaatcaaaatgattgcctttaactctagattttgtgtgtaacatttgggctccatccatctatcatcttaaaaaagagaattgccagaagagactctttagtatttttttcagtgttatattattattagtgtaattaaacatcgagttttatataatttaaaaaaatagtttttaaagaatatatattgctaactaattgaaaggtagtatttatagaaagtgttaaaagaccactaatacttaataataataatctttactttaagaaaaggtaattaagaaataagagttggcatttttagtttttagagatgggaaatggacctttgaccaaacttggtagaaacagattagtgggtaaggctatattgttttttgctataaaagaagagaaaagatatgtggggaagaaaaatatatcaaccattgatgaatatgagagaaaaaggttataaaatctttggaaaatattcttgtaataaagtgggttaattagttggatagcctaacttgtttttgtttttgtgtgacagctttgataattttaatggtcggatttattacgtgttggaatactaaattttggcttgattttggtgcgtttcttaatttaatgtttttata

SEQ ID NO: 17968 - DNA, 4031 bp, Cannabis sativa
  modified_base (129)..(129): a, c, t, g, unknown or other
caagcgggttaagggtctactagtgttgatttggaaactctattttgccgcttaggtcggctaactgaaagagacttgtaataaagtttataaatatttttgggatcccaactgttgtaaagtttaaantattacaagttttattttcattcagttttttgcaaaaatttaatttctgcgctattttggttagtaatcccgtttaggggattagggtttcttaaataacttgggtagcgtgcctaattatttagggcgttacagaaggagtccatgtggagacaaaagtctcgggaatactggttgaagcttggggacagaagcacaaggttttttcatgcggcggcttcaatttgaaggagaagaaatcaagtgtggtacctacaagacaaagagggaacgatgagggagaacaccaaagaaatttcagttataataaatgattatttcaaagagctttttacctctgataaacctgaaatatcaatggaaatggaagaattatttgatagtaaaattgatgaggaggcaaaccaatgcttgactaaaattccctcgtgtgaagaaattcgagacagtttggagcatacaccccttaaaatctcttggtccggatggacttccgggttggttcttcagaaaatattgggatgtggttgggaataatgtgtgttcggcagtccaagaagcctttatctcaggagaaattcatcctaagctgaattacaaatttatatgcctcatatctcaggtgaataatcctagacgaatggattagttcaggccaatcagtttatgcaactttcgttataagatcattgccaaaattctagccaatagaatgaggcttatattgaaggtttaatctccccattccaatcagcattcataccgggtcattggattgcaaagtcttcaatcttaacccaagagcttgttcatacaataaggaaaaagagaggaatgggaggtttgatggcaatcaaactggatatgcacaaggcatatgataggatggaatggacttttattcgaaaagttctcaaggctaatggatttgataaaaaagagttgtgggttattaatgtcatgtgtgactggggtatcttattctgcaatcctaaatggcattcctttgaagaagtttaagctgcaaaggggactaagacaaggagatcttttgtctcccttcatttttctcctttgccaagaagtttcttccaagatcatccaaagacaagagagggaaaacaagatccatggaatccaaatcgcaagagctgcaattccaatttcccacctcatgtttgcggacgacacgatcctctttgcttgagctaacaaagaggaggcaaaaaacttgatgggatgcctcaacaagtacgagagatggtcaggataagtgtgtagtaaggctaaatcaagcgtgctattctctaacaacctaacagctgataaacgaaagaaaatcttgaatctgctcaatattaatcaatcccaaggggaggaaagacacctaggcaacccttttgttttcaagagaaagaaaaaggaaagttacatgaagctgagagatagtatgctgcagaaattagaagggtggaagatgaagttattgtcatatgcagggagattaactttaataaaaacagtggcatcatcaatgccgatttacacaatgagtacaaacaaaataccaatctcaacttgtagggacttggatgggttgattagaagctattggtggcaaggaaatgtgagcaaaggaagatatttggctttaaagtcttaggatacaatctgccagccaaaagctacaggtggacttgggattagaagattcgaagactccaatagagccttaattgcaaagcttgcttggaacattgctcaggggctgagtaagccgtggatagactgcttcttaagtaagtactgcaaacatgaaacgtttttgataggaaagaaaaagagcagtgattcacacttatggaaatgtattcttgaggctcggaacataattctcaaaggttcattagccttaccggctggtggagagtcaattgacatttggagtcaaccttggattccttggctggaatttatggactttaagaacctgatggacagcttcaggccaagaagatacactgctagaacaatagcagacttatcaacagggaatgcatggaacaaggaagttgttctgcaattttttggaatgaaatcgagggatatgattgtggagattcctagactcccatatcctaacagggatagggtaatatggaaggagaaacaagaggaaaattctcagtgaagagtgcttacatagttcaccagaagctcagatttaaggagggtcaagatatatggaaatggctttggcattcagatttttacatccaagaatttcggttctgttgtggcgtgtatttcattatgcaattccagtaaaggatagactgccttttctagtggacaaggagtgtcctctctgcagttataaattggaaaattgcttacatttatttagggactgcatcttcgttaaatcattatggttctcgagcgtttttcctatgcgtatagataaaattctaggggaaagtatgctgacatttgtggagaatctaattaagggtctttctgggactgagataggaagaaaggagatcctcacatatctgggttgcattgttgaccaagtatggatgagcaggaatcaatcttgccgggaaggagtttcatgtcatatcgatgaggttcagagcagagttaagaatgtatatggaaaatactcgaactttagtaatggtaatacagatgcagaagttggccctagtcaagctgtaccaacagagagaaaaggaaattggcgcaccattcaggaagtggaatggatcctatgcacagatgcgtcttggtacaagggagaagtcgaattggcaacagttttgatcaacaagaacacagactactggacaaaaaaaacagagtacaacaaggccatttctgcattagatgcagagctaactgctatctctatggcactgtcttgggcactagaagaaggaaggtatgaaattcacattctctcagattgtcaaatagcagtgcaagctttagacaagttcttaacaagtctttgacaattttaaattacagtagtaagtttaatatttgcaagttttatcatattagccgtagtttgaatcattttgcggatgaattagcaagaagtgctagagtttttagacaatttgaagttttgtatcaagggaagggtgatccccctgtgatccctatatattttcctaattaatgaacatctgttcttcccaaaaaaaaaaaaaagaaaaacaatatcaaatagtacatgagatgtagttttcaataatttcaaaccattaattaataaataataataagtttctatcattttgaaatacttcacaaaaattgatacagacactagtgaaggttgaggtcaaagttaataacttaaaatcttggtgacaattaattaagttaatcgtgcatattatatacactacaataataaaccgaccatttaaatattttatttaattttatctaactagttgagaatgctattattcactagactattgtagtactacgtatacattgaagttagtgaaattcatgagcaattatttctttgtttcagtacaattgacaagccataaagaaaaagctaagatcgaaaatggactacataggcatgtatatctcatttattattataaatgtcttaattagggttcatctttttccattgtaatgggtagaagcttcacacaaaaacaaaatatcaaatcccactaacaagctatttcccattcaagaggggacacgtgacttagccattatagacattattataaggtgtacatgacacaaatttgacctcttgcattgcatttgcatccttataacaatattatatatgtatatacagacattactttattattcaaatcactcaaatggatgtaagcaattgt

SEQ ID NO: 17969 - DNA, 4313 bp, Cannabis sativa
tcttatatggttaactagtgatgtatgttcttctttttattcctctacatgcttcaaattgtcatctattctagttattgtttactctgtctcgatctttaacttctttttttttcatttcacaaaataatcgtaacatttttaagagcaagatatttttatgcatatgtgaacaagttttgaaacttgtatgccattaactttccttctgcattatgtttagataaatgcagctaaattttcttgtccatattggttttctcatggggcaaagtcattgatacataagatacttgaccccaatccgaaaactgtgagtatttcattttagcttttacattttagtatttcacttcagttttaacgattgtcagatctatctatgcttttcttgttttaatggttatatgttaagcagagaattcagattgaaggaataaggaaaaatccctggttccagaggaattatgtagctgtcgagcatatggaagacgaagacgtaaatttggatgatgtttgtgcagtttttgacgacattgaggttgacccttggtctttttgtgccatcttttttatcttacaccaaaaagagagactgtttatttgcagattgagaaaattccttgttgtcattgtataattatgagaggaagctggtttattactaatgtgcagtgtaaaataacctgataacctccagataccagtttaattgaaaactgatgttatttaattggtacttcaaactgttgatattttacaggacaaatacgtagcggagcagtcagatgagggtggtcctttgataatgaatgcctttgaaatgattaccttatcccaagggttaaatctgtctgcattgtttgacagacggcaggtatagtctacagtttcaattccttggacaatttatttccttatatatctataatgtttcataagtacaatgaatcatctgctataatgcatttgtttagaaatttgaatgtccattttttttttcttctgaacattattgtttcattttgatttcatattgttggctttatgcaactttttggggaaatttagctgtttcaaagtgcattttataagaatgacataattttgcatgtataaccacacctcggtcgctgctttcccatgctccaaagaagcttgaattccttcccttctcgaacagagccgtacatcaatggttgctttgcagtgatgtgggtatggatctctgatgcttcccctagctgagagaaaacaagggtgaaaaaggaaaaacgctaaaagggttggggtttgagggagagattaactttgtttactttatgtgggaaagtgtttttttctcctcactgtggttcagcaatactaaaaaagaatgataattttactacttaagatgttacactggtcatttcagtaattggttgcagaatatttgcaaattagcatttgtgtgatctattggggccgtaaaccttaaagactcttctatttataaggagtgtagcatgcacttgtaaaagtagcctcagttcattgtttttataaacaatgtaataaattaatgagcagggaatggacgaaaatattatattattggtaagtttttctattgtggatctctctctgctctcttctcagatgctctcttctcttgtcttccaggattatgttaaacggcaaactcgtttcgtttctcggaaaccagcaaaagttataatttcaactattgaagctgttgcagaatcaatgagtctcaaagtacatacacgtggttacaaggtaagtgaaaaacatttaccttttatcattgatcaagttaacaatatcaggttatttttttcaatctatattattgtggcatttcatggcatggaatatagcatagatattcacagtgaaaattccaacactatgatttatttatttaatgaatttataatttccaatagacaagacttgaaggtataaccggaagcaagactggacaatttgctgtcgttcttgaggtagtattgctttttttttttgtgggggtggggttggttttattgatcattcattttttcaagtatttctttttatatatgtataaatataacttctaaagcagttttatccttctctttataggttttcgaagttgcatcatctcttttcatggtagatgtgcgaaaagctgctggggacactcttgaatatcacaaggtgagtcttctgttcaaattggaggtaacttttagtaagtacccggcacagtaaaaaaaaaataaaatacaacagagcttcttcttccacaatcgtctttatcttctcgtccttagtctaaaagcataagcctgggctctatacagaccatacaaaaaattaccttgaagatcagattctacggtttcatttgtaaattttacaatgcatctgagggttaattgatctagtcaatattaaaatattctgtataacatgtttatagctgactcatttttgcagttctacaagagtttctgtgccaagctcgaaaatattatttggaaaccagcagaaggtatggctaattccagtctacttaaatccatgaattgctgatccatatggcagagtaatatagtaatgtctctatgtagcagaaacaccatcaagacactgtaaaacatgaaatttgtatctatacgtgtaatttaactttccgtaataatggagaatccttattgtaaatagcgtgccagaaattgtctcggaatgtagttaagaaaaaaaaagaggtattgactgattgtgcttattgctcataactaacatttctctccatctctctctctctctatcttattatataaatatttatataacgttatttcttaagtttgacagaatttgttgttagaacttgttgtgcatattaacagaatatattaaactaacgacgtatttggaaaggttgcaatagttgtaatgaaaaggcagagaacttcaatttttctttttattgaagtatatactgttcctcaaacagagtacccctgccctacgagatcaccgagattttgatataaatatatacatatagggagcttacattacatatatatacccactgtgttctttagtttaaaagatctaagtcatttgatcaacaggatatcacaatatcacaatcgcattgttcaatatgtatatataccagaaaaaaattataaagatcgaaacacaagaaaaaatacaaataatcaagagaccatacactgctcattaccgttccaaatccataactgtggtgatgaacccttattttattaccaaatgacctatccttaccagccctgcatttaaacgagattcctcattcggattgattagatatttgcataattgagaggaagaggttgtggtaagaataagagagatgagatttaggacctaggtttgagtaacaaaaaagaaaaaaaaatacttgtgccgtcatttgagtaagagagatgagaggtcgtgtcgtgtccctctactacgacaaagaaggatgtcagttttttggttttaagtatgatattagtaatgaaaacccaataaaatgagttttcttgaatatcttacattgggctttttaattattttgtttttttttgtctatcaatcaatatttttaatttgaatgttgtatctagcattttaaacttggaattataatcatataactaaggaagttgggagttctcagcatatattactattttttttcctaccctcgatatgaagattaggagttattagcattatacattagaattttttagctttgccactaactatatattagtgcaatttagtatgagattgagtctcatacaataaagtaattttaaaattgaatttcagagcttactcttaattatcattagatttattacttgtttggtataagtatagcttattcttggttggtagaccattctatccatgtataagggatatctcttacttatctaatgtatatagaagatgttgtattgagctgaacctatggtgatatttttcatatataagaaataaagcctctctctctctctctctctctctaaaacctaatatggtatcaatattttcaagccaaccctaaatcacgcttcctccattgtagttggttctcttgcagtaagttttctctcaccaaaatcaatggcacgcacgcgcagtaactatttgttagagtttgtgccctaaataaactctatttcaatgtattttttttttctattcaattatcaatacagaaatagatttattttcattaattatttaatgtgttatttggttca

SEQ ID NO: 17970 - DNA, 7867 bp, Cannabis sativa
ttttttttatttatatataaatagcagtggtagtattgtagcatcgttctgttttgtgaaccactcaaactcaccccacggcggctcccccaatacattctgcctgtcctccttcgtccctttctctttgtccaatttctacttctattctacttctacctatatacccctctcaaactccaacttcttcttttctataatgttatttataatactgttaagttaataatataattaatgatagaataattgtattgtactaaattaattgatccattccatactactattttaattacaaattaattagcttgccgacacttccgtataatatatactaattatatttattatatgcatcaacatgatttaaaaactatatacataatttcatcacaacataaaaggcggttgtcataattaatagttaatatgtatgatatgctatgtgaaaatatacgagttatattatatgtgtgcattagctttatttgggggattaaataactaaaataataaatgcatgatgttatactttttttattattgttaaccatgttattcaataattattagaaatattacaatttataattagaatgtgatctccataacactacactatcctctatatatataagttaatttgatataatcgtcatgtaataataactgcttcaaggatatttttaaataaacgtaaggcgagatccatccattaaatgacattggtttatacgattgatcattaagttgacttacatattattattattaatttattattatatcaagccatgaaagaataataataataacaataacaataatcatccatgactaaaacttctctcaatacaataattaactaatacacatgaagctaaacaaccttataattagttaacctaaactaccaatatatatatatatatatatatacatttgtcttataactagtagcttatatatagctatgtacatttattgtgtaacctactaattcaatgtttccagctaattgttttgttgctaaatcatatgaccaagcttattataaatagagtttaatttaagactaatgtgattaaactaagagaactgaagagaatggcgcgtgaggagcggcgactcgattgacatatccaaaaactagccaaactgtttgttttaataagaaagttccgccattgttttaggttttccccatttttaccggatcccatcaaccatccttaactaaatttgcaattattgttttttactttttataatttaaattatctccttttaccaaataactataatttgaatcttattggaaaatgaaattgatagttttaagctaaattgagttctataactttttaacaaatgctatggttatggtaataaaccatactgagattatagccatgcaaatatattttatacaattatgtgagaaaaatgttatttaggaaagtaattaaaatagaataatgagggtgtttgatatgagagagcataagattgctgtgaagacaaaaagcatggcagaatgggtcccactcccacaatatttctaaaccccaaaaataagggtcacgcgcagatagagggcgtgagttttctgtgtcctatttcaaagttctaccctcctcctcctctttttctttggctttgttctccattcttttcttctctactttcatttctttcgttccaaaaacaaaatcccacccacctaatctaatctaagctaattctctctcactttttttttcccttttttctaagaataaagtttgtgccttttcttttattgttggggtagactttggactttgggcttttgggggagtttcttttcttctatgtactactactttctatagccgagacaaagaagaagaaagaataagaaagaggaagaaagaaagaaacaaagaaaagaataggtaagtttgagttgagtgagtgagtgagtgatggcagcccctaacatggcaacaatcactgcctctttggagcaatctttccaaaactgttctctaaacaactccgccggagaagcagctaccagccgccgagttgtacatggcatagggaggaggtcatcatcatcatcatcagcctctacaaaccaagatgaagaactcgcagcatcacaccaaaatcatcaccaccaaacccctgatgacaataccactttagagcttaactctcatatctctctcccttaccattgggaacaatgtcttgatttaaaggttcgttctttcttcaacgaaaataaccaaaccccttttcctaacttttgtttttctgttctttcctttctttggtgttctatgttctttgatagcttttaatttcattggacgaaaaaggtaaaccagaaataaaaggcttttcgtattgtgtgttctacatttttgcttatagcccataataaagaaagaagctttaccaagttagatcaccggttttcaagtaacaaaaatgaattcaaaagaaagaaacacataagaaaaagacccttttttatttctcattgatgttaaggatgataatagaattgaaaatccataataaaacaaaagggaaaacaaagagttgggctgtccttttaatattatatattagtcatagctctgttcttgccttaccttcttgttggaagtagacatagatgattgatgggtgattaatgaaatctagttaataaattttgcagactggagagatttactacataaactggaggaacggtatgaaagcaaaagaagatccaagaacaaaagtaacaacagagtatattaacaatggtaatggtaatggtagtggtaatggaaatggagattattattattccgaagaagaagaagaagaagaagaagatgacagctcatacgacagtgaagaatcgtcgtctgagtcgtcccctcctccttctgctgcgacaacagcctcgagagaatctctgtatcgaggaggagcagagaaggaccatgttttggtagtgggaggttgcaaaagctgtttcatgtatttcatggtacctaaacaggtccaagaatgccccaaatgttgtggtcaacttctccattttgatcgatctcaaaatggctctctatgaatttattattatcatctgattctttcttttctttttctctttattttacctctgttattatcattattattattattattatgaaacaactcccctttgtgatttagaaatggattaatttgccacaaacaatgcaagacaaatcttgggctatgagtttttttttttctctctcttttccttttactgtttatttttcaaaaatattctattctttttcctttgtgaaaatacaccatggaagttgaagtgacagagatggagtcctacagtgcaagaataactaaggtcaatgggtgggagagaataatattggtaatgattacgacgtgtttctttatcatttctttctttgctttcttctgcccttgttcatggtttttttttttcaatcaaaatttatgtatattctaagatagacataaatacatatgttgtgatcctactcacatcctggcattaatctattttttcttttcttaacaaaagatagatatgtatatttttttgctgggattatatatatatatatatatgaatattgatattgactctttcaacccactcaaaaaaatttagttacgtctaacaaaagaagattaagatgaaaatttagatttactcaatactccatgggacaagtatctcattttccattgactttttcattctaaataaacattatatttcggagttttcttaattttggttatattttaaacaattaaggaaattgataggatacatcatatgaatagaatacatttgtacatttataagattttactctaaaataaatatatgaataattactcaatcattacattaaaaatgctagtatgatgactacatttttatataattgggtaaaaaatttatttttaaacttaaaataattataattaattatatacttaaaataaaataaaattttcaattaaaatatttaataagacatctttacaaataatgtttatatatactttttatttataaagaaataaatgaaatttataggtaatttattaattagttttatttaatttttaaattaatcacaaccgttttaaaatagtccaatctatatatctatatatgtaaaggagaagtatgaggcggtgatatgacacttaagataattttattctactctaaaatttttctcattttttcatattttttaatcacattaaatattaattaattcaataattaataaaaaaaaatcgaaaaaaataactaattacaaaaatattgtgaaagccagaactgctttataaataggctcttgtaagttatcacggatgggaaagatggaaaaatttgggaagaattgggttgatccacggtaaagagttctgtcctactcttatgaccaattatccaaataactctatttggattatggacctacagttagattctggagattgggacctcttaaaactctactccctctttgactttgagacttttgaagggggggtaagcctagcggtctaagaaataattagtggatctgaactgaggatcattataaaactttcactaccaagtctgcctacctagtccaagctttagaccatgtcccaccgtgtgatgtggctcattccctttggagcaaactgtggaattgtaaggtgttagagtcccataaggtaatgtggtggaacattctttctaactgcctacctattcgtgctattctgactaagcggatgcaaatagaagactcttcctatcctttatatggggtggggaagagaccatggagcatctccttccatattgcaacttttctttccacttatggagatcttttccgtggggtgtgttgtcggtcattaattatggtggtcgtgtttgggattgagtcaaattcctttggagcttaaaaagtcaaagggtgaaaatgttgaggaagttttcctctatgcttctattgtggtggatacaatttagagtgccactaatgaaaaggtacacaataatcatctaaacaacattaaacattacattgattcgatctctcattgttatgtagattatgattactctttattccctccttctcgtgatgatgctccttccctttggtcccctttctcagaaaactggatcaagattaaatgtgatgtgaaagtgaggagtggggctttgtgtgttgtggcattgtctagagattacttgggaataattttgtgggttgttacgaacaagttcaccttctctgatcccctcattggtgaagttgggacttgcctgctagcacttgagacggtggctgcttggaagcaccaatttgtgtggattgagagcggttcagagaaagtcatcaaaactttgaatgggacctattccaactagagtattgataactatatgttgtgttgtgctagtctttctaattattttgtgagttgtaatttttcttttattttaagagattataattttgcggccaataatgtggctaagtgggcttatgctcaaaaatttactggtatggttgatgtattagccattccacaaatattattagttatgaccataaggtctcaatttttctttttttttaaatgaacgctaattttttttaaaaaaaaatacataaaactaatagttaaaaatatctcgattataaaaaagtaaacattaaataatttaattaaaaatatctaaaactttcttaatttaaatttgattaaatttaattttatttactttttcattcttaattaatgaattttatttggtatactcttttatattgggtgattactcaatggttacatttttattgtaaccatgatggttacatttttattgacctgtaatagcaaggttaccaatatgtaaaaatttcttttttaaaattacattaactataattaattatttcttaaaataattaatttttaatttgaatatttaataagactctttttaacaattaatattaataattttatttttatatttaagtctctattataatttttttaatagttaagccatttaattataatatttacaataaagttctattattttataaaatttaaactttcacccctcttaaaatatattttttaataattaatcacatagtctgagaatagtgcgaaatactagaatataagaattcatgatttatacatcatatctaaatccctatttcatctgtatatcttcaagttacatgttttatacacaacttgaaaataaactaacaacttcatatctgtatatttttatcagtaatacatattcgagatcaataaccagtaatgatgtactaactttgttgacaatacaatagttaagattaataattaataataatcaataacatcggttgctaagtttatcaagaacacatgttcaagatccataaccaataacaattaataacttttaaatttttattaatacatattcaagatcaataacaaataacaattattaacttttaaactttttcaataacacgtattcaagatcaataaccgataatagttaataactttcaaacattttaataatatatattcaagatcaataatcgataacagttaataactttcaagccttttaataatatatatatctccaataggcatcaagatgttaagaattttttagttactggttttatgactctaaataaggatgatcttgtgttaatgttgggtattctctgggcaatctggcataaccaaaacaggttattatttaaaaattcttttatgctgcctactgatgttgttgcttggactagtgtttttctctcagattttaaggaggccaggctcaatccaagaaactgtcaccctcgctacagcagtcttcctactcgcaccagcaatgtcaaagagttccctcaggattttaccaacttaacactgatgcagctctggatactaccctgggaaagcttggttttggtgcagtcattaaagattggaagggccaaattgtgggggggctttccataccagcagcaggcattgtttccccattaatggctgaagcctttgctctttgataaagtctcctgtggtgctctaacatcaaaattccattggctcttatcaaaacagattcaaaggtgctaatggaaagagctagcaacctgaagctagatctttctgctctttccaatgttataggcgatattagaagctctttgtccaacttccctgaagcttgtgtccgtcatgttgctaggctttgtaataaaaatgctcattgcttggctaggaaagctttagggctagatgaagagttaagctggaatggatctgttccagttctgtaacttcctctttgtttctcttgaagttacaccgtcaaaaaaaaaatcaataacacgattaataatttttaaacttttgtaattttttctttttttatgattccactccgatcaattgatacatatatattatattaatttagaactacaaaaaaggaaggataaagtaatttcctctctgagaaagaagaattacatgacagatggtggaatgaagtacaaatgtgttgagtgcggtaaaaaaattatctttacttttataattgctattagattttaatttttttttagaaaaaaaaaaatcactcaaaccaatcttggactagtacacctatttggctcttaaagtattgataataagattgagtgtagaattacattaaattagaggttattcttactattttttattaattaaggttatgggt

SEQ ID NO: 17971 - DNA, 3952 bp, Cannabis sativa
tggagtaccttacaaccagcaattctcaaactgttgcaaaggtggtgttttgtcttcatggggccaagaccctttatcctctgtctcagccttccaagtcagtgttggcttagctggaactaccaacaagactgtgaagctccccaagaacttcactctgctcggtccaggacctggctacacctgtggcagagccaaaattgtgcctccaaccacttacttgactccagatcgccgtagaaaaactcaagctctgagtaagtccttttatctctgcatgattatttttgaagtactttaatcattagagattgctaacatcttaatataattcactatgcagtgacatggaatgttacctgcacttattcacagattttagccaggaaaaatcccagctgctgtgtctctctgtcatcattttacaatgatacaatcacttcttgtcccaattgtgcctgtggttgccaggacaagggaaattgcgtcaagtaagtaatagtacaaatatatataccgaaatgtattggatcaaattctgtagagaaaagtgtctaaatcactgtgatgaacttgtttgatttcagagctgggtcaaaacttctccagaagtctggaataaacactccaaggaaaagcaatgctccattactgcagtgcacacaccatatgtgccccattagagttcactggcatgtgaaacaaaactacaaggagtattggcgtgtgaagcttgctgttacaaacttcaactatcgcttgaattacaccctttggactctggccatccaacatcctaatctcaacaatgttactcaagtcttcagttttgattacaaacctcttgtcccctatggatccataagtgagtctatctcttgaaagtattttctcccatctttttcatatgataaaacgcatatctcatgtaagaaattgttgtttgcagatgacactggtatgttctatggcttaaagttctacaatgatctactgatggaagccgggccatctgggaatgttcagtctgaagtgcttcttcagaaagatcagaacactttcactttcaagaatggatgggcatttcctagaaaggtctactttaatggtgaagaatgcttgatgcctccacctgattcatatccatttatgcccaactctgctcgtcagaacacgatcgccttctcatcactgatttcttctttgattttgttgttgatagttattcagtgattggttacctacaatttttcaattcttcatatgtgctttacaaaattttgaaaaactgagcacgaggatatgtacttatacatgttgaaaaaaatgaacttatttttgcctgtggaaagaacaatacttctagggtatgtttatatgtgtctatggaaatagagaaatttaagctttgaaaaggataacgcttagtatttggtaagatttccatggctgctataattctaacttcaatatgaaaactttcgtctatataatttgattgaacaaagtagcaaatagaaaagataaaaggaaaagtctgtgaaaacctcagatggaattcattttcaataaagtttttaacttctgtcacatatacaaaaatgaaacttgatcagcacactaaaatttcttgctcaaaatttgcaactatttgggtatcatggacaatgaagttgaaagtcctgagaaaaccagaacttacatatttacactagtacacttcaagcaaacacatttatgaaaaccaaagttgtcaaagaaattattattacagtaagcagtgagaaatattgtttggaaccggcatttggaagccatggatagtcatcagggggtggcatgacacaattttcgccattgaaatatatccttcgagggaaaccccaacctttctcaaatccaaagcttgacttgtccttccgaaaaagtagctcggtctgcacattgccataaggtccagcttgcatgagcaaatcattgtagaacttaactccccatagcataccagtatcatctgtaggaaataacaataaatgttaatagaaaaaattccaaaaggaaaacaaacaagaacatctaagtagttcagagtgacttacttattgatccatatggtgttaaaggtttgtagttaaaactgaatatctgggtcagattgtcaaaattggggtgttgtgcaactaagttccacatcgagtaattcttcgcatagttgaagtttgtaattgtaacctttactctccaatattctctgtaattgatctttaaatgccagtggactcgaattgggcacatatggctagtacattgcaccacaggtgtattcttttgagagcctgagacaactgaagctatgtatggtgaatctggcctgtaaattaaccatgaaaatgaagcatacgaagaattattttacaattttatatgaaaaaagtgaaagaaagtaataatgttctggatgagagaaagaactcactcaacacaacttcctggttgagttatgttctttttacatccacatgaacatgtagggcaggaaactattgtatcgttgtaaaaagatgaaagagaaacacagcaagttggagccttggaagctagaaattgtgaatatgtacaagtaacattccatgtctctgccatgacaagaaaggaaaaatattagtccaaaatctcaccaatggggattacacatattattatcgctaattaggaatttcgcctccaaacttgacttataccaaatcataccccttgaaattttcaaactgtaaaaaattctctttgagctattaagattgttggatccaagaacttttgtccaattttactagcgaaagtttgatattgataaaaattcaagagacacgatatgatttggtatacttcgaattttggggagcacgatttagtacatggacaatcaccacattagtaaaattaaacagaatttcagagaagcacttgaactcaacaatctcaatagtcttgaaaagttaagggagatttggtacatgtaaaagtttaggtgacaaaaatcctaattagcttagtattattaacggcttaataaagctgaaaagtagttccaaacagattagcattcaacttactcaaggctcgagtgactctccttttgtccgcagaaagaaattttgttggttgaacaacttttgctggtccacaagtataaccaggccctggtgctttaagagtgaagttctttggcaaagtgacagccgagctttttgttcctgcttggccgacacttagctggaacgaagctgcagcattggcaggatcttgcacccatgaactaagtactccccctctgcagcaatttgcaatctgttgattgtaaggagtcccaggcaacaaatcaactattgtggggcttttcttacagcaatgtggaatggtccctttaaactttgaacaatctccttgctctgtggcttggcctccaaccatgctccatattatctcctttttggcccatgtccatcccaatgaccagcctggtgattcgaaatgacgatatgcttggaagttagtaatcgtcacaacagcctgttcattcaatgacaacccaagttaagtgttcttgatccaatccaaggataaatgaatcagataatcacttaaaagattacaacaaaaaaggtactaaataatatacaattgaagactatttaacaattaaacacaaatacataaaccacaaatcaaaacttagttcaaaaagcaaaatgtagtatctgtaacatcaaattttgaagagcctcatgttgcttttcaaaacttatcatttgcttggtatatggtaatatgaatcatacttacaacatagccatctggggtccagctaattatgtcccatttgattgtaacatttccatttgggtcaagtgcatcataggcctctgccacagagaaggaaggaagaaaaaaa

SEQ ID NO: 17972 - DNA, 3862 bp, Cannabis sativa
  modified_base (296)..(296): a, c, t, g, unknown or other
tttattggtctagtttggtttttaatattcaaaaaaccgttatactggtttggttcaaaaactataaaaatcgggaccaaaccaatccgtgaacactcctataacccatgttaatgctctgcattcgagatgaggtgaaaattataattttatcaattttgcctaaaatgaaataaaaagacttggaatgatttgagcaattgtaaatttacaacacaattaattttactgattctccaagttgtatagattataaaagccgtaatggtgttgttaagttgtaaatttgagtttangcaatacaatgattttgatttctcaaaaatactactactaataataataaaatattcagtactacactaaacttcaactacaaacgttaaaagacatcatgtgtgtatatatattttagagtaatttgcagcaaaaactcccctaactatcaacttacttacaaaaaaccatccaaaaaactttaaggttagatggttttttgcaagtaaattgatagttgggggattttgtcgcaaattacttttaatttttttttttattttaattgctcattttaatttttattttgtaaaatatggccacgcaggataattttttagtgatctgtcattgccacgtaggtaaaattagaacttaacgaagttggacagacgacaccttaaaaatgtaaacggaacagtactttgtaggattttcccactaaaatatgatgttgaatgattttttacaagtaaattaataattgaagggatttcaccgtaaattatttaaaaataaaattaatattctttttttatcctagagaattatttatactaattttgtataagactataagagtatttattacaatgctctggtctggtgcacacttgcttagattggcttgaattgtaataggaatgtgactggccttccttgtgagttgaccaaatcaaacaaattataatatatagtttgctatttgctaaaaatgagcatatgggtcaccactacttaccacgacatcatcataggacgaaagcctatattataaatattagaattggaccatgttaataataatatttcagtatatactttacaagttatttttcatttggtaattggcagaaaaacttctatccttcatatttttttttgtaatacttaaccttctgtttaatttcaaaaaaaaaaaaaaaaaacttctattttttattattattattttattttagtgcatgttaaaatcatgcactaaaccattatttgtaggctgttatctgctagcaacgaagccacatagccatatcctattttaatttggagtgaattttcaatctcacctaatatttttgcactcattttattatgattatgtttggcatagcttcgataagttattttttaatttttaaaattaaaaaatttcttctagaggtgtttggataaaaaaaataaaaaagtctgtgtttttttttttggaagaaattaggatttgtaacttaagaagctattttaaaaattaaaataatttacataattactaatttactcacaaaagatctttcttaaatgatattcaaacactttgaaaagtgttttttattaaaaaaaattcatataataattatctaaacagtaaatacaaaacaaaatttatactttttctatacttttaactataagcaaaaataaaaatttagtcaaacaagtttatatgcaatccaattaaaagttaattattcaaattcattaaaatttattagttataattagatatttaatattttgtcattagattgaattgacttagttctatataattaattagattgatttagaaattatacaatattgcaatcaatcctctataataaaaagggaacaaaagattaatgaaaattattattagatactaataatatttagtactacatttagtaatttatccatgagttaattatcacctcatgagttggtattacgtgaatgattgacaatttttttttataaaatttattaaattaaaatatgtaatctcaatacttaattttatcaatcataatataacatcttttaataaagctaatcaatcactattagtataagggataattagataatgcactattttttataaaaaaaattatatttttacatttaaatttttttatatatacttttacggtttttttatagaaataacacgaaaacaataagaaaattacataaaaattacatttaaataacatcaaaataacatacaaataaaaaaatcaacaataaattaataagagtacaacataaaaaagactgtattttctgtaaataaaattaataaaatcgtaaaaatatttaaaattcagtaaaatcgtatttttgtaaattttttttattatttttatttatttgtgaataatcacttaatataatagcttattatttagctgaactgttttatctgttgctttgctattagtattagtacttgtctgagaaacattatttgacatgttatttttcaatgatgtctatgtttcttaatataaataaatagtaatccgactaaaggtttcgtttggcatataaatttatatttaaaaaaatttaaaatatataaaaaataaaatattatacaaaataaatttttacatatttgttattataataaattagattataacattatcattatcattataatatatattaacaactcaaagtattttaaaatttataatttaccaaatacttatctcaatttttttctacaattctgttgtagctgttttttctcacagcacagctgcaactacattttctcatgatacaattgtaccaaactaaccccaatactaatactattatcctttagctaaatgttttttttaaaaaaaaaaaaattgcccaaaacacgaatcaaagggactagaaatttgcaatcgctatcaaacatgtggtacactagcggagtcaaaacaaacagataaacatatacaatttttgacaaaattgaaatatatattatatatcattaacaagtagcaactcactccaaagtatatactgccattccctaaaatccattaataaaaattaacttcatgtcactatttaattcacaatatgataaaatcacgtaataatattcaggatcggctttgaaatttagtgggctatgtaaaaaaaatatttataaatttttatttaagaaaaaaaaatgtggtatttttgaaaattagtaaaaaaaatatataatttttaaaggaattttcttttcttggacccctcaactaagtggaccctaagcacatttctaacctgcctataactaggatcgaacctgctaatattacatgcattctttatattcaataatattgaggttttattttttttaagctttcatagtgtgttttgcatatccttaaatagacaataaatttttatagatgatttatttttttaattttttgtgttactttattacttttgttattttaattctatgattttcctttaataaaaattcaaatttgttcgattaatggtggtaagtaaatgaagatatatgtattaatttttacttaattagtgaaaaatacatgaaatggaatgtatatttgattattattttttcattatgttcattgagaaaaaattaagcctacaattattaaatcaagaacaattaataattttgttctgaactttcgataatattaattctccgatatataacttgttaaaaattctttctaaacttttacatttacatattgggatattggcggctaaaccacttgaattttacggtttgtaacacttaaccacaaaaattgaatttttggcggctaaa

SEQ ID NO: 17973 - DNA, 7530 bp, Cannabis sativa
  modified_base (7420)..(7427): a, c, t, g, unknown or other
aacttgaaagaatttctacacttaagagtggcaaaataggtttcgacacgacacgtaaacacaaacacgaattttacaggatagggtcgaaaaaattagacgcaaattgacacgacttgacacgaaataaaaacgaatcaaacacaacacgacctctttacacaaatttgatacgtttgacatggttttttcaaaaaacataatataaaataattaatgaataatataattatataaaaataaatacttagtgattcaatgttaaagttaaaaaatattaagtttaattttctttaaaatgaaattgaaaatattttaaaaaatcttaatttgtaatatatatatatatagaaaaacaatatatacataaatgtaaattttttaatggaacctaaatctatcatttttctctacaactccagtttcaataatagcaaagcgaacacaacgcaattttttacggatcgaattagggttgagaaaattagacacgagtcaaaaaacaggtcgacatgcctaacacgaaatataaaaacgggtcatataatatatgatatgaagtacacaacccaatgacacgtttttccacccctacctacacacttaccataaatgctttttaaccctaaggaacacttcactagtcactacaacataatgtttgtggttgtccgaagaatttattttaattatctggtatggaaatttgtaatacacacacacaaatcggaagatgaatatcaataaggatgatttaaatatttcaaaataactatgtaaataccgtgagtcaatgttaactattcatagacatcaaaatataaatggttagctcaaacgaaagattaaaacacaacctgcaacttctggcaatactgctctgccatatcctgtgggcaatgtgctggtgggaggccttttgaaacaacatgaactagaaaatcatccccaaacttctcgtacataaccttctgagctaatacaatttctccgaacaaagcaatctgcatacggtagtattcaaagtaaaacaacaagacaagtccccaaaggcttgaaaaaggttctaatacaaacaccaaatataatatatgacaccagtgcttaaatttttgcacaaatggtggtgttgccaaatccaaaaataaaaattattgattttcagaaattgttattaataatactcaattggacagtcccaataaagaaatggctcttttgatattgtaacattataatagatcttattttctcaattattttgcctacagcttttgtttttaaaatagtaataataaaagatatgtggggagaattatgagttgataatatggaaaatgagaaattaaaaacagtattcaattaaacttacagtatttgcatcacgaaattcaaaggacttttcaagcacgctgtacaaacaacaatgcattgcaaagttttctattatgaagctttggaaaccaggtaactggaaaaagaaaaatgttagtgccattgaggaatgtcaatttaatcaacagaaataaccctatctgaagtatgaacttaccatttcttctgtttgaggcctgccgcaccaatctttgattaatctaataaatatctgaacacatgcctaagtcacaggaaatgcataaatgaaagaaatcagatccgaccgcccaataggttcgtcacccttttgttattgaagtaaacaaacaagagagccaaagaatgtatcaaacctttctaacagtgatatccttgtgcttacaagcagtaaacaatagcaactgcattataggatgtaagtactccctgcttttaggagataagaaaacagaagaaaggtcgtgtgtggctatcacatgaagaaaagtatagaaagtccgctgaagttcttgcaattcgcgaatttcctgcaataaaaaccaataagccttaatattcttcaacgaaacccgattcattatcacttttaactacactaaatggcataaatacaagtacataaatgaactgaaatacacaaaacttgcttcgaactaaggtcatacccacacaactttgtaaaaaaatcttattttaaacttcacgtacacgtagctattgatatatacatatatataattgaagagagagagaaagatggatgtaacagataatctttttacagaagtagcatctctatacctcattattagttccaggccctgatggaaatacatctcttggaataacactcaatatcctaccagcaatggcaggaaatacttcatccaagatgctatggactaatgtgctgaatttgcatataagttggttcagcaacacaagcaaaccaaccatctcctttggctgcaggtcacaataacgaattaaacttacagaagtaatgaagtgcaagagcaagcataaatgttggaattcaactcagtgacctgtatatggcaacaaggatatgttcccacatcacaaataactggaattcaatttatatcttcacagtttcaacaccatatcgattcatagaaaaccaagcagaagtaacccaagagaaagtgataagtatattttattcaaagtcatatatgaacaaaaatgtagcaaaagaagtcaagagttgataaaggttactgtcaaccttctggactgtttaaattgttgtagacctcctaacttttcgaaaaaaggcaataaaaatattcgccttatgtgaagttttcctagtgtattattattaagtataggtaccactctttacaaggtacatgtacagggacatgaagaatggaccacttacacaaactcaaaacccaatgactaagcaagtatatttatgttttattcagtaacaaatatgatattttattcaaccacttctacaatgttactaataatcacttatattagaattatgattcttatttatcatagaaaaattacgttcacacgatcaagaatacttgagaattttaagaattttttcgacattttttcttctgtatttctatagacaagttctgtagacatttgcttacgagcataaaaatatcgaacattcctaaaagtgatacttatatgtaactgtaactgtattgtacctcactttctgccagcaattgctccaatgcctttggaaggtatggaaagacagaggctcccaatgtttccaccatgcggtgcaaaaatgatgtcacctgaatagcatgtagagtaacatcaaataaataggtgagtgaagtacaagttaactgttaaaggacatccacaatcctcttttcaactcttaccttgcttcgcaagggatctatctttggaaacgcaataaggacttggaggagaacatctaatgtcttgatgacaaagaaaaagataagcagactgttagtataaagtaaataatgacagttctacaagaattccccataaatacaagtttccataaattctatcatttctgaaaagaaaagaaataaactaatgatcaatcatcaactgggtgtagaaacaagtgaacctagccaaagaactaatctaaaacaggatagagaatcttcattaagcatttaattaacaaaagcatatatgttttcttttgcgagaaaaccatggccccaggagcacactagatttattttgccaccgagtgtgtgtgtatgttttggtggtgggggtttcaaaaaaaaaaaaacctagattgatttaatcacaagaaaatgaatttgagtaaacttcttagattaaacaccaacctgcttaaacatgatcccaattgcaggacggctggtagtgacaagacgctcactgaaaccctgcattgcatgtaaaataagacaaaaataggaaggcagtccaagttactaaaaaaagaggatatcgttttactttcactatgctatgtgcacctaaatgaatatcaatggctgcctatgaaaggttgaagaatgacagcaagaaagcaacagtaatgttttaataaaagtatagctaaggggcatcatatattgcctagcaactcttgatgcagcattctaatttaaaatattaaaactattaaatttaactatttaaaggataccacaccaaatgttgttggacaccacatagcaatactatttaataatatactggtgaatacactccaccaaaactatcttagagaagatatctattaaccagaagaatattgaatgaggaaaaaaaaaaccttgctgagagaattaattgcgatgattatctgctgtatgcttgcaacttttacaggtgtttcttctggagtcaatactttggcattaataagcaatgcctctacctgaatcaaccaaaaggttgtgtaaatttaagtttaacaaatttgtgataactagaagactcacaaaaatttatttttataaatttttgcactacaaataaccataacctgatggcaaagaggagtgagcaaagaagaaagataatctgcttgttttgctggtggcacatcttccataccgattaatataccaatagcctgtcaattgatgactcacaaattagtaaataaccattagcattaaaaaatacaaaaacatgtacttaatgctacatatataaaatgaatacctcaaaaatgtgactgccatcttcagatcccgtaagctcttttgatgtgcaattcaaactagtaaagcgagcaactgtatcttgtaagctctgacaacaccatatgaaaatgtcaagaatataaataagtagggaaatgaagaatacaaaccaagttttaacgataggacaccagacaaatgtatgtgaagcccaaggctagtttattttaactacctgcaaaattttctctatgtagggaacaagtttcactttcagcaatttcacaaccctcatgaacagataactagccctacgactcacgtagatactggggtggtgcatacccctttcatcaagaaaagcattcaacaccatgggaatatattctgcattttcctgaacaaacttcaaatatcttgttattgtttccaaatacacaagtgccaccagcctgttagagtggcaaggaaacgttgtagacagcagctggggcaccaactcactcaagagtccactcccagttctcatagcctcatcacttaaagattcaccaaatgcatagagaagagagagtgcagcctccacctcttctacatttctctctcgtggagattcagcagcactagctaatgaatttctgatgaataagtgagtaacattaggcgctacacgaccaacagtacgaagcagaacaaataaatcttttctaaactctaccatcctatcttcttcctcttgcccagtcttatctaatttatcaagactttcacggtagataggattgtatcgtatctgagaacgaattacttccaatatctgacccacatgaagcagctgtttctctctcaaaggagaaagactcttcattgtggcaacatagcatgaaagaaactgaactatactaaatgtcgaatccaattcgcaatgctgcattacataaaaaacagagggcaaaacttcatctagaagctccatggagatactcttagcatcctcagaattcaatcgtttaaagcactctaaaacctccacagcataccctgtaagaagttgagctaagctagaaatcaattctgaatccccatccttgtttaccaacccaaaaacccgattgatgcggagattttgcaagagagacagttttgtttgatgatccattcgcttagaaacaactgccaacaaacatccggctgcagcacaacgaagtggctctgatagccgatcaaccaaaaccaactcaaacaacaatgggataaaagcatcattcacaattaagccaatgtcaatccaagagacgtatctcttcatagattctaatacgctagaacaaagtacttcatccgaatttctatacaaagatattatatcataccaagctctaactatttgagatacacaatgctgcctcatttcatccttcacccgccctccaacagtcatttcttcaggtgttcgaggatagtccaagctaattaattcaacatccaacgcattcaaaacccgacagaacatatctattactgctgcccctttgctcaaatgaggcaaaaagtctacaaataaagaccaccatatcaatggatattccgaatatataagagtcaccaaaatttgagcaagtttgttcttaataaatgcaggaccctccaatatcctaacattgtgatcatccaatccctcgaaacaggcaatagagaacacagattttctaattaaatacctctcgtctggactaatcgctgaatacccaactcgaataacatcgtgaagggtctgtaaacaccaaaactgtatctgaaccaagttagaaaagcacaacttttctatgcaaagtctacagattgccggttcttcctttattttatcacaatattcctttgcctttaatttcaactccgaatcaactgcgcccgattcatcaaaaagtatcagtattgccttctcaagatcagccatgaggccccaaaaaaaaaaatccaacccaaaatcccacaaaactagaataccctttgttttctacaactctttttctctattatttattgttttcgaagaaatttaagatttttcttttccctctgtatctgagatgtccaggcggagtgtcaaaaggttgaaccgaatcggaagtgagcgataaattgagagagatggttgtgagaaatgaggccttaccgatttgggatcagatcaaactgggacatctttatcaatgcccagttatatagaaaatgtgaattagcttcttttgaaactaggaacttgaagctagggtttttgtagtttaaggagaaaccactattagggtttgcttggaattggagtcggtctaatttattatctagtacgagtagtaatgtaaacgttatttgtgatggtgaaacccatagagtagacgataataatgtggaaaaacatgtatcacgattaattttggctcttaaaaaaaccaaataaagatatctatataaaaaagaatgtacattaagaaaaatatatataattttttttatttaatgatatttatgtacattgacctgataaaataataataaaaaaatttatttttatttatgttcattaaaaaatctccataaaataataataaaaaaaattaaaaaaataaaaaaaaattctccatcaactaattatcgcattcaaattttactccctgaacttttattattagtaaaaattccccacaaactattctccttaatgaattttgccctctcaatcacatgtgggcaaaagattttctatgtagtatttttagagcttaagtgccagtctcacctcaacaccacacttataattatatgaattgaaagagaaatgctaaagggcnnnnnnnntgcctagcaccttcctatgtgtcaatatcgatattggtacaactaagtatcgggtcccatataatttaatataataggatttagggagtatcgctagccaatc

SEQ ID NO: 17974 - DNA, 5181 bp, Cannabis sativa
  modified_base (4516)..(4519): a, c, t, g, unknown or other
ccttccccaagcgatgtgggattgcacagcttacacggtatttccccttacagatcacaggactactgactgtcacaaacatcaagcaatcggtctcaacactgctgactgctgagaaatctctttttagcaacgacaacatccttttcgtgctataggttcggcaacgtcagctagcacaacacctgcccttaatcctgatatactagccaccacatgagcgtggttttctctaatcactccaccaaactttttgccctcctcaaaaagggcagcattgatattcaccttgagtttatcaacatctagttagactaaagttcaatcccgcccgaaagacaccaagcatccatcgaaagaaatagacttttatcttgagcttttctccattgataggagtgacccatactaaattaacaacatactccatcacattcttcttttccttccacaaaagttggttacacatataccaaatcgcctaacacaacatgaccacccgacaacattctccctcatccaactgagcaaataaagtcatgacctagtccccaaaagagccgtcaacaaaaggaaccaaccccaacctaaccacatactaccaactctgaataaactgacaagtaactaaacaatgcaagatggactcacttgccaaatgacacactggacacaaaaacaacacctccacatacttcgacttcaactagactctcgttagaatgcacccatttacaccacgctacacacaattcctcgccttgtggtaaacgcagcttccaaaacacttaaaaaaatattaattgatcacattttctttttttttttgccaacaaatttaaatcatgtaatttccataattttaaagaaaaaaaaacatgcaatttcttttctttcttttattgtcgaaagatgttttctttttaacatgtaattgcgtatcaggaagaaaagaaagaaaagcgtggacttgatagaaattctattggtgtaagattaaaaaaacaaacacaggaaaaatggtgagattaaccagaaagcttttgaaggaagcagggtttggtctcaacaagactctttctcagatactcgtctgccctatttctaaacaaccattaaggttaattcttcgtttagaaaacctccaaatttctccttttcaaaccatcaatttccattaatgttttctaatctaagctcgtttacaatggttaggttctgtaccgaaacgaattctctcataagcgatgcaattggggtttcctttcctgtaagtttcagctgatataaattcattctttctatcccgatttcttgatgtttttcctatcaatttaaatctgaatcttttaggtagatagagattgaatatgatttgtgtttgaatcagataaaagatggggtgccttgtttagttcccaaagatggaaagatactagaatttgaagcagaaagttcctgagcctgaaattatgtgaaattgtagatttgtgcaacaaaagggagtaggttttgtgccaattttctcaaaggttatctctttcagacaaccacttttcatatgtttctttattgtattgcccatgtaggaaaattaaaatcccagtggttttcttattttctttgatagacccttgttaccctttggaggtgtagttgagaagttcatgtctttatattttatgaatattatgaaatgtgttcctggcttctgcaatgatcaatttgttagttgctctgtcaaaacctgatgtagatatttctaatagcttgctgactaattcaatttgttaattttttatttgcttagttttaatatattaagtagccatacttgcatggtatcttttaaataaatcttactcttagataattctttactattttaagtgattatctaatagcatcaaccatatagacttcgaataaaagctagtaatatttgtagtttcttgttttgaagttgagtgggatagctaagctggtagttgaataaaattatatatgaaggatttttgaggttttattatttatcaccaatattttttttgtttggtgcccattttctgtttttgtactgtgactgttttctgtgtccgaactcaatagacaaaatttgaaccatcactttacctgctgactgttcaagtcttcaagatattgaaactctgtatgttatatatgctcatgtttatccaattcatatttgaggcaccatgtagtattcttggtctacccatctaatcaaaaatttatctttgattagatgggtagacttttactatcatagtagttcagagtgtgactagtgactaatctaggaaacagaaattattatatgcaattaatttgtatgcttatgcactcttcatgtgattaagtaataagaaaaaaaaaggtccgatgttatattctgtttaggtgtaaccgctgaatattgttggaaacttagttctctcttcctaatcaagccaaagcacctagcaacaaataccccagtactactatcaacattgcctctccaaccataactgataactctcttattaaagacctaattagaaacctctatccacattcaaaccagatggtctttaacagtttactctctactctttataataacttcatgagcctaaaaccgcaaccaagaatgaaggagcctccagcttcttgtgatgtggatgaagtaaatgttgagcataaggttgatgaggcactggctgaatctgctacagattccattacaggtgaaggtgagttctgttgtgtttgcttgtcgagattagagggtgaagaaaccagcatccttccttgcatgcacgagtttcataaggaatgtgtcgagagatggttccacgcatgtagaaaaacctgccctgtatgccgatttgcaatggaagaagataagtgctactatgcaggcgaatttttcaccgaggagatgttgatatatttttcttcttttcatgcagctggcttctaaattttgatatgtttcaaccctatttttctactttcaatgtttttgagttgtacacaaaattgaacacttcaaaatcaatcaaagttgagatgcatgatctagcttaggcttagagtctaagaaatccttgtattcttctgtagtaaaggatgtcttgtaccaacctgttattattggtacaaaaccaatcacagaatctctcttttcatttacaaggaaaatatacgtgtattgccacaatgccagtgaaagaaaaagctctttcactgactttgcttggattctcactcattcacttttgtttgtttgtgtttaagactcttctgctgttaaccaaaagattaccaatcccaaaaaacaaaaaccattcaacaaacaattttcatagaatgtgcgctaacattaattttctcttatatagcagttagttaacactgctaccttccagtcataaattgaaaatcagtctttaatagaataaaagcagttaacagacaatggctccagtcctgtgttataaagtctaaaaaataccccccattcccatgagtcgacatctgtcttcaaaacttgtactctcttgtctcaggcccctcatatggcttactttagttggaaagagcaggcactaattatcagcaaataaattgttggtttgaaagcgagatcaaccaaactttcattgagaaaattagggtttgaaatactattgtgctaaaaccaagcactagcaccattgtgatgttttaagcctcagcttttagcattgtttattttatgataaatgccaagagcaactccactggcgagtgttttaaggagtgtgtgatgaggtggacacttttttctgtaaacttttaatggtgcattgttatttggcaccctcaataccatattgatattgccctctataattggttagcaatttcacacatattatttattaaattaaaatgtgtgagaatcaatattaaaatacactaatggaaaaatacactaatggaagtatgtcacgtcttgtggtgtttggtaccttaagtcttttagtattttctagtgcttacacttataaggcctgtttggtacacatgactggactggattagacagactaatttgtccaatccagtgtttgggcatgttacagctaatctcatctgttgggattatatatccattcagaagggtgtgataaataattccgtgcaagtgattttttttatcacacatttatttatagatttgtcaaaaacttattcattaaatagtgaaaatatataattttgaattatcaatgctttcaaaatttaaaatattattaattaaacaataattacttaagttgattctaagagaaacaatatgataataaaattatatattatttttaaattactaaaaagattatttaaatatttcaaaaaattaatatttatattaaattagtatttaacataaacaaatttacattattcaagtattttttatattactctgttaaaaaagtatttttattttactattttaatnnnntattaaataaaaaatatgataaactattttattatatatttatgatatatatttaattatataggatatattattttataatttaataatttgtattatttatatttatttttttgctgtgaattatttatttatttattattaaatatttttattttaatttattattattatattattttttttaatttcagttttttttttctaaaaaataaaataaaataatccaatctattcttaaattaaatataggattattttgaccataatccaatcttattcaatcctatccattccagtctaatctaattcaatcatgcgtaccaaacagcccatagtgaaaaagagtgccaagtaaagttgtctaaaagtgacacccttgttatcttctatttcttaatttatatttttaaaaaaattaataaaatatcaaaatgtaatatattatattatataattaaataatgatatgtgatatttttttggcaacttgcttactattcgaacattttaaaaccatttttttgaaagaaaaaaaattatgtggttaaaagagataataaaatattaagaacatgattttgtcccgtgatgtacttttacggaatatattccgtggtaccttagatgggtctcacagtacgttactattttttaaccct

SEQ ID NO: 17975 - DNA, 7148 bp, Cannabis sativa
  modified_base (109)..(114): a, c, t, g, unknown or other
aatttaacacattacacagtataaaacttacacaatatttttgaaaaatcgcaataaaaaatcgtatagaaaccgcaacttgcactgaaaccactttagaaacccaaannnnnnatttgaaaaaaaaaaataaaaaaacagtatatatagagtaatttccgaagaaacttaaaaaatttataattaattataattaagttattcttattagtaattacctatttttttagggtgattctacaatgcatctcatggggatgtactgatgcaccattgacttgtttcggcatccaaaagaattttttagtctaattttttttctcatattcatgtacgttataactatttaagataaccaacaaaattttgagaaatttagaataatttataatatagaaaataattttcaaacaatctattttacacgcgtataaaataaaataatcacgcgtggtgcaacacgctgtttgaacgtagttttcagcgtgttaaactttttcaaatttcttaaaaatttacaaaatatcttaataactataacgtacatagtaaatttatatatatatatataataaattagaaattatcgtttgaatagagtattatacgtgtaattgttttcaaattacaattttttttattatttatatataagactatatgagtgagagttacatggtcagacaaacatgtcaaattgtgtaattattttctaattacacataaatccaattacattgtgactttctaaacgcacccttattacaaaatttaaaaagcatataattaattacaatttaaattaagagttttttcataattatataattagtcattttattttttcatagtaaattagaaattatccttaataaaatactcttacatagagttatacgtgtaattgttttcaaattacatttttttttattagttatatataagacatatatgagtgagagttactctaattgaaactcttaagtaatgattctaaattttctactttatctttctgtttgtttctcgggaaagttttgattttgattcaaaatctatagtagtcttcttctgattcagaaagaaggagaatttttttgtctttctcgttcaatggcgactcctaaaccccaaagatcacctgaagaggttgaagatataatccttaggaaaatttttctagtctcgcttacggaaaccgccgattccgatcccagaatcgctttcttggaaatgacagcagctgagattctcagtgaaggcaaggaattgagactctcacgtgatttgatggagagagttttaatcgatcggctttcaggtaattttgcttcgaccgaaaccccttttcagtacttagtcggttgttatcgacgtgctcatactgaaagtacgaaaatcgtttcgatgaagaataagaatcttaggtctgagatggaattagtagtgaaacaagcgaagaagctttcggtatcgtattgtcggattcatttagcgaatccggagctttttggtggtgggaatttgaatttgaatagaccgaattcctcgccgcttttgtctttgattttctctcaatttgaggataggtatgggggttcaagcagtggtagtaatgatattcagagcccacctggtttcttggatgagtttttcaaagacactgattttgatagcttggacccagtattgaaagggttgtatgaggatcttagacttaatgtgttgaaggtctctgctcttggaaactttaggcaaccattaatggctttgcagtatttggttagttttcctgttggagctaagtctttggttaatcatccatggtggattccaaaaggtgtttatttgactgggcgtgctattgaagtgacaagcattttgggtcctttctttcatattagtgctttgcctgatcatactatttacaagagtcagcctgatgttgggtgagtctgatttttacagtttatatttgctttgtgtttgtgtttacattgctttaattttcatgttgctcttgtaaagtaaagttttgatttttggaacacatgaattgaggtatgaacaatgtcctaaaaatagaaacagaatgtaaactttgttgttgcattgaaactgttaactatagcactggttaaagaaaccaaatgtagatttggtggtgtttggttggaggtaatggaaaggaatcaattttcattctattcctttgtttggttgcattttattgtattggaatgtaattctaatggaatgatttttccacaattttagtggaatgactattacattttgttatgcattttaaatttgattctaatccattctcatttctattcctaagtttttattccttccaaccaaagccaccgtggtgtcttcttatacttttatccttttagaaagaagtattttgtattaacctttgtggttcaagttgtgaatacaaggtataactaatgcatgtgttaaacttcatttatgttataatttaactctattgagtttttcttttgggtcaaggcaccatttttttatgcatgaaactatggtactggctttttttttttaatcaacggatataaaaatagtgtttaagaacttttctcttctttttttttcaaacaccagtcagctatgctttgcagaagcttcaactcggcgtccagctgatctgttatcttcttttagtacaattaaggcacacatgaataccttatatgatggcctaacagatgttcttatgttactccttaagaatcaagacacacggcggcatgttcttgaattttttgcagaggttatcaataaaaattcttcgagggctcatatacaggtaccttttttgcctttatgcaatctccttttgagttgcagttgcaatttaagtagtcagtcaaggagatagataaaaataatgaagtattttaggcaagaaattgatgcaagaccttcaatgccacctctttcttcagttacagttgcaatttacttcgtcaacaaataccactaaccatccagggaaaaggaggatattttagtaaattgcctctaccttcttttccttatcaaagaactcaatttagaagtagtttatttcagtacatatatacatacacacacatatacataatacggttatcacttgcactgttacatttcactatacataatattttttgcaggtggatgccatgtcttgtgcaagttcaggcatgtttgttaatcttagcattgtaatgctcagactttgtgatccatttttagatgcaaatctgacaaaaatggataaaattgatccaaagtatgtattttacggtgaccgtttggatttaaggtaagaacttttgctttagtaataattttttaccgtgagtaatgaaatcttcttgtagttctaattattggttatgaacctgtatgtttgtggtagagggttgactgctctacatgcatcatcagaagaagtggctgaatggacaaataatagccaggggcagagtgatggtgaggatcgattactgcagtcgcaagaagccaccagttcaggcagtaattcttttggaccttctgtcacaaagtcatcaagtggtggtgaaaaaaataagtatacatttatatgcgaatgcttcttcatgactgctagggtgctcaatttgggcttgttaaaagcattttctgactttaagcatttggttcaggtataacatggtattttggtttcgtcaaatttattttgaaatagttagttcttatgagttgtgattatggtttggttgaaacatgaaattaaattatttcattccaggacatctcaaggtgtgaagatcatctcaacactctcaaagctatgacgccttctcctcagcttaagcttgaaataactcgtcttgagaaagaagtagagttgttttcgcaagaaaagctttgctatgaagctcaaatattaagggtagggaagacttcttattttgtctctaactctatccgagtgtgtgcttgatggccaaaattttaaattgtttttatcatatagacttcagtttgtctctctcatcatgtctttaatagtttttgctagttgataataaactaatgacttgtatccaattcaatttttttttgcttatcttgttttccactgtaggatggaacgcttatacaaagtgccctttctttctaccggttaatggtggtttggttggtaaaccttgttggtggatttaaaatgcctttgccatcaacctgccctaccgaatttgcgtgtatgccagagcactttgtggaagatgcaatggaattgctcatatttgcttcccgaattccaaaagctttggatggggtcttgctggtagactctttgttgatatcttctgtcctggattcatgcttttcccccccttatatgcagttttttttatagtgtgtatgtttttcttgttaggatgattttatgaactttatcatcatgttcatggccacaccaaactatataagaaacccttatctaagagcaaagatggttgaagtcctgaactgctggatgccccgtagaaggtgctttcttgtctctgcttagttgtaaataggtttgggttaatgtactcgataaattgtttaaaataggtttaggcaagtgtatcgaaaaatgttatagctgaaagctaggtactcagatttttcttgtgttgtatttgcagtagttcatcagctactgctagcctatttgaaggtcatccgctatctctggaatatcttgtgaagaatctgttgaagctttatgttgacattgagttcactggttcccatactcaggtaaaatacactcaatcttatataataaaaatcgtgttatttcatcttctttatccttatgtggcttaaaaataatgcttgtttggttggtctcttttactgtgcagttttatgataagttcaacattcgtcataatatttctgaacttcttgaatacctttggcaagtccctagtcatcgtaatgcttggagaagggtaaggacacctcacttcccctacacttaatgaaatctaagttcattgcatttctaactgcttacataaatcttcatgctgtttcagattgctaaggaagaagagaagggtgtctacctgaacttcttaaacttcttgatcaatgacagcatctatcttcttgatgaaagtctgaataagattcttgaacttaaggagctggaagctgagatggctaacactgttgaatgggagagaagaacagaccaagataggcaggaaagaacccgactattccattcccaagaaaatgtaagtgtgatctctcttcaatgaactcccaatgctttgccccactttttaacaatttttctctcttccacatttaatgggagtcgtgtcaaatgtacattattggtcttttacagattatacgcattgacatgaaattggcaaacgaagacgttagtatgttggcatatacttcagaacagattactgctcctttcctacttcctgaaatggtaatagttttctcattttattcaacacatttaatttatggtcggattgtgtgtgttactactgcttgtttctaattctgtctcgtcaactttaaacaaattgttgtttcatcttttccaggttgaaagagtagcaagtatgctcaattattttctgttgcaacttgtgggtccacaaagaaaatcacttaccttgaaagacccagaaaaatatgaatttcggccaaagcagttgctgaagcaggtttgtatcaactagtattatccaatattcactattaaactaatttgctgccattactttgtgtttaatcatgattttgtatgctctttgcatgcttaagttgtctttgaatttcggtaggcttgtttgtgaacggttggattctatacatcttctagggatgactagagcttaagttgaacatatttttctcatgcatgaaaatcgccggctaacatttttgctttttggctaatagattgtctgcatctatgttcacttggcaagggatgattccgaaaatatattccctgctgccatttcaaaggatggccgatcttacaacgaacaagtaagaccgtccaagttttgaattttctctcttctgaatttatagagtcgacaatctaatgatttgaaatttgcttcagttatttactgctgcagcagatgttctccgcagaattggtgaagaagggaaggtaatacaagcattcatcgagctaggtgccaaagccaaagttgcagcagctgaggcaagagatgctgaagctactcttggggagatacccgacgagttcctcgacccaattcaagtatgttttctctttttctgattcccccatttgtggatatccatttgtgaaaacaccatacagaaatctgactagtgttgtgtttttctttttcggttgttatggcagtacactttaatgaaagatccagtgatcttaccttcttccaaaaccacgatagaccgagcagtcattcagaggcatcttcttagtgatagtgtaagttttccaatgctgaacttcataatttgaaaaaactacattattctcttgtgctattctaatttatacatctaatgtgatttgcagaccgatccattcaaccgatcccatctcacagtggacatgttaataccagacaccgacttgaagaaaagaatcgaggaattcgtaaagttacaagagcaaaagcgtcacgaagggttaagcacacaaagcagcaaaacaacaatacaaaccacagatggacaaatgctaattgattagacaattcattgaagttttaagatgatgagtttcagttgcataccttggaaacaattgttaatttaattattattgttattgtttttatagaagtatattagatgtggatcgtaagtcatagtattttaattaaaaagtgaatgtttgtatttgtcattttcttttttagaaataaaacatggttcggaacctgtaaagctttggttttttgtagatgacaacacaaatatcagattaaattatcttctcattggtgatacaatttgtgcctttgtgggagacaaacaatatacatgatgttcaatataaatttaaggctaaatacgatttttgtgtaataaattat

SEQ ID NO: 17976 - DNA, 5472 bp, Cannabis sativa
tgtgattaaaaaacaagtgttaccaaacgacaccttactgtttacttctttatggtataattacattatgttaatggggtatgagctttttgcttcatattttggtaaaaaaaaattgatcaaatatcatattttaacattttccaaatctaactcattctctttctctctctttcccgttatctctctcggttgtacctgtgcttcgctagattctaaaccgaaagcaccgtgctctgaccacgcccactcccaacgaaattttttattggtggctttattctacactttgtatgtttctcttattcatatccttcaaacaaaattttgatcctatagttatatcttttttgttttcctttcaagggaatatttctaaatctttgagtacagtccatcgtcttaccaaagcgtaaatgaagcaactcaattttcttgactaagttaaagctcttagatctcagctattcttagtcacccaagcatgaatccaaaacatcaaaaaataacgttcactgaatgcaaggagttacaacaacaaggattaatagaatcaacttcttctccatggacatgtcatgcattttgtgtcaataatcgatcagaacaagctcaagggaagcaaaggttggtcattaattaaaagcccctaaatgagttcttaccaaatgataaatttttattaccaaataagaattcattattttgtagtttatccaaagcctatacatttttttttcataattcaatgtagaaagcgagatttttgcaactagacattaaactagatcattggtccaaaataaccttttgcattttaaatcatcatttctaatagactgttacacctttttgggctaaaaatttctccttctttattccaaaaggttatgactaatgtatatggcccaatattggaaaaggctctaatctacattgatgatatttttcttttttcttctaatgaaaaagcccatcaattgttactaaccaagtttgcttctataactgaagcccatggtatcatggtgtcaaaaaagaacatgattattagataatcacaaatagatttccttaagatgaaactatctataagacaatatgaagtccaaccacatatcgcccaagaactactcaaatttccaaataaaaatcttacgaaagttcaagttcaactattcttgggtatcatcaattatttacgagactttgttcctaactttctgtactgacaagaccactcaacaatatacttaaaaagaataatctagaatggtcacacaccaaactgtggcagtcaaaaagctgaaggaaatcatgaagaatctaccacctttacagatttcttctgacgaaaaacatgttcttcaaacagatgctagtgaccaacattggggtgttgtcattctcgagcaagatgaacaagagaaaagaagagtatggggatataagagtggacgttcaaagattctcagctcctttattaattaacactcaaaaagttgattgcaatcaagatggaatcaaaaaatttgagttccaccttataggccatcatttcttagtggaaacatattttgctgcatcaaaaagagagataaatttgagaaagaacaagacaactgatgctcaacttttgagaaggcaacatggtttaatcattactcttttgaaataaaataccttcctgaaaaagaaaatattttggctgaccttctatttagacatacgtctataaatttggtgtcttcacatccactccaaactatccccttaatctcctacaactctccccataccattccatatatataatgacatcatcctcatcatcatcatcataaaagaattactcattcccaaagatgcaaagctcatcctttccaaatcccaaatctaaaaggtcagctaaagaaagggcctctcacaaggtttgtttatactcacacccaactactctcaaagcttgaaccctatttttaacatgttttctaattcacccaaagtgttcttttgctaatttggcacccttccgggatgcacttttcacttttaaacgaatagccaatcttttctggtacttaacacgcatctttacaattgttgtcgaggtctaaattatggctcgtcttcacactgttatacaatcttttctcaactaggaaaaaattaagccaaccaatccaaagggacattttatcttgatacgcttttatagaggagtggaaaagaatcttttggaatgaatgggagaaagtctgcaataatagacgtgtctttgtttatccatcaggaccatatagccaacatgatgaattgctacattattttccttctcagacttgatgtaaaattggacgaaaataagaaaatagtttatagtcccatctttgaattatacgactcccaagaagccaattttaaagaaagttcagaatatagggatcttctaatgattatttttgagaaaaattagactattccactagaaatttggccaaaaatagaagatgatgcctcatgaaaaatatttccctcagattattcaagacgcatagcaaagtccctagatttttcttttttgaaaatagtaacaatcaggtccaagccctgaaggaaagaagaaaaattcatcactcctaccccataagacaagtacttataaagattcacaggacccatacatggaccaagaaatcaattaggatccttatctttttctaacaatggactagaatggtaattattttttctaattatgatgcatgtctactagttggaagcgatgaagatgatgagccattaggtagcacccacttcaagaggacctcaattatgactcagactacaatgctaaccacgaaccaattatagattattcataagtagtatctcttatttttgtaagatagcaataagtaggaggtttcttgatagtcatgatattatatgaactttcctttttgtatatttttaggaactccctaggtagtttcctattttgtatcttactatttgtaaatggctatatatagattatagagccatcccttctattgttaaaatcatcagaaagcattgtattaaataaaatatagtgttttcttctcttaaaatgttcttctattttttttttaaaaaaaattcgaaagtagtgataagtacattatgggtcataccaaattactactataagttaagaatcactcaagtataaagataattaagcaatttattatttataatcgtaagtcatgcaatgtggtcataagttctggaaatttttgtaagaagattgctttagttatttttatatttgaggatgatgctttaatttatagtaggtacactaatggtataggaataaaagtgggattagtgaatactataccatttttgtcaaacagctagtactcgatctagctaagaccccaatatatatacgtaccccccaccctcctacctctccacaagaatcacttttcaagaattttttctaccaattcctcctcaacatataatatttaatgtcacatttttgttcttcttcatgatatcttaagatactggctgttagatcttcatacaattaatacacacaccccactctttccttgctagccttgtattgtatcaattatatatatttatataaaattgagctagcttatgtatatatataaatgttaattttacttaatagtgaaaaaatgatttatcccatgataatattgatacctatatatatcataacactatgatatatgaaatgaggagcatgatgatcagctaataagccagctagggtttaagctgtaaaaaccatattatatatatgtattaactattaatagaaaaattagaaacccaattcccagcaatcgatgtggataaataatcatgacgaaatgacacagttcccagtttttttgagtacattaattgttcaaattgcagaaaaaaaagacaaaatgaccaaaaaaaaaaaagttaaaaaaaaaaggaaagctgcagtagttagcatgcatcaaaagtacttagctgcttggctgcctcatcgccaatatcgctgttaattaagaataaaataagttgaaaatctaaattaaactgaccagtaaaaacaaaaagtatatatatagcataaaattataatctctaatcataatgttgagatgagatttcaaaaatcaaacccacaaaagtccaaaattgacactttatactttacagactacagtatatagcagattgtaatagattactactactgtctaggtcaagtctttctctctctgtcttaaaagtatcaattttttttttcattgatgaagacctttctccatgcattttgtttttaaatgccttctttctttttatttttaccgtacttcgcttatatatattattatttatacaaaatagatagagggttctacacatagatagggttatggcatttggtgagatgagattttgtattatttttggtgatgctataagtcagaggtattaataagtcaaagattttcaccgggtattatattagatattccgtacaagtacaaagaattattaattttatatttggctatataatatatattctgatgatctccaaaactgacactgtttctatttacatatatgtactgtgtacatatacatacctattacactttaccattaaactctttcccacaagcagaaacctattatataataatttcttaaaacaaattaattccaactacaaacacttacaaaaaaaaacgtttctctctctttctccctctattatatatatatgtatgaatatttttatatatatatatgttactgatgagggacaggagggggactagagattttctttctttgtcatatatatatattgggatcgagcaggtctggaataatattgctgctgctatagttctttctctatctctctctacagaaaagggattcggaggttgatgaaaggtctccatcggtgagcttttaattaatgttttttctgttctgctaattagtactacgtttggaaattaacaataaatatatacagtagtaaattctgtctgtgctataaagttagtgtactgtatatatagcttaactactgtgtgtatattcgtgtttgagttatcattattattcatcatatatgtgatataatacacaatctcgtcgttttcaccagcacatcatatatatatatatatatatatatatgcgaaaacacgcgggattttcaccctcaaattaataagaaaaaaagtatatatacatattaatttatagttttgcttagcttatcgaaaattgtttttgtcttctcttctttattgttttaaaaaaataaataatgaataaattaatgaggatgaaaacaaaggagaaatagagggaaatttgacccaaaaaatagtgtctacattgttatgatgattagtactgtttaatgat

SEQ ID NO: 17977 - DNA, 3496 bp, Cannabis sativa
aagtagacgtagctctattaccataacgacatgggaagtgaactactataaatagtctaaattttttccttaaactcattatttatctcactattctaacgagctagtgttgactgctttgtaagagtatgttcatcgtgacaagattttgacattgttaaaaatatttttagtcaagatttcaagcagcggatatcaaaattggtatgttcgatcacagctgtaaataaatatcaaattttcactaattatctttactaaagaaataggcgattctttattcattagttaattattgtataatgatatacaagagatttcattttgcactctagattgtatatatattagctgggacttgtatcttcaagccacttattttgatcctgtataaaagaataagaagaaaaaatacagcacaaattgtaaacctgctaaatagagttgttattaaatatatatcttaattacatatacccaattgtcatagttaataatgcatatatattgtaatgcatggactgtaaactgctcagatcacacactagtacaaaatatttggagcccccaaatagtcgggaataaattgtaacggcaatgcattaaacctatcctgttatggtgacactactggcttagattgaccataatttttatggtattacctgtgtcccaaaagttaggatatgcttctcatttccaagtagcttccatgccaacactagctattcacaaatatcttcagacagcgggagaaaaatgagcttggcttgggttatattttaacagaaaaaaaaaaaaaaaaaactgaaacactgaaagactggacttgttaagagtgaaaacatgacccaccactgcctaacaacatgaagctcattccatactgttgcaactttatccaattacgtcagataatactccgtcatgttatcaacaagaaaatcatatggtgcaccaagcccgtaaccaaatgtaccattagttgatggtactctgttagtcgtcgaataaacatttccaacaccaacctttgctgtgagtttcgctcttcccttgacagatcgcttgctctcaggggaggggaactcagcagaaagtctacccatctgcttctgcaaatcagcaactgaatcatttgttatttttgctttggcgttttttttcccatcagccagtttcaattccaacctatacagtgcgcaagcatcacatttgttgatctcatattcatacaggtgccactcaatatgattcaagggttgtggatccatgtagtaagatctcttcagccctccaaattcgttcataacttgcttccttgattcatgccaaccacgtccactgtaatctggcagagatctctgctttctgttaccactttcaaacgctctacgaggcttgtcaaagaagagccattccctaattgtttcaccttccaaaaccaaaagatcaaagagttctgcaatatgcgacacaataatatgttcataaataccaaaattaaaattttatagggtatcttctctttctaaatgaagaattaaactccaacaacgtgaatgaaataaaaaaaaccttaccaggtgcattccatggagattttgcagttgcagccccttcacactctggtatacctacatcttttccttgtgcctttgcactaagagcagcaaaaagcagtccatccttcagaccaattcctccaggtcgaagaactggagccatgccaggtggtccttcattcaatgccagggctgcatgaaagctactgcagtagtcctgacaccagtccagcccctgagcaggccttggacaatcccaaagtgcacatttgggacccaagaaagcagaaggtggagggcatatacttggcagatagctggaaatatgcggcagtgcatcttctccagaaacaccggttccgttaaaatcggagtacaagttgtggccaaattcttgatgtaactcaaactgatgataatcaaagtgggtggcaccttccaaattgttagctgaaacattgcaaactcttgaggtggagtttttgcaatcaaccaaggggaagccatgttcctgttgcacctgattcatgccaaacccctgaaacattagtcacagctgccaataagtgccaattttaattgtaatgtaacagtaatgatgcaacatgaaaatgctagtcctgtagatggtgaacacatacaaagcataaaggaatcgttctccagaataaagaaaagttccattaaaataaacatgaagggaagaaaattaatatatcccctctggttgttatgatgccatcattataatttaaatctaagacgtatgccatcaccgcaatgattcttaaccacaccaaaccaaagtataaagggtcttttgtgtacacaaatgaggccaaaaagctcaattgatatttgattttcggagattatcaatgtaactactctactatctttccatatatcagtagtggacaattttggccaaagagcaaggcagtggcaacaattctctaacctctacatagagtcgtattataatatacagttgaagggggcatcatagtaaaacgaatatcataaccagtaacccaattgatgcatctataaaccctgaaatcatttagaaccaccaaaataaaaagaataaattccacctcatgaaagaccacagtttctccaacttgaaagctttgatcagtaggctcgggttttggggcagctaatggactagtggcatcatcttcctcctcgcacagctgcaacagccgacaaatgtctgaggagaacgaaccaggattaccaccctacatgaccaatttataaatacaaaaaaaaaaaaaaatcacaaccaaatactacaaaatcatagcaaaactctctcatacatatctttaagcacaagttatatagcacatattacatacattgatgtacaaacttatttacacatggagttcaagatatgcactcaaaatggcaaaaaacatttttatatgatgctaacttgctgcaaagaagaagcgggggagggctcgttgagctcggctttccattcacggagcatctgattgacctgttcttcaaggactgccatatcaatagtacggctctccttccttgcaaattgcaggtccatgaacacagcctgcaagtcatctacccggtttttcgctttgtccttaaaaagcttgtgcgttacagacttgcatttgctcttcgaacccttatccatcacaaacctcactctaatactttctgctcaaaaccctacacaataagcaaaaccaaaccaaaccatacccatctcagattatcgaacatacaaacacccatttaagtgtttccaaaacataacaaaaatttcacccccaaaactcaagcatacttaacaatcaagcaaaacccaaaactgagttagagcatcacacaaaaccaaagaaaaaatttcaagctaataaagatgaacagcaaaaaaaaaaaaaaaa

SEQ ID NO: 17978 - DNA, 3552 bp, Cannabis sativa
tataatttgtgtaatttgctctcagttgtttttggctcatctctgcctaaaaccccgaaaaacctcattcttctttctcttcttcttcttcttcttcttactcaacactgtccaatggcgtcggtttcaccagttctccgacaatggactcgtgaaggacgacgaattgacaagcaacaactgggttggttggttcgaaccatgaggaaccatttaccagatcatattcaggtgtggcttttgtgcatataccatctctgagactagtgtgcatttaccaggtatggcttttgtagtgggttgccaactctgaacctaattatcatgtaccttttgtgttttcctttacagatatctatgtggatggcagacagtaggttccttacaaaatcctttcagtactgttccgtgacgagaccctttggtgctaacctacggtctgctcttgccatttctagggttatcaatacccactccctctcctactccactgaagccatatcctcatcttcgcctttgactaactctctgtaccatcggatttcacggttgggtgatcccaagatttccatgatcccagtgctcgaacagtgggtggaagaaggtagagatgtcaggcaatctgagctccagaaaatcatcaagcaactccgtaaataccgtcgctatacacaggctctccaggtatatttgtaacttgtattaagtctagtttcatttagttttctttagtgaagataatgatgggaatttatttctgttcttaggtatcattttattgtgaatctttcttttcttttcttttttttctggaataatgatatttgttttaggaccagacaaacatatcgattatgaatagaggaacaccagattcagttcaaactcttttaaattaagtattggcaaaccttttgagaaaaatagccatttgggaaaatatttgtgttttttgttccacatttaaaacttagatatagcgtatcggtaatgaaatgaaaatgtgctttgtagaatgaagtctcaatataaaattacctcagaaggattatagataattatatcatgatgtcaacgagtaaggctactattttgtttagagtatctactcggaggctgcttaagtacttgtattattttcaatatgctaagttttcgggttttctgtccttggaggtttctagtgtatacagaatattttaatcttacccttccttcactcatatcaaacacagccttaataatttaactttaactttaactcgtttccatcttcttgccttaacaaacattggtgtttgaggttgtatcttaagatgtgctggttgataaagtttttacttgtgcatctttcaccctagacctaatggctgtgagtttcagagtggtattcttttgagtaatactttcagttgataaaatttaatttcctcatttgcatatgtgaatttgtggcatgataaatttgggtcaataacttttctttgtaaaagggtaatcattcaaacatgtcattgtcactagtaatacattgtgagcttaagttataaatctgacactgtcgtttttcaggtatcagaatggatgagtgaagcaaactttggcccttcatccggagacatagctatacgtttggatttgatttcaaaagtttatggcctagagagggcagaggagtacttttatagcatcccagagtcttccagaattaataagattcatggctctctgttaaattgttatgctgagaataaatccttagaaaaagcagaggaccatttccagaaaatgaaggagatggacttcatcgaaactgcattgacttataatgttatgctaagcctctattctcggatgggcaagcatgataaactaaagagtctaatacaagagatgaaacaaaatggaatcgagtttgacaagttcacattaaacattcagttgaatgcttgtgctgttacatcaaacatagaagaaatggagaagcttttactgatgatggaaactgatcatcaagcagcgttggacttccattcttatttcattgctgcaaatgggtacctgaaagctggctatcccgaaaaggcgtggatgaagcttaggagatcagagcaagtgattgataacaaagaaaagaagattgcttatgaacacctcctcacactatatgctgctgcagggagaaaggatgaagtttatcgcgtttggaatctttacaagaacttagggagagtctataactctggatatctttccgtgttaagctcgctagtgaagcttgatgacattgatgggatggagaaaatctttgaggagtgggaatctgtaaacacattatttgacaataggattgcaagtgtgctgattagtgcttattgcaagaaaggtcttttggagaaagcttttgttagtgtggaacggctttttacaagtagtggaaaggagcctgatgccggcttatggcagtgcctttcaactcaatgctgtatagatggtgagatggcaaaggcagtggaaagcatgaggaaagccattttgaccggtgggcaaagatggaaggtaaaccgtaccacctttagtgcatgtcttgaatacttgaaaaatgaggggaacctgaaaggtgcacatgagattttggggttactacaccaacgtggtttttgcccagatgatatccgtagtagattagaagaatacttaaatagtgatataaattcaggggcccttaatgcaatgctaggagatgataagaaggaagagaatgatgatgctatagatcgataaatgaataagcgaattaatgagaagatgctgttatagtgaataactaacaagcactgtaattatagtcaatatgaacaccatatgattggtgtaatcagctgtcaccacggcagttgttttacttatttcactgtggctctttgttactttgtttttcttaaaacactagaatgggagattggaacttgtaatcgcaaggacggttctaggctatgcttatgatatgactactactactactactgataaatagtatgattttacattcacagcaattaatttaaaatgcagatttgtaccatgtgtcttcaaatagtactttgaatttaaatattaattaaattttatctactcgattatattgagttctaaattcaaatttaatcatataatttcatataattgagcttagggtacaatttcaaattaatcaactttgagttcggttttaaaacgtaggcgcatgagagagagggtgactaatgaccaaggttggcggcttcagggtcttggtgggttcctcggatctctatcataggtggccggtggtggctcgcttaaatggtagttgagccgcccaaagaaagtggttgtgtgtgtgggttgagtctagagagaggcagaaacaacaattatttgcttttggcgttccatacgaaagcaatgtattcgatcataattatagagactcatgttggacgattcataagatcactttaagctataaaattgttaatttcttcatattttaatgggtgttgtttctta

SEQ ID NO: 17979 - DNA, 1455 bp, Cannabis sativa
aatcaacctctgttctctggttgctatttcgagttggaatcgggtggccatcgttggctacagttcaaatatgagaggattggtattttctgttataactgtggaagattgggtcaccaaagaaggggttgttccctctcatctcctgtcactgtggtcaatgacaatggtgttcctttccctatgtttgggccatggctctccactgcatcttcatatctagatgttttctctggtgcgaactcctctccatcattgactgtatctcctcggcctggacgcgctgaaaaatgaacgatgacttctatgccagcaatgaatgattatgggagaaactcggcttgactgaacatggtggtgcgagattcgaagcgtcctgggacggtgactgatcggaagtctgaaaggggtaagctggctaatcaagcggcttgggttcccaaacggtttgctgtcaaaagcacgcctgcttttgctattctgggtaataagggtggtgttggagaagatgagttgaaaaaggggtgccaggccgatcctaaacttaatttgaatattgttgaccaaccattgaccttggttaacgtgttgggtgatggagatgagcttcatggggttgatattgggccggctctttcttctactgggccggttccaattactaatataaacagcaaggtgttcaataataatagtgaatcgtgtaagagaaacgggccaaatgagcttcctgagatctctccttcagcatgtgggaccacccctcttttgatgaagcagctgggcgagagggaaattggtctggtcgtgggcccacttgattctaatgggccgattgctaatgaaaagggcctagttgaaagtaacattaataatggtattttgggtgatgggccagccaagactatttccaatgagagctctatttgtggttaagaggttaattttcaccatgatgaaaaattagctttgtctaatttttttcaagctcaagataatcttttacaagagctcaagaattttggaagtttggacttacaggagattaaagccatttggggtgacattagacttccacctacttctgagactaatgcaagaacttctccgctcaaaaaacgaaagtttgatggggcctctgcatccctttgttcacgaccctggaagcttcttcgcccacatccctgggctattcgagacttcccctgggactcggaggaaagagctaatgctactaatgttgcagaggacgagccctcaaaggatatctctttatccaataacgacttcattggcccggatcagtggagtactaaagggaagaatgtgatctcatctaggccaatggagcgcactttcgttgtggaggagtctggatcttttgggtctgcccattctcatacccctgtggaggagactactactcctccgcaggagccatgagaggtattgctt

SEQ ID NO: 17980 - DNA, 2292 bp, Cannabis sativa
accgccaatttttaaggttgaggattaatctgtatcaaccttaaatttttggggacttttgccgcaattatccctatttaaattcatataatttaatatataacttttataaaaaaaaattactaacaatcacaatacaatagtaaataacaatacaaaaattttgtctgattgaattgaatagaggaaaattcaaagaagtgacatagaaggaatatgaatgtggatgtgtttgttgagtgtgacgtaagggaaggtgtcacctacgccattcatattccaagaagaaaggtcaaaccccaaacaaaactgactcttgctgttactgtattattattattattattattattaagttagttataattattcatttatttgtgtgggcgtaattgctgactcaccttcatcagccttgatcgtcaagtttcactgctctgccacgtgtcactcctcatctgatacgtgtacctgtgtgtacatgtatgtgttcagattaactcactgtttcgcaatttctcacgcccagcctcacttactcacttttgacttttgagtcctttttccttttgcccaaaatatataggaaaattctacaaagcatttattaaaatggatatattgatgtattcttatctattttagtatccgaaataatttttagttaaaatttttctcatagtcatatacgttatagttatttaagacatcttgcaaaattttaaaaaattcaaaaaagttttagcacgccgaaaactacgttcaaacagtgtgttgtacgtgtaactattttattttacacgcgtgtaaaatagactgtttaaacattgttttctatattgtaaattattccgaatttctcaaaattttgtaggatatcttaaacagctataacatacatgaatatgaaaaaaaaaattagactaaaagaaacacacacctcaaaactctcttgtgagtgagctcgtcaaatgtatttataggagaaccagaataaaaaaacctcaaaaatagccaaagagaacgaaaaagaaatgtatttatagcctccatattccacacccacggacataaccaccacaacaacacgagaacatccagaaaataactattaattccagcaagatggagcaagagaagtgaaatcagcatcaaataaataaatcatgaaaaacaacactaaaacaaataaaaaataaaagaaaaaaaatgattaaaaaattgactatcttctatcctcaatactaaatgcattatatttacaagaaagttctggaaaattagaacaaaaaaaaccacactaactcttatatttccaaaaatgtaactaagaacttcaaaaaataaaaatagaaaaggaaaagaagatgaagatgaagaactgaacaagaaaaaaaataaaaaaattatatgttgatggagaaaaataaagagaacttgaagaagtagagagtgaaaaaaataatgaagatgatgaatagtaaaagagattaatggggaagtgagattaaagtgaaataaatgagtattaaatattcagggtaacatatttttatcatcaattttaataaaaaaaataaaaaaaaatgtatgtcactaaagtgacatcacaagttatatcacacttttatatcatttaaaatataatataattttaattaaaaaaaagaaacccactcccacgcgttttgtacagtttatatataatatatatatttaatgtgataggcagattgtgattgcgacaagtaaaaaagtaaaaaaaataaaaaactaaataaaaaattgtacacatacacagtataaaaaatacagtaaaaatgtaatattttttttataacaataaaattaaaataaaataagaaaaagcagtggtgtaaatttctcttaaactatttatatatataataatttttttttttttttacatatgtttcaataaaataattaaaagaatataatccacatttaagaacatcatttcctttttcatatattacatgaataattaaatttaacataatattaacaaacacattcttatatttaaataaaatctcctaaataagtaaaaaatcaattataaaagtattttttaaaaaacccctttatttggaaagattgaatgattaggccatctccaatgggcctgcataaactcaataataggatgatattacactaaaagcattctcaaccagacggcatttgcaacatcaattttgggtttgtctacagtgtcccaccatatttaggtgggcactgtagacaacactaaaccttttttttttt

SEQ ID NO: 17981 - DNA, 6127 bp, Cannabis sativa
tgatcaaaagaggttgtcaaacccattttcaatttttgcgatcaaataatatttgttatatgatatggttgttattggtacaattaaatagctaaagatttgtaaagcaatactatacattactcgtacctaataatataataatgtatccatttttcattttccatgattttttttgcttttcataataataattataaaaatacttaaaagcattgtatattaattaatactgtgttatatgcacatattcgaataattttgagtctatcaattgatatcatttataatcagaacacaagttagttactgtaattttccatgtcaaaacttattattggataatattttgtggatccaagttgtgtatatatacaaagtacgtagtacatacctgaggtcattaaggcggatttaatggcagcaggagaccatgttgggttaaaagacttaacgtaggcagcagctgctgttgcatgtgggcaagacatggatgtacctgagattatattgtatgaaaccactctcttgtcatttgcttgcctagttggacttgtagcttctgaccatgcagccaatatatctactcctggagctgttagatccggctgccataaaatataaatgcaccaaaataattatcatgcatgaacatatgaaataatactataagcatagtcagtaagtacattacaatactataatatacaaaattattattattttcaatatcgttatgtctgtaattgtttgtatatgatgagtcctacggtcaatatatatttaaactaattttgcaggaccacataatagtgctcaatttataatttgattttaataatatatatagtaaattaattagtttgatcaagcaattattgccttgagaatgtcactcgtaatggggttgggaccccttgatgagaatgaaaccacaaatggggccgattcatctttcacctcaaaactcttccgtatagttgcactcggttttctgtaaaagacatgaaaaaaaaaaagttgtattaataatttacggtataaatacttaaatttaactcttaattgcaataagatttaattttttacggtaataatatttaaactatacttctagaacttttggagttagctggctgctaaataaattgtttcgtgacaatctttaattgatccaagtcataaaatttatatatttttttaaaaaattaatttaaatatatccataacaatggataataacttatcatttaaaggtaaattacctaccatgttctaaaaatataagttaataattgaaaataaaatttaggtattcatgcctcaaattactttaatactaattacttacttcaattattaagtatctacattctatctcagttattactttttaatatgaaacatagatacgacgtatgtgcatatgtatatctcaacttttggaaattaataatttaggtgtatataggtaggtacctagtggagtttacgtatagggaaatctcatctccctgtttagggttgaaagtagaagctggaataggaaaaagtctggcgaaatccttgacttcttcatcttgcattataattcctgatgcgccccctatagaagcagcgctcccatcaccaccagaccaatcacacaaaactattttatttctcaccaatcttttgtccaacgattctgcttcacagtacctgcatcaaatccaatcaagacattctatgaaatctttcatataatataaaatgacaaacaagacatatagtttattttcttttttaaattaaaatgaaaataattggggaattattttatatactatttttaaattttttttttcaaatttacgatttgggtttctaagatggttgcagcgctaattgcaataagagtttctatacgattttttattgcaattaagttgcagcgctagttgcatgatagaaaattctatgtagaattctgtaaaaatacaaaaaaaaaaaatatattttaaagtgtaaaaataaaaaaatctcaataattaatatgacatggtatgaaaagaatctaagaactaattaatagtagaatatatttgtattattatatttttgactctataagttactttaagaaaagttgaaaaactatattattggaaattaagtactaattaatgatgcaaccacattaatttcttcttatatatacctcatgttgctatatatatattaacacacaacatatttattttgtatttattatattgaattatccaatgatattaccaactaaatttacctagattcgtccgaagtaaaacctcctcttttatttggggcatgtctaccatgaataacaggaaaggatttttcgtcaagattaaaggtgtttacagagataccctagatagcaaacatatatacctcaccaagttagcaaaatgttaaaagagtaatatcattagtaagaagatttaatatacatatatattaattaatagtaattttcagacctcatacacttctccattgcccaatttcacttgggtcaaaaacttcctatcaatagtgctagcagccacagaaagcgaccatggcgaaaggttggtgatcgtggcgggtccagggccagagttaccggcagaattcgaggtgagtattccattcttcatggaatggaaagctccaatggcgattgaatcattgaagtaatcaaacgaagtagagccaccaaccgaaagagatatgatgtcaactccgtctgcaatggcatcatcaaaagcggcgagaatatcagcatcgaaacagccatcgaaccaacatatcttgtagacagcgatgcgcgccgaaggtactcctcctcgcgctgtgcccgacccaagcccaaataggcttgcgtctcttaccgaggccccggcagcggtcgaggaagtgtgagaaccatggccatttgagtcccttggagatatgatatccttctctccgaagatgccgtcactccggtagtatcgagctccaataattttgctatttagaaccaaacattagcttacataaaattctaattcttatatagtagccttatgtttaataatataaaggaccaattacttgttacaagtgaaattggatgactcttggcaaaagcctttccatttatgaggtgggggaccaaatccttcgtcgttgaaactttctgactcaggccaaattccagtatcgagcataccgatgatgatatcgctttcgagttctgctctttggacttgtttggagaatcccatgaagtcccacgaccttgtagtgtggagctgtttctttccacttggaaacactgatactactccttccatctctgtaaatttattgtaataatatttatatcatattaaataaatatgtagaattttacatgcaaagtttcgttattgtataattagtatacaattaaaacccaccagcaagtttttgcacctcatcctttgtaagttttgcggcaaatccgttgaagcttttgtggtaactatggaccaaggcatcggatgcatcgctgtatatgcaaatattacatcaccatgtaatcatgtgagcttaattataaagaatatatatagtcattgtgtatgttgaatttattttacgagttacaataataaataggtaaataggttgaataagatatgaatcgtccttaatggtatataatcactactttggtgctgcttaactattatatactattgtgtaatgtcaataatatattaacctgccaagggcttcttgtagtacactggtatgaagagatgaagcagagaattctccatttggtcggtcacccatgtacacaatgtgcatctgcatcatcagaatatgatccattaattacatcataaatatacttttcccaatgccaattatacacgcaaacatcatatgtatatgtcgatatgttatgtgtggtaatgtctctctttctatataaatatatatatatatatacatatttactcatgtatatgaacaattgtttttggtataaggaaaaattataattatttatctattatttgttttatacattgtagctaggtacatactatattgtgatagcttttgattcatttatgatatgaaaaataactcttaattataagtttttaattatgttatgtgtcgcagcattggtgtgtacaaatgtagctatttacaatattacacaaatatttgagaaattttaaaaatttaccttcgccaaaatggaaaataggttattttaaaattgttttttatacatgggtaaaatatattatgttttaattgaaacatatttttagcattctaaattcaattttttttaaaaaaagagctagtaagagaataagtactaaataactgtaatatacactaatatgtaaatgagaaaattaaaattatcatttttcaacgagaataaagatgaatgaatagtaaattctatgataaggagtttcattttttttttgaacaatgtaggagtttcatttttgtcttatttattggtgtgaatgtttttatttttgataaatattaaagaaataattataattaaatgtttcgagttttcaaaaactcaaaaataatttatggggcaaaaaagaatgtttaaaatagcaacttcacttgcaagcccatttactagtaaagaaattaaaaactagcacacatgcaaatgaggtgtttttgaaccttgtttttaatacagtaaattttgttcagaatactaatgtgacgcatgatataattataatatatatcatcactacaaaaattataattaattttacaaataccaaaaacaaaaatctctccaccgatatagtgacatatcctattaaagatttgtcaatagctattatggtcactccatttttacatgcatatatgttgtattaaattatggtcattgattataaatattaactaaataatgcaagtaaaagacacttgcccggcgatcatcattgttggaaaatactccatagcagccattaataagcaagtttatgctgaggataatgtaaataagccattcaaaagatctcagactggccattttcgactagtatatatattttgctcaagatcttaaagaattattcaagctgattaatttgtgtggagtaatgagctatagctttataattaacatagatgagtagagctttgttgaataaaaggatctaagacagcgttaacagagtatagtccaaaagggaaaaccatccaaattaaagacggcagtgcgaacaatgaacattgataatacatatccggcatgtccgaaaatcttcttatccttttctcatcaactataaatttttcatataaacatagttctttggggactcagataattttgctaattttagaatataataatttttttgttttgattttttttttttaataaaattacactaaacatgacatttattcattattaaaatcttgagaacgatttgcttttatacgacattcatcaagtgtgtcaatatcttgttccaaaagtttatagtattttatctataattaggttaattggtctaatcttattgcctatacccagataatgcaaaggatttgtttaacaaaaattctcttatatactctggaacttaactagaattgtttcacatactcatagtagctaaatgcagtcttacaaatcactacgttcttcaataagaaaatcgagcatgtataaggattttatgtatggtccatatatgctgaaactgagagctaagatcaaaaatatccttccgatccagaacgatttttgacatattgtttgtacacagacatggctcgttcaattggatacatgcactgctcccccaagtatcgcttctttaggtaaatgcattaccaagtgagccattatgtcaaaaaatgctggtgggaaaatggtttccaatttgcaaagaattaatgtctagaatacttttttgcatgatctgcaagtctgtaacattcaatgttttacagcacaaaatctggaaaaatacacacagctcaattattgtatccctaacttctttcttcaagaactttctaatgccaccgggcatcaagcgttgtagcaacacatgacaat

SEQ ID NO: 17982 - DNA, 6504 bp, Cannabis sativa
  modified_base (47)..(47): a, c, t, g, unknown or other
  modified_base (3560)..(3560): a, c, t, g, unknown or other
aacttctaaaattactacaccagataagagcacctgaataagatganccacaaaacatgtcacaaaaaatagctgactggtaatagcctgataaaagacaccagaactagcaaggaggatgttgactttgattttgaaaagtacacaaactatctacagagtatacgatctgcaaacaatgcttgtgtataccacataaatactgatacttcatacaatctccaaattaggagagcataatgtataacatactatatatccattctagatcatcaaatgcatttaacaaagcaagagttctagaaactagaatattaaagagtttccttggattgcagattcaatggcaagtgttgcactagtgcttctaagagcattagcaaacactacttttaagaaacttgctttataaggaaattcataaaaaaaaaagatgattccactacttacacgaagaaagcaaaaagcatgagtggtgattccaccataacacctttatctcaaaataatatttaataaataaataagcaattttcttagctattaagttgttcaccagaaccacttctttactaacttcacctcagttaatactccacttcacaaataaattcaacaactagttttgcttaagcaagagacttaacccagcataatcatataagtttcaatgaaataatgtctttaggcaaactgttaacttcaaattaggataagatttccgtttaaacatccattaactttaaattctctgctaaaaaagcatgccactgagtcactgacttccttgagagattgcaaaaaaataattacactctccaaaagaaggaaagaaaattcccccttttgcccctgcatattcccaagatgttagttcatctacatattatagtttcatagtctcccacatataattctaagattaagttcattgagaacctaccagaagtgccaatgcatattcacaataaaatataaacatcctatcccattcttttctttttcttctccccaatggtttgccaagaatataattcttcaaaccatagcatgataatatatagttttgcaacatagtaagaattaaaattataatcctgcacttgaaaaacccagtagaattctgatgccaaagagccaaattcaatttcaatttcccacacgttagctaaaaatcaatccaaatcgacaaattagattatccaaattcagtaaccttgagatctcatttcactccacagaccgaaccaaagatcttacttttagccaccaaccaccattccaactttgacccaaaaaaatcagtcgttactagccaaaagattataaaaaaaaataaggtaagctcaagaacccatctcttagtcctaagacccagaaatttgttcttctttcaattaccacaaaaataactcgctaattgatctttaactttcacaccgagatcaactatagaaacaaacacaccctagattcaccaaaacgtaacagagcaaaaaaaaaaaaaaaacccaatgcattttcaccacaaaggcaaacccaattgccattttaaatcaaaaatcatagaaaaatattaaaaaaataataataaaatacaaaactcagaaagggaacaacagatagattcaacttgaacccaacacaaatgcagaaatgtaaaaaaaaaaataataaaaaaaaagtcgtaccttgtttttgatgcatgagaaagagcattagggtgtgagagataggagataatcgatagggaagaaaaggtagaagaatgaaatctgggtttggtttgggagcaatggaggaatgcaattaaaacgtcgttatgtggagttgggtttgattttcttggcgtttggtagcttcctgttttttcctacactttctcattcgagtcactcttgattttctgtcttgctgacgtggatatgattcggagtggatagaccatataacttttttatcgacttaaatcacgattatactctctaccaacctcatttaaatgcattcatttaggctattttggtaattgtaaatatagattgcaattgcatctttcaactaggaggaatcggattacacatcttaattcaatttccattaaaaaaaaaggtaaatgctatttttgaaatttgtattttgtaaaaatagatttattttgttaaatgataaaatagattttatattttttaaaattgtacaaataggatactgaactgatttttttgtaaaaattaaacttaataataatctaatatagagatgttatgacaaaactaattacattttctgtatctattcgtattagaaattgtcttaaagttggttatattaaaaatataaattttttgaaaattaaactcatggtcctatttttactattttgaaaactataaggtctattttgtcatttaacaaaacagatggtctaattggtaacttttataaaagttctaaaaatggtatttacccttaaaaaaattaaaatttcattttacaaatttgcatacattttaattttaccaaatgaacaaactcaatcttttgagaaaacatattgttgttttttccttagaataattacataaaatatctaaaataattatgattttttttttatatatttttacgatgctatataaaaggaacacaaaaacaataatagaattacataaaaataacattcaaacaacatcaaaataacaaaaaataataacatataaataatataaaatcaacaacaaattcacaaaagtgtaacataaaaatacattaaacaccatattttatgtgaataaaatcataaaaatcgtaaaaatatttaaaattctaactgtaaatttataatttttttgttgtttttgttaatttgtaaataattccctttttttttttctaacaatagtttgtgtaagagttttgtgccaaataaaatgaaaagatgtcaggacatctcaatattctattctatttttttttttttttaatatcttactaatttttttattctgttttaccaaacacttttacctaatattttacatttctttataatttattttgcataatttaaatatgatatctttaaataacttattaaataaaataattaaaaaaagattaaaaaaaaataggagtgttcattaatagtcattgaattagattgaaatatttaaaattcacacttgtatagattgcatattaattgatatgtaaaagtaatctatctaatccaattcatacatatttatataaaattttaaaaaaattatgtatacatttaacattttattatataaaaaataataatttaaaaatttaatacataatacaaatatattttaaacttaatagatgtatattctatttttatatatgattaatttatatatataatttaaaataaaattaaatatttattttttctatatataatttttttcttcctttaaatatgttatttattatttaatttattgttggagacataaaatgacggtaaattattttatttttttgtgagttatgtgataaaaatattttttttaataaatattaantaatttaatattaaaaataactaatccaaaataattaatctaattcacggattgaattggatccaaaatataaaattcacacttaaataattgataatgcctaaaaaaaaaccctatgtacttatactaatttcgtatataaatttgaaccttaattatgatagtataaattattataatttttttttatatgcttgctatatataaaaatttcatctcctcttgccaataaagttacaagacacacacactacttagattcagccttatctagctagtatatagaactttttactctatgtgtcaaatggattttgtttataatttattgtgttattagtttcgtttttgaaagacatgtttaaaattaacataaaaatttattggcttgctctgaatatattccagttttccacttaatataataaaacttctgtatttgattaaagaaacgtgggcaaatgatttactattaaatacataattataaatgacaataatctcaaaagaaaataaacgataatcatgcattactttacttgtagttgcatttaatttattttgaaagagttgactgtagctaagcaaaatattactaacatatatatatatattaatgttggtaagatattgccaaaaaccgaccttagctcagttggcagagcggaggactgtagttgggaaacctagtagatatccttaggtcgctggttcgaatccggcaggtcggatattttttttattttcactctctttaatcaagtattccaaatacttagataatgataaattgttctaacttagactggttaattgaaacttttgacccccagaattttataaataaataatttattacctcatcaattcttttaatttttaatatttaatctatatatatatatatatatatatgtaaatagatgcgcaaaaattagtagccgagacccccttaattagtccagaggaagcttaatactagttggtttagtcttcattgtcttctattatatcaatagatagatatagttgtgcttctgctaaatatagcagttaaattagattatatgttaatgtatgcagttgccaaacaaagagactgaaaaccaataagttgtactatggtttgcaactaattatacgtaatattattgctaataaaataaggagagaccgtacatatatatgtgaaatatttgttattaaaacaaaaaagaggatatatatatatgtgtaattaattaatgatgaagagagagctaggcagtagtgagaacagttgagaccatagtgttgataccacacatggcatggcctcggcagagcttgtagtagccattctcaccccatctctttccccaagagttcttaatgatccaataaggcttgtatccaaatctgaggatggagtagcccttggagccgtagcccaccatcaaaaccccgtggtttatccatctctttccacatattagtggacacgacactccccctatatatgtttgcatgaacactgcattcaaccccactgcatatccatccatatacatgaccaattaatttatataaatgtagaagtgtgacaattattattgaaatatgatgatttgatataaataattaattatattgtgtaccggcgagaggaccctggtggactagattggcagcaatctgattctcatcgataggaatggtggtaaaattgacaagttttacagccactttgtcaggatcaaatttgcattcaccttttttaccagtgtaaggatatgaagtctcttcttctaatcctcctgcctctattaaatacttatacgcatttgtcataagccctccaccacacccattgtcgcatgcatctttctcactcggatcacactaaatatatatatagaaatggttactaatttaattaattagtatccaatctaaaatagattaattaataactaattaccgtatggtcacaatccactagctgttgttcacttagattgagaagcttcccggttgcaatgaaattggctccttcaacagcccctgtcgtactaaaagcccagcaagatccacacgacccctgaataattataataataaataatattgttattattactatatatatattttagctcatgatccatgctaacatttctaatatatatcaacatttaattaatatacataattaacaacaaaactaattaataatctcaatatatataatttgttagtaatttcatttaccatatcttattaacgcaagtatatattaatttgaaaagtataacactaattaataattcacaattttgttgcaactgtattttaactaattaccaaataaaagatgagaataataactaaaattaagcaacacgcacacacctgcatcttaacctcagtaacggctcccttctctctccaatcgaaactctccggcaagtctttaacctccaaaggcggtgcagtcgccgtagtagtctccgccaacccatttccgaagccggggccacctctaaggccagcaaaagaacgctcaaactcctcctcggagagatcggagaagggcgtcacgccgtgaactgcagtgggatcaaggacctggtgctcggcggccctgaccatgttcctagcgaagattccaaggcggtgtatatactcctctctactaccgtacgtcttcccgtacttctccatgaacaccttgaacttcctctccgtgcccagaaggtgagcgtgatgagatttgtcagtgacttggtgaatcattggctcttcttgtgagccgacgacgtcgtttttattactgctgccatcgtggccgagaactagagaaacagttagtgcgcacgttaagactgctacgcccactgcgcacgttaatgctctcggttgtgctagtattattgccataataattttttctcggccgcgcggc

SEQ ID NO: 17983 - DNA, 2720 bp, Cannabis sativa
atatatatataatgtgctcaggatggaacgatataattaactttgaataaatatggttatggaaaagggaataaagcaaaaataaactttagttatattttaaaataataatatgcacctggagaacaataaaacatcaatgtaacagtcagtaaagaatgaaaggtaaattattgctagtcttttcgcggtatagaatattttatagagcaaatatttatggtgaaatttttttatattttaatttttatatacttaatttttttatttttttttagcaaaactctctcaaatttatttttcttggtaaatacgtcagttaaatactactattaaatattaactggatgaccactatatacacttatatgtaatagtaaaacttcgaaatcgatacagcagtaactcagtttgtatttaacgagaatattttcctgacatcttaaatttacaaagaaaagtaaacttgagggagtttgccataaaataaaataaaaaagttaagtctataaaaattaaaacataagaagggttcgccgcaaatccctctattttatatgcgtgaattggtagctatatgcgtgatcacttatgtgtaaaatttctatgtttccgtttcttaatatcagtccctatgaattgtaaattatcggactaccgaaaacctccatggcctatcattttcttaataacaatatacatataattgaacaaacaaagaattatatttttgttaggaaataatattttattttatgtgaaactattgaacatatcttttttgattgtgtttttagtagcacgtattgatgaaatcaaaacatggttgggatgccgagggactgcttgttactaaggacggcaattatgtggataagagcaagcttaggtttatcaaatttggattaatagaaataattacttttagaataacaagatgcaaacagttgaaagatgtgtcaaactggtacaaatgaatataaagcatagaaataccggtctaaatattaccattaaaacaataaaaaaaaagagaatggtttcagttatgataattagtttctttttgtttgttatacaatttcctgattaaaaaaataagaaaataatttattttattatatatataccaaaacaagatatagctttataaatttgataaataaattgcgtgtgtacatatatatatgtagacgtccaaattaaacacagtagatgtacatcaattatatagcaagatagggagctacgtgaaacaataaaaaatacaaatataaatgtgtgtgtgtaaaacgaagcgagtagtaggagtacctgttatgaatgggatctggcccattaggaactcttcgtttgctcatgtaattaataagatccaactttggatgagcaagcttctcctttcctacaacgaccacgtggtcgtttcctttgatttttccagcggactccgttggtgccaagtttgatttagtatgaggtgtagtacttgtagtagtagtagtagtgcgtgtggtggtggtccctgttgtcccctccggcgtagttccagccaacaaaatccacataagccccaccactgcaagccctcgaaccaaactctttaaaaggtgaaaactaatactacttctactgctagtactattactgctactactacccatatttcctttttcctttaattatatatatattctctagttgctggagaagagatgcccttgtacttggaggatttagatcatgaaaaatataaatttatatgcttatatattatataaaatagagaatgaaattctcggattatatatgtaaattgttggtgaaagagttagttaataataaggcaaaggaaaagaaacaaagacaacatatgtctcaagagagagattgatttgtagtatgattttttttttttaattttacttcatggggttaagggggtgagttggttttcttatagttaggttgaaggattctgttttacttttctcgaacgtagatatagagagggaaacagagagagaaagatagaaatgtgcttagttggtttcgaacgtgacatggagggaaccactttgctttatactgagaaggtttcgatacgagacacttcttttcttgctttgcatttgtgtattttcatgcaccctcatatactttttcatattaataattaattaccatataccaaaacaccacactttacgtacacaaaagtaattaaagacaggagaatgaatttttttttttttttttggaataaaaagacagaagaatgattggattgccgcagtgacatcaaatcacttcgtctgatcatttgtaatttgttatgtaaaaaatacataaaagatgctctacgatctacaccaaggattgcttccttaagtataagtcccgaacaggggctggtatagatatgttaattaaggagcatgtttacgatgtacgttagtgattaatttcatgtaaatatatacagaattaaaaattgaaaaatataagtagcgtcttaagcaattaagcactacaataccccatattattgcccttggtgcaacttaatgttgagtttcacacctcttaatttaataaagagatgttagtggtaaaactactcgaactttatttttttaagggatattggtagctaaactacttgaattttacgatttgtaacacttaaccacacaaattgaaattttggcggcataact

SEQ ID NO: 17984 - DNA, 6457 bp, Cannabis sativa
tttcctattgattgcaactttctctagaccttcgagaaaagcatgaaaataaaaatgagtgtattttaaagaatataaaaatagaagtaaattatggtagttgatgtcatgcattaatgaatctttttaatgctgttttctcaaaaaataaaataaaaattgtttctatatttttaccaattttttttttttcaattttgagtatttataaaaatatcgcttcatttcttgtctggtccggcccacattgcttccgcagtttaaattggaatcgtccgagtcgactcagtacgaaagacgagtcggtttggatcccacagttcattaaggcagaaaaatcgtctgagtcagaactgagaactgagaaagttgagtgaagcgaattccggttgaattttcggagtttgtttcctgaaaatcgatttcgcaaaagccatggacgcggttgaagcagtggtgactcagattcaggggctatcgagtagcgccggagacctgacgaggctccataccattctcaagcaagctgaggaatcgcttcattccgagtctgttcgattgttttctgctcttgaccaactcgacccttccaagcactctctcggattcctctatattctgtaatcttctgtttcattacatatatatatttatataagtatagatgtgtttgtataaacgtatattttttgctgaagtttttcacgtgttagggttttagattattgccaatgttgaattggttataggaagtagaatcggtgttgtgaactttgtgccctagcctccttttggtcttgaaacactcgaaaataatcaatagttactaatatgtttgatgagtttaatcaagtgttattgtatttgagaagaatgggggacttgtaaacatggaattgaatcagttgagttgcagtgacatgtatgctggggtggaaatgtggttttgtttgatcctgaaatgtagaaattgttaattggattatgaacatatttacttttggattggtggcagacatagacatgtgtttccttgtgaaattctgagaaaattgactggtgtttcatttatttaaatgattttccattcgagcttcttgaatttgattttttattcctctcttgttcatgggatgtttatctgattacagagaagcatgctcttctggtccagttacgaaagagcgggcaagcaccctggttctagccatttctagatttatcagctcttgtgctgcagagcagattcgattggctcctgagaaatgtatgcatttaattctgaattatttgatatattataagctagtctgcacttttcctgaggctattgttaatgctgcttgtttgatctgtgcagtcatatctgtttgtaagaggtttaaagaccaagttttgctgctcgaagctccaattcgcggggttgctccgatgctgactgctattaggaaacttcaggtctcatctgaatatttgactaccttgcatccagagtttcttcttctttgtttgcaggccaaatcctacaaaacaggcctgtctgttttacatgatgacatttctgaggtagatcagccaagggatctttttctctattgctattatgggtgagtttcttctgtgttagtgtcgaaaatcttgtttcattgttgttatatgctttgatcttattgggatctcttctgttaaactcggaggctcttcacacattgctgttattttctattctcttgttccttgatgttattatccatatgttcttttggatatttatttagattgcttttattttgaaaagtgtcaaaaatatttcaagaattaattatttagtttggaaaaccaagagagagagttcgaatggtaaggcgtgtgatttcctcccaaagatctaagtttgagttttgttacagttttccagtccccaaatgttgtagggttaggcagagagcctagttttttttttttttttttaaaaaaaaaaaaacatgtagtttgaaagcctcattagtttgttgatccaggtaacttttattaggagatatgaatgatgatgaacatgcaatgcaaatatgttatttttgtcttgattaatattgagctgtttctcgagtacatctgtagatattttgtgatttcaatgagaaaaaattctgactacatatattttttaaatattataatagggggatgatatgcattgggcaaaagcacttccgtaaagcattggagcttctacacaatgtctgccatcatatgtcactttcttttaattttttgcaatatgaacctttgatttagttgaccaaacttattttctttcttgtatacttcaggttgtaactgctccaatgtctactgttaacgccatagcagttgaagcgtacaaaaaatacattttggtttttctcattctccacgggcatgtatgtttcttgttttatttcattcctttatttctttgtactttgaatttagatactatgacttcagagttcatttgtcttgcaaaatatcttgtaattttcattacaaattgatagaattgtttgtttctactttcatttctggtggcagttctcgacaaatctccccaagtacacttcttcagtagctcagagaaatctaaagaatttttgttcggtaattggcactcttttttgttctatgacattttatctgaatgagttgcggatgttttcatgaatttagaaatatgttatttagtcatatgagttagtggtctcttattttgctcgctatcttctttgatcagccctatattgaattggcaaatagctatggtactggaaagattacagagttggaggcatatgttcaggccaacagagagaagtttgaaagtgtgagttttctaaaacatacccggttatgttcaatcttgtgctattcagaaattagtggatttacttatttttcacgggcttcagccatctaacgtttctaaaaatcacttccaggacaacaatcttggactggtaaatcaggttgtatcttccatgtataagagaaatattcagagattgactcagacatacttaactctctccctccaagatatagcgaacacggttcaattaaacagtgccaaggaggctgaaatgcatgtgctgcaaatggtaatttccatctcatcgtattaaatggtatagcatattcaaattcatatcactagctgacatttttttttgtcaatttgcagatccaagatggtgagatctttgcaacaattaaccagaaagatggaatggttagattccatgaggatcctgaacagtataaatcctgtgagatgatcgaacacattgactcatcgattcaaaggtacattgcatatatattttggaaatagcggaacaactatccaaagggaaaaaaaatagtaggcgttcagtagaagaatcacatttcggcctttctctgttttgattttctcctttgtaattctcaggataatgatgctttcaaggaagttgactgccatggatgagcacatctcatgtgatcccttatacttagcaaaggtgagttaataatcaattaatcgcgttcgatgattttagctgagctgaaccttattatgggaaaatcattgatcacttataaatcttcttctatgtttgtttgctcaggctgggagagagcgaccaaggtttgaccttgatgattatgagagtgttcctcagaaattcaatatatgaaccgaatcaagcgagactgttatatgtataggggggacctcaactagtgacgggtttatttttttgtgggaactgatactattaagagtcattttggtcccagctgagaaatagaacttctattgttttacctttctaatcaccttttgcattgccatagtggaaagaatctaatccataataatcatcaattatcatggtcataagttgctaacaaggtttgtttgggcacgggtggtaattcgtactagtatatatgagttggtggtttaaagttcttattaaagtacgtagaatccaataataaatactctattaggtggcgtttagttgggagtaataaaaatatagaaataagaatgaaaataagaatggaataaaataaaatttaaaatgcttaaattttttcttttgttacattatcttttcttttttgttgaatggagcagtcatttcattaaaatagtagaaagaacatttcattgcaatgttattccaatacttataaatgcaaccaaacaaaagaatgtaacgaaaattattttcttttcatttcattacctctaaccaaacgcatagtgaaatcttatggtagtgtgacttttttatgtatttggattttatttttaggtcttgagttgtctgtgtaaataatacgattaacaaagtgaaaacgtaaggtaactatgcattaacgattaaattagttgggagtcaaaccaacataacgacaactctctctcactctcagcatgaaaaatatcaataactagccgtacaaaatatacaaggcaattcccatttgaaaaaatgaagaccacaacaaatatactcactaaaatcagagattttcaacacctactacttcatccgtatagaatagaaaaaagaattaagaatacaaacaacaccaaaaattatgtccaaacctcttgtgcttctaggaattgaaggggcctttaattcactttggtatccctatctttacacagcatgtgccactcctggagcaccgcagtttggagagaaagatgctcaacttcctctgcagttaacttcgacatcgttgaaggtccctttttcttctcctcctcgccctctttcttcttttccttttccttttctttttccttctttttgtattcgtcttcctcgtcttcatcattttcgctatcttcatcaccatcaggcttcggaattttcgcctttggtcgtgctgcctttagcaatgctatttgctccatcgagatcctaagtctctcggcagctgcctctttcacttcgtcctcaggcatgtattcaacacccccatcggtgagatcatctaaccaaccttgtagatctgatccgatctcctttgttattgatgcgtcagaagctcgaacaacgaatttgcatatcatggttgttgtctcatcaccaagatccacattcctgctcacttcactcgctccaaatatcatcaaacctaaaaagcctccgtaccatgtttttgcagcgaaacaaagctgtacatgaaaggaaattaagtaaatcaaatgttcgagacagctcattggcgaaagtattattagctaccaaaccatcataggtggcaacaaacaacctaacaaaccaacaatttgtgacctaactacaagggagtcaaacctcaatttatatagaattaattctaactactactacttaaaccaggtaaacactacatccggaaaaccatttgcccaactcaactatgtagcagtgatagctttgatgatgtgaaaatacaactagagtttgatttaaaattgaagtgaaaaatataattacctgaaatcctgcaactgtccgaatgatatgtgaacaaactctatgaaatggcttggatgacagagatttaagcccactcagaaacggtgaggcaccatattgttgagcagcagtagctttaaaaccacttccctcataagtatatgtaccagtgtactctacaatagctggtaaactaggccagagtcggaaaaactcaacaggagagattttgtggggcagaagaagctcagtcaatggaatcttgtatggttgacacctcagtatgacgggttctcctaattctggtcttaaacttcttttttgtctcatgatctgcggatcttcttcagcatagtcaccttcataatccccagaagcaccactaccatagaatgggtagtataagacttgaacccaaagggctgatctctcaaaatgagacacaccgacagtcacactgcacagtactggatcctgaaacaagaagaaccaacaatagtacaaacagtctaaatctccataagcaaaaaaatgacataatttatataaagtgcagccccgacacctcgtttttcccccaaacatgataaagtaaaaaggaatccatgacaaaaaggaaaaatataagtggaggtgaggagagaaacctgtgacacaagattacgcaactgccgcactgcttgaggagacccatccataaaataaagtgcaccggataatccaacccggatatccacacggtttagctcgagctctgttaaattcaagacctgcacatcataagttagaatagtaattttaatacgtgggttttgaaagaaaaaaaaaacagaagaaagaaaagaaagcctgctctcattttagtttatggaaacaaagttaagatgatatccgattaaaccaatatcttatattccattgacatcctctgtccaaaaattttt

SEQ ID NO: 17985 - DNA, 7509 bp, Cannabis sativa
tcatggacactccaaaaaatgaatgaaatagttttggagggctcctgtagaaacctgtgttttagtcttagattagtgtcgtttcctctggtacggtagaatccattatgtcgtgggaaacggtaagtagagatgatgtcgtctttggacacagtatgatatggtgacaaaagaagagcatgagataggcttaagaggattgagatggcatagccaatggatcgtaggaatggaatatagtggaagagatgttaaagatagccattacaatttataagagaatgagggttggtcatacacatcacaatgcttgagctgtcgtttctactacatgttttctagttcatttcaccaattcactgataaccatgatgaatataatttgcgtgagtaaataacattttggaccaatgttttacaaaaattatctaatacatttatctgttttgttaaataaacaaatcatactctctattctttaagataatactctatttttatcaatttttcaatgttaacttttacataacaagagtatttaccctaattattcatagggactaatctagtattgtttgatgttcatacaccctactgctggccgggcaaggagaaaagcaagagtgatattttattttgaaaaacaaattccacagaagtttctatgttatgatgtcagagagaaagaataaaagaaaaaaaaataattaatattttgttgacttgttggaaaacaattttagctcatcaatgatggttgtcgtttggactatagagcaatctaaagaacaccaataaagaggtcttctatacagtccagagttcactactccattctccacgccatcaaagacttcagaaaaaaaaaagaacacagagaaaataggtaaaatatcacattcaacctattgtagataaaattaaagaaaaagcattgccattaaaaactagtgtaacaccacttaaattaatttatataagaccaaatacttaattgtaccaataaggatatatgaaagattcttgtacatatataaaaaaaaaaaaaagaattgctaactaacactactggtacctatcgctccactcaatatcatctctctattaaaatttacctagagtttcaaagtaggcatgagactacaacaaaagaaagacagaatgaataggtgaaatgaccataccactccttttactaattcaggaaaaaaaatgaagacagcattaactcggtcgataatttcgatttcacttgaaaaaaaattcaggtaccaaatgtctcaaaccagtcaacagcactaactttagctatacaattcagttgacctactttaaaattaccagcattttttgcttcaaaaaaattaccaccgaagtctcacttcttgaagagcgccttgaacccagtacacccatccgcattttgattttatatacaaatgtgtccatacagaatgggtgtacataaaatgtactctataaattaagtataaactaattttaattgaaagacgcctaagttgcattttcttcctcagaagtaaaatgctttatgttaacaaaataaaatgttatcataatcaaagccattcatggagcagaagcatgtgcaatgctgccatttgcattcacatttgaattcaaattcaccttcaccttcaccttcttcacctttgtcttcaccttcacctttgcatttttattcccattctcatgcccattctcgttcccatttccattattcccattctcatttccattcccatccgttactagaaatttctcacagtcattagctccaagttgagaaaattgcttgacaaggttattcacgtatgcaggcaaggaattcttgaattgttttgagcagctcttatcaccctcatccacatcctgaaccccacctctgaccagacatccaacttgagcaccatccatgtatgctttgcacgcaaccagaatatcatgagcacggctgcagaaatgccccatcacaaaatcttcaaaatgctgaagccaatcaacgaagattctatggttagaagttgtccaatataagtaataaacatgtaggcatacacgcagtacccacatggtaacacaatttcgtaaacattagaattcaaagaatcaaattaaagaacttaacaaaaaatcttgtatggagtatctaataggccagaagacctcagcaggtggaatttggtgcatgtttccaaattctaccggcaaataaaacataccaggtcaaaacaaaggaatgaattaaatttactcccaataggctgttacacttctaacataatgcaaattaggactatcgtgatgaagggttttggaaatactttattagaactagaaaattcacatgcaaacgtagttaaatattgaagaggaaactactatcaactgcacaagttggtgtcgaagggttatacggcttttggtcatatcattgaaaaagcaagcccagctactattcttccagaaattcacaaagtttacctttgggggtctcctaattgtatacatcatcgtcttcaaggagaggataaatgtactttcattatactggagggacctcttttcaccattttctgacccactcattggagcatagccaggctcattaaaataaggttttgtattcaagatcagcccctgtatggagaccagaacctgaagcatcgttgatgtacctgggatccatttctcattcttgttgccagaccaggtgttgagtagactgaggcatacttttccagtattatacaaatttggatttagacgaaggccaccagaatggtaatagacatgctgaagtaagcaagtggttattagactttaaatgtgtgcaaatacagcaatgatgcactataggctacagtaacattgattacataccgggggtacattaggataattgccaggaaagaagacatcaaagaagaacagaccatcatggtatggagtgccttctgctccaatgataacagctctcaaaagatccattctactctcataaaccctaacaaatatagtatctgttgatacagaaaatgttgcagcagatcagccaaaaggaatgttaaaaagaaagaaagatattgaatcaggggcaggctgaaaccttagttttttgacaacttttcattgctcatatatcaattctaagcaagacatacaaacacaatgaaatgactagtttataaaacaaagtctcactacagcgtacagacaaaatcaatccagaaaactgaccaggcaaatccttctccaaaatcttccactcctcctgaatgcgcttcgcccaattctttgatgactgccaaaactaaatttagaaacggccaaaatggtaatagagatttcgtttatttaaaaattcacaaagttagacattacaattaatataaatgaaaagccacacagcacatcatgtacactcaccagcttcaatgaagaattatccttaacatagaaatggtctgtatgaccttcaacagtatcgaattgtttgaaaagttggtactttctaagaatttcatctctatccaagctatgggttgcttgaacattgtttgttgaactacctactgcagcttcactactcacaggagaatgaagattgtcaaaccacagaggattggccatgtcttcagaatccaatacagaacccaacggatcataaaaatctgaatgagcaactaaaggcttaaaagttttcatagacccatttgaccaagaaagatgagatttaaatccaaaaggatgctgtggcatattcgcaggaacagaaaaacttgaactatcactacttgtaccaaattttttcttcatactttcgggtatgataggatcccaaaataatggctcagctgcgataggaagcttcattgtgtcaaattgatttactggatcatagttagttgaactatttatgataagttgcttctttttcaactgaaaagatttccgattccgagttttggatagtactccatgcgggggactggaagcagctcctctaagttgcaaattagctactgccttcttactttgagcaacttgagaagcaaacttattggatgatagatccattccagaatactgaattacagaatcgaatggaatctgaaagcttggattacttacagaggttgaattattgttaatctgaccaaaatttggtgaccaagaagatgaagatttgttgattccgtggagatcaacattaaatgattgcattgggctatgagccatactacttccaccataactattatccaaaaaaaaagggattggtgcttctattccgggaggaatatcaacactatcaaagtgggcttgcaacatggaatattgatcaacatccataaattcatcctgaagtaaaccgatatagtcatcgtcatcatcaacatcatcatcatttttatcatcaacacaagatccctcggaactgtggccatcaaggtcaattatgtttgatgggtcaaaactcttagaagattcaaccccatccagtgttccaagtgcttcaacaccagagggtccaaaaaaattaaccatagcttcctacaatgatattaaaaatataagaatggttggttaagctaaattgtacattgagagcaattatatatgaaaatgagtaaattttgatttaagttaattagaaatcagaaaccttggtttgataatcactgtatccatcagaatcaacttttactgccttccctttgttacttttatcagcagccttatcaagaaatgagagtccggcaggattgtcctcatcgatttcaatcacatcatgcataacaatctaggtaaggtaaaaaataacataaccatacggggttacaatatttagaacaaactgaatcttccaactaaattgcagaaaaaaatcagtattataaatttcgcacacaaacgcaaatgtgcaacaaatttcagcaatactcaggacaataaagtatacaaatttacccgtagcagctctcctgatgttctaagaaaaaaacatgaacttattaagaattttatattaagagagtctctcagatattatcaatataattgcaatttaatatgtgaaatcatcttttaaaaaagtgatagatttatttattatgattatcttgtaatttggctaaatataaaaaagtatcagatgttcagtgttatttaacatacaaaatccctcatagtttacaggtctcttctctcttataaatcactttcatgattatattccacaactctaaattcctcgtatctatttgtttcctttcttctatttcttctattttcactaatacagattgtcctaaaacatttatgatttataaccgttcgcaaaaacccaaacaaagataacacataaagttccaatctatttcctatgttgctcagactccacattcgactacattgattgactgcaaaaaatgggtcgagccctactaataaaaataaagcatacaaatatattgaaaacaatgaagatcaaggataacacaaagatcataacgcttctcaaaaacttgcttataattttatcgttcagggtaggaaaagtcttacctgtacctcccaaaaccctttcctccccaattcgaattacaggacccatatccaaaacagaaaaattcaataacaaatatggagcaaaatccaaatttccaagaacaaaaatccaatagagttttcgactcggtttgagtacatgtttttccaaagaaaacaatataattccaaaatgtgtccccaaccagggagcacatgccaaaccacaattataatcaagtcagtttcactccactgaaaaacgacaatctataaaatcagctttaactccaaaaaaaaaaaaaaaaattaactctcctcttactgtatatttcaatgatcaaacctaaggggaaagaaccaaaatttagagtgtaaacgttcatcccagtaattgattgacaataaaataaaatgaaaggaagaagagggaaaaactaatcatgttttaacttaaacctctttatgtttacgcattcgaggaggctgagaacccgacgccggcggcggagagatttcgacgatatcaggatccattaacccccaaaataatcgctagcttcctgtttggagagcaagaaagtgagggaaaagtcaagagaaagcgaaccaaatgagaagtttttaaaaaagtcgaagactgaattagagagagaaataaaatatacaaacggagagagaaagagaaaacaaaaattctgagcctgaagaaagcacttagggtatcggcggcggcggctacaaatgaccaatcggcttcaccgcgagagtttaaggactgatcctaatcctagatacaaacaaattaaagctagaataggttaatctccggctcggctcagctgaagaaataaagaaaaggaatagttacagcattgtaaactcattatatttatatatatttacatggctcggtgactttgccttcgaagcagatcaatcttgattacgacgaatacgagagtatcttaactaaatacacgtatttttctcattaattacgtttatgacactgcttgttggactactcccaatgcgggcccaaccctttaatctttcacaaattcgaaataaattcaggaccgtctgatggtattactctccaacctgattgactcattggtcgtacaggagtattcccaaacttatcgaccaagatactgaatagttgactgagcacgagaataattttaagctgtttcataatgatggctaatgtacggctgggattgaatgggctaatctctgcgttttcctgcctccacgtggaaagtgggccaaacatgcaaagtagccacgtaaggtaaatggatttggttggctaaaagctttgactagtaacgcctcgtccttgcaattatgaattattcttctctaaattatttattattaactccctattatgcgttaaaaaaaaaaaaagaaaaatcccctcattttttctttttcttaatcaaagtatgatttttgtgaaacaaaagaataaatatatttttattttttttttctaaaggagatttttccataattgatatgatgtaattgcacctatcaatactctttttaagaaaggaaacatctgaggtgggtctttttcagataatactgtatttattagcaagatttttactatgtttatcatcataagaaagttgtactataatttgtttcctttcatggaaaatgactacgcaatcccttcaaatccaactccttacaaaagaaataaactcttaaaataccaagtattggtaatgaatgattattatgaatgaaggtggataaatgttagagatcaattattttttttcttattaaaaaatttaaacataagctaacaccttaaatttatctcacaaagagaaaaaaataaaagtgaacactataaattagctatttatacttattaaattttttctagctagtaataagata

SEQ ID NO: 17986 - DNA, 4339 bp, Cannabis sativa
aagtaataacaatgataataaacttcactttattatttgctaatcaatttattatttatctttttcctgtcagtcttttttttaaaaggtagtctttcaattatttatttgttttgtagttattttaaaattaattatttatattgtcaagggaagattctctactttttctctaatctattttttttctttttctcttaatgaagttttaattttattaattgttaatattttttttcattttaaactattttgtcagttgattttgttaattaatctgctaattagattctcgttcatatttgattccttggttacattattattacttaataattactatatttaaaaaaaaaaaataaaaaaaactaatccagatgaattggctctctatttttactctaatctatctttttttttctttaaagaaattttattgattatttaatttttattttataatgtattatttcgtactatgaaatttgtggtttgtttgtgtaagttgtgatttgttttgtaacttatgtagtagtatgtttatgtatccagtttaccttgtttggtatttatcatgtatagtagtttattttaagtttatcttataataacgcgaagtagcagtggaaaactatccattccgcataatacaaaaaataagttttttcttcataaaataatattttgaaatgattttaacatttaaataaaaatttcatttaatttataattaccaaataatgtgttatttaaatttatatcttgtttttattttactcacttggacatcctaaaatttaagtttttttttttaaaaaaaaaattactatgttattaatttatatgacataattttaaaactatttatatctatacatatatgaagttacaaaatttatttgtttagtattttttgatgtaggtatcaacttttcaaatagttcttgttgttttggttggattaagttaggctcaagggaataaaataaattactttttttcgaaaaaagataggcccaatggaatttcacaattatttagaaggaagctatcgctctaatagtagctttgaattggttgctaaaattgaatttcctctcaattctttttaactctgaattgtttagccttgatctttgccttttttaaaagattttgtttctgtaatgatttaagctctattaattattttcttaatttactgtccaattttcttaaagcgtcctttatttatgcaaatcattcggccaatataactatgcataaattagttgtacacacacttaggatagatggtgaattaatttcgatggagaattttccatctctctttataatatactcaacgctgattttttttaatgaaaatttgttcattgaaaaattaaaaaaaaaaatgataataaaattttaaagaagggctaccttctctagatgtggagagggatttgtagttccttgtcctttttggctttggtttatgtttagggataattcatgattatactccatcatcatcaagctcaatcaatatgacagtcttgtgctgtttgttgttgtttcattctatggtaatctattcattgtctttgagaaatatgcaaactctcccttcaaagccaaaatgtaattttcttccaagaaatcatatcacaagctcctccacttggcacctgaattcactagtttgatgtaagccttttcaaaatcttcaaagaacaagttctgattttcggcatactttgttatccagctgcaatcaaaagaaagttcaattgtttgacttcagcataatttggttatgtatctcaatttcaagtttcgatgtagtgaaatagaaaaccttaaacattcttcatcctcagcaagagctcgatctgatggaagcccaaccatgcctgacatgccacctgcatgtgattaataaatggcacaatgttagagcatggtgaatcgaatcttccattgggtcggtctaacctaaaagttcgctgtgcaacattggtcggtggagtttaattatgagggctttagaaggtctgtcagagtaatatttttttgacatgatgattgctttctttttctcatgtcaagatttttcacgtaaatggcataatcatcgtcgatttttctaacaagtagcttaagatatagtgagcaaggacaaacaatgaacctagctaaacatcatgtggcatcatacaacatacacctgaattcatttagttattcagttaaaccaataattcgctattataaaacaacaaccatttgatccaagagaagccatctttatctttgtcatttgatccaatggcgtcctttagatgggaacagcttttataaatactaataactcttccttgataaaccaggtcttgttttgagctaaatattataggacattgaacagtttaactaacctgacttccatggtttcttgagaagaattttgaaatatgaattgtcaaagacatccgggtctccaaaacctttacttccaagagtatgggctccagtcagagctacgagttcttgcgttctgaaaccaaaagcagaagcacaatttgtatcaaacatgttaggtaagcttaatattggtaatagattataattatgttaataccttgctcttcaattacagcagtacttaagtgaagtttattaataaaatgactaacataaagaaacttcagagattgtacaagtgtcttaactacccttgccattttagctcttacaaaatgacagaaataaaatcaacttgagaataaaacagtcttgcgttataagatgaccacaagaagaaataaatttaaaaatgtatcaaggattcaaaatcaacaatattttgggggatggatttaaaataagataggaaaaatcaggcagttgatacactagattagtatttgatcaagaaaactaatcccaagatcagaaaaattgaaattaaagtaaattgactactttagccaatgaacatacaaatgtggaaaatggtatttgctatttgtaaactcacgataagccttttcttcgaaagctttccttcagagcagaagcaccaagagtttcaagaggaagcttcccatctggatcttcatccctaaatagcacaaaattgtcatcatgtcagctgtgttcttctgtaatagcaatttttttttaataaaaaaacaaatttttacatagtaacttcatttttatgtcaattgtttacttggaaaaacttgaacctttcatcttaagagttttaacttctttctttcttcctttgtttgccgttgacacatttgaaaaaccagattcgaattaatgataacttttaagccgaaatctgatttacatggtagaaaatcaaacttcttacttcgaatccacccggcctaacgcaacaggaattgttgggcctccacatagtgaaacagcttcggctccagctacagcaatcaaatctgcccaagatactggaaaaataatacatcagttgtaatactctcttatttattcattgcttctgaaaccttagctgcagcactaaaagataaaaacctggctttatagcttccactacactctttgctttctgtataatctgaaaaaaatgaacatttggaggagttagtaagtttaaggggcaggattttttgttgggacacctaaaaggtcattgaagatatgactaaaaacttgaccaaagacagataaagagaaggaacttgccttcacagggcctttaagacctgcattttcaggtctttcgagttcataaatgatagagccattcataccacctgcacaaacaaaacaaaagcttatgcaatttaatcagagaaaaccaactctaataaaaccttttcaaactaagtccaaaaattccatcagtaagaatcgttggatcaccacttattcaatacatggagaaggatcaatgtatagacataatgactaaaaattaaaagaaaaaacctttatacttcgatcaaaataagcaaaataaggagtctgaatttaagtaaagcgcccaactcataattggcatattcattgtgttgtgcaggtttggcatattacaagtggcatttccactcaagatttaaaactaaatttgataaaattttcatattattcaaacaaatccttcacacccattacttcaaattagatacctgaattgtcattgatgtcaaaggttccagcatcatgaaaaaccaggcgaagtacaccagcagccctgcccttgggaactacttttcttatctcatcctttaaaagcttactatattcattgttacttattgaccttcacaaatatcatgcataacaaagaaaaatt

SEQ ID NO: 17987 - DNA, 3157 bp, Cannabis sativa
  modified_base (61)..(68): a, c, t, g, unknown or other
  modified_base (1249)..(1253): a, c, t, g, unknown or other
  modified_base (1949)..(1951): a, c, t, g, unknown or other
ttattttattgttttagagaattcatattcagtatgttaaaaacatacatggtagtaaatnnnnnnnntggtaaaataattccaacaatgatatgtcataaatcttcaattatccctctgtgttcctgatatgatcatcgtggagcaattttcttgaggattttgcttctaaatgtagggtccattggggacctctccaagcagtgttaggggaagaatctcccacacccttgttatcttctttagtttgagtatttaattgtttggcttttcttttattcttttctagcttctatcatggctgaagctgctcaaaccgatgaggtggagattttggagcaagaggaagtttaagctccaagagtggtgtataattcatatccatgggagatggataagtacacaaataaatataaaaaattatgaggtgctttgagcatacgaggaagatcaaagcctcaagaatatttttggcatattcttgaacatgctttctattttgagggagtccccatgtagatggacacatagcttcatcgtttagagttaggctcatacagagatgggggctcctcttccacttagatgttacttcatgcacttctgtgtaaaagtaggtatttcccccttccagctaatcccctaagtttataagttgttggaaggttggttcgttctttgcagaaccaaaaagttggagatcccgtccccagaggagattctttacttctaccaagtgaagtcaaaccccatgcagaagaataggagcgaaattggcttctatcggcttgaaaaatgaaataggggctgatttgtccaaccaacactgtaaagtacatgcacgactttcaagattactggttcttcaccattgacttcccgttaaagagggttctaaccctatcattagatttcagtgtcgcaaggaagtgatgccatatttttccttcctagatttctttcaatcttttatttaaacatcttactaggatttcttctttctgtctttagacaatatttcacgtctaaaaaccactccttgttgggttttctgctataaataaaacttatttcaatataatcaaatttactattaagttcataatatatatttattcacgattatattattgtcaacacagtggaatatagtcgtgattatatgtttaaaaatttaattcccatgatttgtcagtacactaaatttaaactaacatgataatcagtgataaggtatacttacaccttnnnnnagtgttatgtcttttccaaggcattgataaagtataccagtatcagatgtatggagtatacattaaattggaccgatattgaacttggataagatatcatagacttactgttatatctttctaagtaatatcactggttgcactacaagaatgatgggcatcaatgaggacaattttcgttggtgaaaagcccatttttcatcagtaatgtctatcaatgaggacatttcgttggtaaaaagtcgttaggaatagttcatcgacaaaaagtattatgaacaacgacatttaatgtcattggaaaattttaatatcaataatgacaaagtcgttgttgataataatttatttattttttattattttggtaaatcaaagacgacaatgtcacattgattatattatcaatgacgacaatgtcatcattgattatattatctgactgaaccactatattttcttgtgtctttattatttccagatattcttttatttttggtagctcattgttgaatactcgctactctaagtgagtattcacactttcattatctagattatttaatacttgcacgaattttggtattatctaaatttttccgaaaacaggtcgtgtatattagaatcaactatagaatttcaatagtatttttttttaaaaaaaaaatgtgtaatgtttaattgatttaataaatnnnttattttactaaattattttaaaattgtaaattcttactagtagtcgtgatataattatatcaaaatcagctactttagattattaatgtaaataaataaatgcgagatatttttttaagtagaatatatttatttagttggatatttactgtaaattattaaagttgttgtatcaaaagtaaaaaatttacacaaaaaaaaatgtgacccatgaagatgatcttcgtaattagtaatgtgggaacatttctatcaaaaaaaaaaaattggggtgaaatattgatacggggacttggttgcaataaaaaatgtctccaaatatcaaactgataaatcacaccaacggataatagtgtttaggggtgtgtagaaagtcatccgatccaatcccaatcgactgatctaatcccaaccgatccaatagaatcagatatccaatcataattggatcggatcggatgaaaattttaaaaatccaattagatcggatcggatgttgaatgagacatccgatccaatggatagccgaaccgatccaatctaatatcatccaatgtccatccaaccatatttaatatttataattttatatatttaattattttatttagaaaaaattgcattgaggaacgtcatttgcattttatttataaaaatgttgccactgatttaattgatacacataccgcaactatttacactacaattatattaggaaaaaaaacaggaaaattccaaaaagggaaaaatattacaaaattactatgggccggcccattcaacatttatacaacccacaatgaaaaaattacgaaaataccacatggtctataccttaaaccgcacgtaatgaacggagaagatgaagatacctccatcgatcaaatctacaacgcaaccagaatgaaaccaaaacgagggtaatacaaccataaatttcggcgaaaattgattggaaaagaacaactgcaatgttctaaacagaaaattacaaaaaaaacccagaaaaactgtgaagaaactgaaattaaacatttgatttcggttttaatcgttcaaaataactcactccagaatcgaaaatccagattcaagaattgtagatctgtattaaacagatctggagctccccctcgaatccaaaacaaggtatgatatgaaatttttttcaaaaataaatctacgtcatatatagttgcattctg

SEQ ID NO: 17988 - DNA, 10099 bp, Cannabis sativa
  modified_base (42)..(48): a, c, t, g, unknown or other
tttaaaatttcgtaaaaccgtatttttgttatttttttgttnnnnnnntgcatttgtgaaattaacccttatcaaaaggtaacatgagcattagctcatacaatttggaatatccaatcacccaaactatagaattatctaaattaagagctagcttaattagcaagatgagctacaatattgcccaaccaattacaatggtaaaagcccaaaacagtcaaaaaaaattacaaagagataaatatcagctaaaacataaccaaattcaaccatatgagagtgtgcttttttttttttgggagcacacttagaagttagaactcagagcagagcacactttaatgtaatcaatctcaactaatatgcaatgagagcagaacacactttaatgcaatcagtctcaactaattaagggaaaaaaatgcaaccagctattgctatttgtattcatgaacatatttattttctatggtatgtggttgaaaaatcactttataggtagatttgtgtttaatttgaaataattacttaattttttttaccgggtcgatagataatattacttaatttaatttagcatgtctgttggactgtttgccttgctggacttgtaattacacaaattacactttttatcccggccatgagaattgagtttaatgacaaatacaattttaattttatatgtttttttttattattatttttcattatttcaatacaaatttatatgtttgagtgaataagtttaataaatagaaggaattacatgtggcagatagaattattaataaataataatcataataagaaacctcagtgaaatgaatgaagagaaaatggtaggtgtaggtgaagattcggcagttctgaaacactgagatatggatcaaatagatcagaagtggcattctaatgggggaattgagaaaatggccaatcatgcaaagagaaagtctctctggcctttggtcttttgacagaccgacaacgtcgcattaatcaagggcagacattagccagctcaattgctttggcatcagtgcatatataaattataaaattaataatgaacaagagcttcatcaagggaagacacattttccagatttttttaaaattaatttgggattttgttaactctactttcacgaccgtatatacacaccccacatttggattttgtgtactactcttcaatcttttaagtatttacttagggatcaatattaattaatgtatatatcccacatttggatgcacacacacacacacacacattatatatgttgttactttgggtgggggacaaaaacccatttcgttattttcaaacaattctaggaattggttattttggatgaagaattaaacaatggcctttttgctccttcttgtagcaaaatatatttttttttatgcatagggggctccaacggtacttaaatcacatagaaacatgttcaatcaatatatattgcttaaagagccgatctagctaaattttgcttcaaaattcaattgtcttgttttgtgaggtgtactaaccatatagatatagtagattaataacatatatatattaattagtattagctagacaagaggctagcttaattgatcaaaaaaataaacactactatatattaattagtatataattttttgttaagaaattatatattgtaacttgaccttttaagatggatcgattggaatgttaattttgtcatgtagctaggttaggggagacattgctcagatgttgatgagaagcatgctcaagacaaagcgcaagaaaacagaaacctctactaataaaatatatacttattacataaaacaattaattaagttaaaaagttagccaagtactgagatcacaacattgtttgctgtttatcagcggatcaacttagtttcgtttataaatatattattattatgtatagtaaacaatagggttaatatattaaagaataattatggtttgtgtgtgtgtgtgtgtatgtttatatattataaatcactgtgtgtatgtaattggggtatcgtaaaggtaatgctggctcttttttcataccctttaatcagacaaaatcaaatagccgactgcatgcatataaaaaaaattatattactaataatatataatatatatattcacctgcttcatataacaataaaaataataatgaattacatacacatatatataataatattatagttatacataacatatcttataatatagacatgtataatcggacgttgtggtccctaattgaagcacaacgttcaagattagcatcgtgataaggaagaataaagaggttataatcactattaatgcgaaccatggtgtatgtgtctccagagagagagagagtgtctaataatttaattaataaaaaatatgatgatgaaaagctcttatatatttaggattttcttaacaataatggttaattatatggatcatgagatcacatgctccatggcatgctgttattgattcctttaacaaaagttaaaataatacaccaaaaatagaagagaagagaaaaaagagagaaaaagaggagaaaatggtctctctaaaccacatgcttcctggggaccatcaaactctcccttaaaaatattagagctactctccaagaagagcatgagaagatccccaaaaaagtaaaactctatatcatattttaataagatgaagaactaaatgttacatatatttacatatgtatatgtgttgtttactctctctcatatatcttacttctcactataaactacaacactataaataaattgccctaaaccccagaaaggggaatgcataaaaaatgtggcatttgcatgctgtattacaaccacctttgctttaaaagaacatttcatgcattgggcactgcatgtttccttgctttttgatcttaaatctagtcaaaattaatatccaccaaatattactttaataaaattaatttcactctttaattcatatacttggaaaacagctgtgtacatgtatattaataagaatacttgacaatatttaaatttttttcttagaaaacaattatttcgttggattgattgattgattttatacatcaaatgagtattcatatatgttgattttaacataacctcaacaaactatttatatatatatatttaattataatatcaataacttataagataagtgttagtctatctttacatgtcacatacttttgttgtacaatttacgtacatgaaattatccagcctgacatgagtgtacggaacagtgtgttaattagctggaaacttaagctattttttcgccaagagagaggttgctgcgaattgacattaacaatttaattaatacaagattgtccgtgcagattattaccctaattggcattataattttacgtctaaacacataaaaaattattatatgaacaaattaatttcattgggtttctcaaccttagctagtaatataaccattaagataaaaatatactgaccatctacatatcaatagcagcagcatatgagcgcaagtgaagtggtgaacaaaattttttgtgtccaaaatcttacacatgcaatatttattattttgaaagtggagcatttatgaaacatttgcagccagttgtctggttcctataactttcattatagtcaacttacaaatgaagttacaatatatattttgttttatataacagaaaattatatagttttattttggacagtggaaaactatgtaattttttttaacaatggaaaactatataattttttttttttgaactatggaaaactatataatttttttttttttttcaaaaaatggaaaacaatataattgattcatcatgatctatatatatccgttaaaatcataaacagtttcataggttagacaatcttgactatggcacaggaaatgcatgttaccaagctcaattatagatgttattgataatgaacattgcaaattttgggctagagctagctatattggagaggtacacatgttcctactgaaaggtcaattattatcttgatcaatcagataggcaattttttcgaaaaataaaattaaaaaaaaaaagagagaggtagatgcctacaaagctatagcatttgaaaaatatatacaattaataatctctttaagtatgcatgtatgtaatattataataatgtctatccttcttttcccatctgaatttttaatattattattaatttataatttttcttttcttttcctatatttccaaataatagttccaggaatttaggaccctgtatggaaatgattaaaagagtggttcaattcaaccaatataattagaattattattttttttttttggcgaggtgatacaaataattacaaaagatacataaatcaaagaagttatgatcgtccaaaaatggtcagtgccctataatgggacatatgattgggttgtaatttaaccacattcttcaaccaatcatagtagtgagagagaaaagagtagtcagagaaatgatcagcaacaacattgatttgtgaaattttacagaactgtgtaggaactcatgagccagactatacattacattcacatcagagaaatttaaaatataataataaaaaaaaaaaaaaaaaagaaagaaaaaattgatcagctacctagttgttagccgtttctttaatttcctagaaagaaaaaaaaaaggaaaaataaaaaaagaaacactctcatcactctgaggcaaatctaaagcttaaaccaaaccacgggtttaatttcactacatgtccaaggttagtgtccttcgggtaaaaaccaaggacgtgtttgggtcgatctgcttagaaacaaagggacaatttaccaaatcacctattcattcttctaacacaaattgaaaatcatctagagtcaccactcactaatggctgctacattttttttttctttttctttttcaaagaattatatagctcaaaataggcttgcacaaaagaggataatgtgccgttagcgaactgggtcatcccctcattaaatcactcctcactctttaagacgtgcggggtccactacatttccctcttcctcttccaagcgctggaatatgatcggcgcgccgtgctggggatgaagaagaatcagcaccgtcggcgcgtgttggtagctcggggagagcttaaatctgaatcgttgaagtatgatcgccagcgctagcttggcgtggagaacggcgaggttttggccgatacaggttcggaccccaaggccgaagggtataaatgccaatgggtgtttggcagctcgagccacgccgtctgagaatcgagccgggttaaactcattggcgtcgttaccccacgtggccagatcatgatgaacggctaagattggaatcaagagctccgtgccacgtgggattttgtaaccacctaggtccacgtcagttttggcacgtctgattgttgccaccgtcggcgggtataagcgaagtgattcatttattatcatgctcagctgcacatcaaatcgtagcccaattaacatcaattgactgaaatatccttataacttagaataataacaaaagtaccactgcagtttctatcagtaacaacataataaagcaaaaggtggcagtttggtttttctcagggaaaataaaattgcgctacgagacaaaaccataattttttgtcctatttatgacaaaaataaaataaataaaagaaaaaagacagctctccttaccgtcttgagcttgacaacatcatccttagtgggtatgtcacgtgctccacacaccttaagcacctcgtcacgtgcccgtacctgccattgtgggtgcatcgctagcagaaccgtcgtccacgtcagcaggttagatgtggtctgtttccccgcaaagaagaaactcttacactcctccactatgtcctgtggcgttatagcgctcttaaacgacggcgtatcggacgcctgaatcatcagccccagcaaatccttaggaccacaactgctactactattactactatagcaactaattttttcaatcttcttcgaatcatcattcaatatcttcgtccctctcctctgatcaatcaacttcattaatgacttccttatcactttattcagtctccatgaatttatgttcctctgagttggtaaaaatctgtaacaataagagataacgaaattttgaatataaaaatggcggttaattaattattctgccgcgtgtacgtatatttatatatatgtaagcatagttggtacacacacctgtaaccggggatgaaaactttctggaaagcatcggaggcgagaagcatttgtttagcttggagcttaaaaatggcttttccttcttcgtagctacttccaaaagcggttctggttattacatcctccgttagggtttggaaccagttggaaacatcgatttcgatctcgccggtatcggacattttgggccgccattcctccagcatttcaaccacagttgatgccatcacaggtatcatcgactgtaaatttgtaagcatagttagattttttttttatttttttctactaaatacggaaatgtatttgcgttgtgtggttaccttaagattctccatgtgaaaagtaggagcgatgattttccgatggtgagcccatttttcgcctttgaggcttaagaggccatcgccttcgagctgcttaataagcgggtgagcttcatttttctcgtagtattcagacttggatgtgaaaatttcacggatcaaatccgggtcggatacggttagccgacccgtggctccgaaccagactatgaatgttccacctgccacccacgagatttttttgatgatcaagaacgttacgacagaaagaagaatttttcttttttaagttttcagtaattaatgcaagtgtgaaataaatgcaagttgataaataagttgaggaaacaaaataaataaatgtgactatgtaacataaaaattaatcagagaattaattaataagaaaagaacagaatagaacaataaatgccttttgttttgatattattacacagttatacaagtttataaaatctctctaaatatattacactgcttcgagtggtaagtatacatatatattatatatatcaagtttgtgaaagaggaagtgaaaataattaagaattgtgaggatgcaaaaatatgccgatcattattttcatcaaaatgaacattggatagtgtttgaccctacacaaaagaaatagttggaaaataacaaaagaaaataggaagaagacaagtcccaactattaatgcttctattttttttataattggtaagcattactaagcaatatgaatattttaagcaacggaagaaacaaaagaaaaacgacatgaaaaaaataaataaaagtagatgaggctagctagctctatagctatttaatttagaaattactatatatatataataaagtttttattgttatctctgtcgggactaaaggttcaaaattaaaatttctatagatgaattgatattgaaaataaaagaaataaagtccctatggagaatcttcaaacaagacatataccacaaaaatattaatattattatttattgcagactttttttttttgccggaagagaagggatgagaaggaaaatgaagagagaaaaataaggaaaagaaacgatacaggtgtgaaacagtccaaaatctgaacttgaacatcaagcatcaaaaagctcagaaacgaaaataaaaaaaaaataaaaaaaataaaaaaagaaaagaaaagaaaagcctgagaaaaagtcttaaaaagaagtacccaaaactcaaaaacctttcgaaaagcaaaaaaaaaaaatcttcatgatgatgatgatcatcataaaacaaggcaaagggcgccaagagacaatcataatagaagtattaccacccagaaaggtaaaataaaagacttaataagcttaatcattgttatcgagcaaaacggtctttcacaaaaccatattaaaagaccacattaaggcaaactcattttacaagaccattttgaaacaacactaatgtaacactaataaagaaacaatcaagtgaagaagtagaatcaacccattcaaccgtagccaaaattcgtcaaaacccagatgttaaaacttaaaaagagagagaaagattgagaagaagaagaagaagaagaaggaggagagagggagagggagaggaagagggtagtgaagatgtaccatagattttcttccagtgatggtagaaagaaaggactcttgggagtatgttgtgggagaaattaggcatgggctgagaggaggccgtaagcatcatagacactaactctttaacattcccaatgaagaaacgatatgggggtcctctgatcccttgctttgagaaatggtcttcgattctccttggtctccaccaaagcaacactaccatgttcagcccaaaaacactcactatgaagaatacggacagaagcttcacccaagagatcaacacttctggtcccatttttttttctttttcaaaaacaagaatgaaaaacttcagaaaagaggagaaatcaaagaaccaaaactagtgcggaaacaagagctagattgatagcaaattttggctcttcttctctgtgatcttcaaaacccagaagaagaacatatacacatacacatatatgtatacatacttataataaagagtgttggtggctacttctctatatttagctacttcttcggcagagcagcctttgttttgtttttggtttttttttttttttctcttttcttcttatctgctttgtttatgtttgttacttcttctaagtgtctcggctttttaataccacgaagagagagaaaggtaggagagagagagagttaaccaaggccaacggcgtaggggccgccattggaattctaagggggtcaacgagtgaggttttttcctttattttttttttcaaagatagtaattttgagtcttttaatctcttgaagacaacattgcccctttctttttcttatagtattacaattacaatatccttgtcttgattttttcgaaaatgaactttttaattgttttattgaaaataaaataaaattggaattgttttcgagaaacaaaatgatattaaatattaatgtagtagttaattaatgacattctaatattacaggaatgttttttcttataattaattgttgggagagatttttctaatataagaatgttccccaaacttttcaaatatttttgactatactacttgaataaagagtttgcaaaatttggtttagtagtactgtcgcatactctgttttacgcatttttcaccgtagaaggatttatctctaaaatatatttactatctattattatttttaaatcgagtgaaaatagtaactaaatataaataaaccatcttattaatattattctccctaatagtcatcttcaatcaaaaaattcagtttaatttattggataattactattaattactattagcagattttctcatgtatccatgaccaattgcgatgcatgtcttcaaaattaataattctttcttaattaatatgacagtttgaacaactcaaaaaaaagagtatagtttgaacattctaccttcttccaattaaacaaggtatagtttgaacattatactcaaaaaaaaaaaaagagtttactttaaagtttgaacatataatttaattaattgtacggagaatcgtatccatcgactatagcggcgtaatcgaataactattctagaacttatatttttagttttatatatttatatataaagatgttaaaaaaaatatttcaaaaaaaaaaaaagtagacatttgtttataatcactacatagaggtacttttgatatatttataaggctaattagtaattttttccctgaattttgatatgtactaaatcatgccctctgaacttttttggcgttaaaaatttccctgtactattaagatagttagatttaaa

SEQ ID NO: 17989 - DNA, 3922 bp, Cannabis sativa
  modified_base (43)..(48): a, c, t, g, unknown or other
  modified_base (87)..(87): a, c, t, g, unknown or other
  modified_base (523)..(524): a, c, t, g, unknown or other
taccattttagaaaatatagggtccattttatcatttaacaannnnnnggaccaatctgtaacttttgcaaaacacatggtctaaantggtatttaccctttatttaattatgaaaatcttatgatggatggggtaaaacatacacaagtttttttttttccttcatccaaattttttttttctcataaatttaattaatcaattaccaaaactaactgtaatataaattatgatggacaaaacacattttttttttaaagaaataataaatatagttggtgagtacacgtggtgatttatataacaacaagtgcaagtggagcccaaatcacaaggagcattagcaattaggggtgttcgcgatgttggtggtgcggtttaaataattttttcaaactaactcacatatgcagtttttttcaatttctcgaactgcacccacactgtgaaactaaaaaacgcaccgcaaaaaatggtgcagtacaatttttgcgatttagactatcaccaaataattaaacnntcacaaatacaacaaagtttgagcaacacttataaaaaataacataatataaggcttgaaaataaaaataaaaaaaaaattaaatttcaacactacaataattagtgagttttgggttgggcatacacaaattggacttaaataaatataaaaattggtatttttttttataatgtacggtgcggtgcggtttatgcggtttaaaccgcatattaacaattcaaaaccacaaactgcacagcactgtgcggtttaaaaaaaattcaaaccgcgactgtaccgcaaagaatttcaaaccacattttttttgcggtgcgagcagtttgagcggtttgatgaacactcctaaatactattaagaatattaacatatataaaggtgatagacactattagtgccctttaatatttctcaatccgagtattgctactaggtaccattagtacctagcaccttcttaacatgtcacgttatgattaggtagtaatacttcttaaaaactattatattaaactatttgagaaccgatacttaattggattaaaaaaaatattgacacaaaaaaaaatactggactcgtgtgcctttagcatttctcaatcataagtcctctcttttgttgcccattccaatcccataattttttttttcacaatactgaatagtgaatagtgaccctattattattattattattattttatatttttaataaataagttatactctttacccgctaatatatataactacacatattatctactcgtatcgtaatgtaaaccgaagaaattttgagaccgacaacaaatttagcttcataattttaacaggtcaggtaagttctccttaaaaatctattttccttgtgctccaaccttctattatattaattttttggtttgtttcagtgcctgattacctttgaatttgtttttttgggattttcttttctttccgattttcatttcccagctatttaattggtcaattgtttaatttcgtgatggataactattaaattatttagtcttgaaactcatttgtttatagattttattttgaaatggttcggttatgtgatgcggatgtttttttttttttggatgaatttttgggggtgttggtgaggtatatttatgatattctgattcttctgaggatattgggaaattggtttttgttatcttttgtttgtttcgaatggggaagaaaaaaaatcagaattttcccgagaaaatgcagtattttcagtttcaattcatgtagcaggaaatccacacactttcctttcagttaactcactgtcacactgcaacaatttggctgactttaaagatagaagaaaatgcaaaataaaatattttagtcagtgattagtttgagggggtttatttatttgtttgtttgttgatttgattttctttgaccgaaatgagaatttgaacaatgggtgtattggggctcccattatgtttcttatgggtgttctatgacttggcttttcagagttcaaatggctggaacacacgtgggagtgatatgaaggttcaacttcaatttgagtaattttgttgtagcaaatattccgtttggtctcattgagatgtatgttacagctgaagctgaagctgcagacgttgatgagatgggctattcaatgagtagattggagttagagtctgatatctgtgatggtgagaaaaacatccctgaagtcagtagtagtcaaagatccaccagaccattaaatgttctagaccatgagatagcccagattacgaagttaagatcaggacctcatgagttgctaagccatgttgaacctgggaggagggagcagcaagtgtctacagtgaagatgcttgcacgtcgagaaggtaattattctggaagaggaaggttctcatctgcagattgttgtcatgttttaagcagatatttgccagttaatggtccatggcttgtggaccaaatgaattcccgggcatatgtctctcagttttctgctgatggttctctttttgtggctggattccaggtatttaatctaatgccagaaaagaaaattttaaatcttctaaatgttgaaataaagacttaaatccttggtgagcttgctgagacaaaatgacagaaacaagtaacatttgaaattaatgggaattattgtagattccattactgaaaacttgatgttggaattttaaatttttcatttcttcattcctttaaggaaattttcaagtcctacctaccattctgaaagaatattcatttgcaaattccagggaagtaatattagagtatataacgtggacaaaggctggaaagtgcagaaaaatattgttgccaaaagtttgcgatggactattactgatacatctctttccgcagatcaacgtcatctggtaagttgtatatcatttgtactttatgtataattggtgtttttgctcttcataattttgaaatgccttttgttttatacatgagatttatggtttctgggaactaggacaaaattattggtaacagaatttgattttccacataacatggctcaacttttttgtatgctttttgctgtgcgtttagtaaattccttttgttcacatatctttcagtaatttgaggatttttctcaaagtgtcattgaagaccttatctttaatctaacagacttatgttttggtattgcaggtttatgccagtatgtcacctattgtccatattgttaacgtggggtctgctgaaacggagtcactagctaacgttactgtatgaaatgaattataatttatttggacaatgatattctaatttgtcactaaaagaaaaatgagtttttctgtaattttggctttttaaatactgttgcaagattgtaactgtaaatgattgctttggcgtttataaaatttcacttaaaccctggatatctctgttcttggatagttacctttcccaaaatataaaatgtttatttgttttgcaggaaatacatgaaggtttggatttttctgccgatgatgatggaggttattcctttggtattttttctgtgaaattttcgactgatggaagagaacttgttgctggaagtagtgatgattccatatatgtttacgatcttaatgcgaataagcaatcccttcggattcgggcacactcggtatatagccatatcatagaagtctttattatacccctctcttattgttttttgatggcatacattttatcattgaaaacttaatgtggaatctttgactcagtttatgtgttttttcttcatttgtgcttcatctacctatttatgttgagactactcattgttttccaagtcaatgttttcatatttgcttcattatactgaataatgtgtaattaccct

SEQ ID NO: 17990 - DNA, 3072 bp, Cannabis sativa
aaatgggtgcccctctctatttataagcattggtattaaaatgacttaggtcacctaggactacaattggaccaatagaattaaaacattaagacaactcaacctatgtacattaaagtatttcatttaatccttacgtgatgcacaagataagtcttaggcttaggcttatcattctgacttaggtttaacttaatcttgtttttataattagttaaaaaacagtctttaacaaatttttttaaatgcttgaatttagcacaaatcatgtcaagcatgacagatttagagtcataagggtgttagatcttcaaacaatttgaggaagttgagtaatctgtgaaaagtcattgaggaattaaccgtttattttcaagtaattgttgttttagctgatgtaaattctttttacaggttgttaactattccattacgccaaagacgaaaatgtatgcatccacatgtcctgttttaacattattatttacaagactacatgtatataaatacaaatatatatatgtatatatttttttctaatccccgccatttttgacgcccaaaattgcagacttgaaagatttatttttgggtgagaagttgggatatcttcaatatgcaaatgaaatgacagtaagtacttacgtgattagttttttccgtagaatattttatttttgtagtttgtgtaacctgtttgtttgtaggttgagcaagatgatacttctttaagaagtgaaagcactttaactaagataagttcttttcttgaaagtgcattcctatcctcttgtgaaggaattatggtaaaatctctggatgttgatgctggatattctccatcaaagcgtgctgacacatggctcaaggttaatgctgttcacgagtattttatgctggatattccccatctaatttaggagaacactttatttattatcctttcgtaggtcaagcgagattatgttgatggactgaatgactcacttgatttagtcccgattggcgcttggcatgggaatggaagaaaggcaggatggtaatgaaatttctttgatctccatccatgcatgtctttttgttcggttttttagtagaatgttgtatatgattaggttgatatttgcagtatgttattgcatgagttcgtaagaagaataggataaaataaatgttcagagatgagttgtttgagaccatggacatagtcaatggatgtaggaaaatatcaaacggttggtgtatgcataaaaaccagtgatactgatagtcatagggatcaggtttctatagttagcacaatattgtatttggtagaacgagggggtgcacatcttagcattgcaatattttatcagtgttagcatcacttcttttaccagtgcttgaaaatggaggtataataataatactagaatattttttgaacgttttaccagtgctgatttactgatttcaatacttgtatttgttttaagtttttggttttgattttgatctgttactgtttttattatactttgtgctaatgtttaccgtggtattcctctgccacaagtgaggctttcagtacataacagcaggctttcagtacaagtagcctctttctcttttttcaaaaaaataaaataaaagaaaaagaatatttttagattgtaaaatattttattcacatgtcaagcagtgagaaaaagacttgtccacaattttatcatctttcctcttttttgttttgttttgttttttcccaagagttttgatgatttaagaagtggtcttgcaattttacaggtacagtccttttctcatggcatgttacaatcctgatactggagaatttcagagtgtttgccgtgtcatgtctgggttctctgattccttctacgcagaggtaaacgtggatgttgcatgtgaacattataataaaatgatttggataaattttctttgtacattaaatgtgatggtatacacagaagtatcacaggttcatgtgcatgaagataattggttgaaaataagaatcagatatcctcaaggcaatacaagataatttcatttcatcttcactttactctgcatactaggatactcagtgatttagtttcttgagtacatttatactcactgatgattgcactacttgtcttctattacttgctgaaatgaatacgctaaaaaactccactatacttttttctttattgctctatgttttctcacttgctcattggcatatagattaaagaccttcagtatttttaaaatagatatgtgtatagttgagtctctatttatttattgttatttcttttttctttttttttttgttggggggtggggttaaagctaaagtatgttgaactgtaacaatgtagtttctcagtctgaggaaataatattgtggaccaatcgaataccattttgtgacataacacaagggaagtacatcatacatcatatcatgacatgaaaataaaggttactttgtttttatttgttgggagttgcagatgaaaagtttcttttccgaggaaaagatcttgtccaaaaagccatcttactatcgaactgctgaggtgcctgatatgtggttctctccagaactcgtgtgggagataagaggtgctgattttacagtgtcccctgttcatgaagctgcctttggtctagttcatccatcacgtggcatttctatcagattcccgagatttattggctctgtctctgatagaaatcctgaagaatgtagcacagctgcagatatagctgagatgtttcattcgcagactcggaaaatggatgtgatggcggaagattaagttgtctttgtttatttattgttactaatgttgtacttgagatgattttatagttagaagttcaaaactaaagattgacatatttcaaaattttgagatgaacccgtataacttataccgggtttcaaatgaatgtccctttttctgtaagtttgtaaatatatatatagagctttatttcacacgaagcttcaaatgaaatgtacatagaaaagaagtctgacgacttcaccttttttttttttttttt

SEQ ID NO: 17991 - DNA, 4511 bp, Cannabis sativa
ttggtccggctgttccaatgtatgggacttggattaagagtgaaacagggagaagtaactgtttcaatatgaaggggaaagggacttcacagctgattattgagagggaggaggtgcctgaatgggagttgccaagaaacagaggaagaaatacttagaagcgacatgataaagggctggaaaaagcgagaaattctggcgagtctgcggtggtttcgccaggtccgggggaggagaacggtgtagataaggacaaggtgggagatagtacaatgacaggtggacacaaacaaaaaatcgtgcaggaggctacgcccaccattgtgcctacggtactgggtacgggagaagtttgcaaaaggacagagggaatatctgttggtgatggaaatgggattcaaaatatggaaaacgtgggggatagacagatggaggtgctgaatatggagaatgggctggggtatttagagcttcctattcctgacttctcattaggcccaaatggtgaggagaggatcccggatattgggccgactatagcccaaagccttgaaattccacattcatggctttgcagatctcagaggccccatgatttccctgagcctaccccacttaaatggcccaatgatgacccaaaagcccaagaacttttctttaagctgtacagcccggacgctactgatatgtataaggcccaagcctctttgatttgtaacccccctgatctttccataatgattttgcaattgttgggaactaagaaacgaaagccccatacttggtatcatccgtggcctgctgtcaccagcttcgaactcccaagctgcccgatcacggtggaagttgaagaaaatggcaagtcgcatactgaagatgcaattaccccgaaattctgcctcggttctgaagaaggtggagagaagcaaaggcgcaagagcgctcgtcgaaccagtcaggggtcacggatgcttaatagaggttctggacttaaaacacgacgtggaaggaagagggctaaaacgcaacaatgtgagatcagcgagttcgcaggtaatttggaagttgttttggaaaattgcactgttaattcttctcaattggattttggaaagggcgaggaggcggcctcaagcatgcccccaccatcattatgaggtgcatctcgtggaattgtcgtgggattcgtaggcccacgacagagagaactcttcggagtttaatctaggaaaataatgtggatgtggtgtttttatccgagaccaaggtaggaattggggatatgactatggttttgaatcgtttgggatttcctaatgtggcttgtattccttcggtgggcattggtggaggcttttgtttggcttggagacaacctggtttaattgaaataaaggaagtttttgatactgggttccatgcttttgttcctgcaaaccaaggaagtgtgtgttggcatttgttttgcctttatgggactccttattctgaggagaaagttgaattttggaaatgggcaactgagttgatgtcgaaatgtagggagtcgtgggttgttctgggagatctaaacgtaatattggaaggatcggaaaaagttgggggaagggatttccagagtcgggagggggcttttctaagggattttatggatgaaactggaagtgtggatttgggtttccatggggtccgttgtacctggcataatgctatgaagggattgaaaaatgttcgtaagcgtcttgatcggggtttggcggaggcaacttggtgtactcatttcccaaatgctaaagttttgaacttgccaattttggcatctgatcactctcctattttactttcgaccagtgaagtacagcaaaggcttaattaccctttgcggtttatggaagtttggacctcgagtcccgattgcgagaaggtgattgatttagcttggaaatatgactttaatgggagaagagatgatatcctgataaagaaactgggtaagacgaaaagagacctgaaagtgtggaatcagaactcttttgggttttgcgatcaaaagctgagaatgttcaaacaggaactggtggaaattcaaaataagctgccatcaaataaaaatttggagagggaagctactgtgcagctaagtattttggaaatggagtcaaatttggaaacaaaagtcgcgggagcattgggtctgcaaaggtgacggcaacacaaaattttttcacgcctctacagtgatcaggagacgcagaaacacgatcgaaagtgtgaataatgatggcacttggctccacaatcgtgaagacattgggaattatatgaggaatcagttcattaaggtctacgatactcagcatacggttattgatgatgactttgactctctcttttcggagttggtttcggaggaggaaaaccttaacatctgtagaatgctgactgctgaagaaattaagcaggtggtttttgctcttcatcctttgaaatcgccggggcccgatggtttctcgggcattttctataggaaatactggagaatagtgggggtcaaggtctgcgagatggtccaaggtttttttgaagaaggatcggattgtacaaaactaaatcatactttcttatgccttattcccaaggttacttctgcgtccaggtttgatcaattccgtccgataagtctttgcaatttctgttataaaattatatcccgtattttgacggatcggttgaaagcggttattgatagacttgtctcccctttccaatccgcctttattccgggtagatggatagcggaatgttcaatcatggcgcaagaagttcttcatagtttcaaaagaaagaagggtaagaatggggtgatggctgtgaaaacagacatgagtaaagcgtacgatcggttagaaacgaacttctttcttcgtgttttgaaagctaatggttttagtgaaaaagtgtgcaagattattatgagctgtgtaacttcggtttcgtactcgatgctccttaatggggctccgttggctcccttcaatcctaagtgtggcttgcgtcaaggagatcctttgtcgccgtttttgttcattgtgtgcagtgaggtcctctcgaaattaattcttagagcggaggccaatggagatttgagtggtgtcaagatctcgagggaagctatgcctatttcacatcttttctatgcggatgatgcaattttcttctgtcaggcggttgggaagaatgcggcaacccttatggaatgtatttctcggtatgaacgttggccggggcaaaaggtcaataagcagaagagtggagtctctttctcgcctaacactcctttgaggtgtagggaagaagtcaagagtacaatggatattgacggtcttagtcacaaagaaaaatacctcggcaatcctttcttcttctcggctaggaaaagaatggactttcaattcctcaaagacaatgtcatgggttgattggaggggtggaaggcaaagaacttgtcccaagctgggagaactacattggtgggatcggtgttacaaagtatcccttgctatactatgtcaacagcattggttcctaagactgtttgtgatgagttggataggattgtggcgcgtttttggtggattggcaatgctgaaaaacagagatatcgttcttttaagtcttagagtgaaatttgccaacctaaaagatgtggtggtcttgggctaagaaggttcagagatataaatgtggctctcttggctaaactgagttgggggatgctttctagagccgacaaagcctgggtgaatttgttggaatctcgatactgtcgagggcttgatgcttggagggtggagaagagattgggagattcatgggtttggcaaggaatcttggaggctagaaaagtttgcaagatgggggctggggtcctcattggggatggtgtttcggacttgtgggagagaccttgggtccctggggtgtctatggaggaagttcgaaacagtttcacttactctagaagacatgcctttgtcaaagtttctgatctgtttttggaggggacccgtgagtggaattcagagattgttagagactgttttcaggaggatgtggctcaagctatcttgaacattcggcctttagaaactagtaatgacatgttgttttggacagcttcaaagtcaggaaaatttacggttaaaagcggttattggttgagccaaaaagggagattcaaggatccaaaaaaggtgtgggaaaagctctggcgatcatcgattcatcctagactgaaacttttactctggaaattatggtcagatgttttgcccactaagatgcggattgggatacgggatgaagtttgtgtgctttgtcataatgcaaatgaatcggttctgcatttgtttggaggctgtagtgtgatcaaggcagtgttgtttcatagtaagtggggcattcgattagatgatctgcattggaacacaattatggattttggcttatgg

SEQ ID NO: 17992 - DNA, 3366 bp, Cannabis sativa
aaaatattaagaaaaaattaatacaataatcaactatactaaaggcattggaacattacagtattgttctatatattaaattaattggaaaatagaacaagtggagcaagaatttctgaatcaattctatgattataacataattttttcatatgatttcgaagcatatttttgaaggagatatgtttttatatattgtaattagtattgtacctccatcaaatcaaaagagaacaacatgtgtttgtgttattattattattattattatgacaaattccatttcaggttatatggtattgtctaagtctacaactttctatagcttaatttggcatatacatttaatacagcctcttgattatgtgtagggaactatttaatcttcaaaatagtgaaaaaaaaaaagaaaaaaaaaacaaaattactccttttcttgtccatgtaaataaataataaatattggaagtagtacctacctagctcaatttcatgatcatgaaataatatcagtatatataaaaatataatttgattttgattagttgttgggtcacagcaaactagctctcagtgtgcacactatatgcacatacatacctatagcaattatatttatttatttaataaaaaaataatgcaagcaaaggcaagtaataatatcaagacacagaagcaaaaagattatgatagtttaattttgttggccacctaacagaaaagttgtgaaactaaatcatgctggaaagatgaacatttgtacttattattttataaatagaaaaaagaaattattaatactattagacatatatctgtaaagcctcctctaaaagttgctaattttaaacatgtcattactgattattacaagcaaatagagacaggtacttgtaacaatttcaaattaatatttgaaaaagatgtacacacacaaataaaaagagaaggtatgagctcatcatcatgtgcttaggccccaacagaagaagaatcaaattattttccaggcattattagttatggtatggtgtttgtttgagttgccacaatgttagaaataataaaagatcatttaagtcatataagattggagaaattatttataaagtttgatagagattattattgtcgtttctcaaaagctacactactccccactacatgtaaataacatggcaaagaaaggaatctcttaatggaagttaaatgtcaatatctcatatcctacacttcattatctctcttttagaatttgtttgtttttcttttctctaattgagattggttagaaaagcatgcatgtgcttccttgtaattgttgaaagattctagttgaacaataaaaagagtaattgaattgatcttatattagacatatcaattatcatcactactactatagctagttcactttgcccaccattaaggcaccaccatttttcttttttgtatcaattattaagcaattaaaccattcatgataagataaaaagaagaagaaaaaaaaaagcaaagtacttgaatactcattgtagagaattttattgttattattattgagaactcatttgagagaaacaatgggatccaatttttcagtagtaatttataattggacagttttaaatcaagtcccactcccaccggtacctttgattaaaaaaaacaaacacaaaagcaaaagagataagggacttttggtactattagacaagtgagaacaagagacctcaacttgggcactttctattgtcatcttctcttccccacttttgctttagattatagtaattacaatatggttgaagtaagactgaacaaatatacatatataaatatatttatatgtataagggctttttattatggccaacagccctaacagcaaaacccaccaaattgatccaacttgggacttgaaccaaaaatctatgtgatgattaaagaatctctaaagtgttgatttgacaataataaacattttaacactactaataaagaaataaataaagtaaggaatacaaatttgatgccaacttggattcttagctttgactcggatgagttttgatcatcatcagatgactaggagtcaacttcaagaatcctatgtaatgtaagccagagcaggctttattgagaagttgcttgctgtgtcattggagggcattcataattttgacaaatatgcactataaaaattatcagattttattcaaaaaaaaaaaaaaaatattagattaaatatctttttgtcacaccccatttttccaaagttgggaccacactatcataaaaaaacctatcttttgcattattaaagattttacaacttgtaagtggcgattcaagtcacgacacgatagtacgatatatttgatacgaattattgcgtattaaaatcatgaaaagtaaaaacaagttaaaattagatcaaatccaaatgactcaataattatttagtttaggttagagtcaacgcatgtaatataaattgactcgtttatcttcaatatattattaaaattgtaaatttatagttaaatattatatataattatcaaaaaaataaatccaaactagaaaaaatttacttacaagaacataaaaatatagcttacttacatttaatattaacaattttgtttattgtatagataatctacgattaattatttaattaattaattttatttatttatttattatttaaattagtcagaaaaattgacacaattaaatatacataatttaaatatttaatattaattatgttaatcgatatagttttaagtataatcaacacgtgaacataataaattgacatacgaacacaatgaatcaaattaaaattaaaatttctagcacttaaatatacaggtccgattaagattaatcaatacatatcatcaacgtattgttctttgttggcgacaagagctcacactgaagaaaaaggaaaaaaaaaagcatttctttatgggattatttctgaaatacattaaataacaaaaaaaaaaaaattacaaaaatataattgtatgaaattttaaatatttttacagtttttaaagttttatttattgaaaatatagtcttatgttattttttatgttatactcttgttattttgttattaatttttttattatttgtatattatttcaatgttgttttttttattactttttatgtgatttttttttcttatttttatagaataccgtaaatatatataaaaaaatatttaaatgtaaatagtaaaatttttatcaaaaataatattgtgtaaaatttccattaactaattagtattaaaataaaaaatacatacatgtatccaatttacaacaattaatcata

SEQ ID NO: 17993 - DNA, 6691 bp, Cannabis sativa
ggggatgggggtataaataggtagcggggatgggggcggggattgcattccccgtacattaaccgcccaatttccatctctaattcctattattatcatataattaaataaaaattattattattattaattaattaattaattattataattatattctatataatatatgaatccgtacttgaaagttttcataattatatataaccttaattaaataaataaataaataatggttaaatttttttatattatatttgaaaccttattcaatttttaataattataaattgaaactttaaatataatttattaattttgacactaatttttcataattaacacataaacatatatccttttttgttctccatttgacccaacttagtgaaaaattctcatatttaactaagtcaattttaattttaattgattaaataaatcaatttattgagacacaatatgatattatcccaaatattgcgaggaccatgaacttatgaaatcaagctccttgtgacttcactattcagaattgaactcttaattacaaaaaatactctatatacatgtatagatatgctatgtgttatctattgtttcgatcacaataatcaatgatcctctatagaaaatttacattaagtaggggaaaattgatattagcttaaagtttaaccatctcaagattgagattaaattgatatatgatcaattaagtgatactaaattagaatagatataacagtaagtttataatatattttccactgtcaatatcgatccagtctgatgtaaacactatacatctgatagaagtttactttactaatgtcctagaaaatacattccatttgcctaagtgcaagtaaacaaaattatcgattataacattagtgtaaatttgattattagaggtctgtcatattcactgttgttagagttagttatagtttagttgtttaggttgttatttcagttagtccaccgatcttaattgtaaccaactcctcgtgagtttctcttgtataaactctattttacacttcaataatatagttttgatattcattatattctaataaggtatcagacatttaaagctttttctctcaatctctctctcgaaaagatttctactattgtttaaccatggtcagaacacgagctactggttcaaggaattttggccgaactcctccaccacatacctcttcttcgattccagatgctccttccattgacacaccaatcatccctccaattcccaatcctcctggagaacatcaacatgaaaatcttctccccattccttgacctgcacatgaagatagctcaagtctattttttctcagctccggtgatcaccctggtctgatcttggtcactcctcctatgtctggtcacaacttccagccatggcgttgtgatttcaaactttctattggtgccaggatcaagactgtcatcttcaaaggtactcttcctccaccacctgaaactgatccccttcataatcactggattccctgtaagcaaatggtcatgtcctagattcttcactctgtgacctctgagatcaaaagcaggattatgtttcttgacacaactgctgaaatatggatcgagtttcattcaagatttgatcaagggaatggatcttggatctttgagcttcgtgaaaccttgatcaccctacgccaaggcaaatactctgttagttcttactttactaaactcaaatgcatgtgggatgagatttaagagcttaaccaatgtgctgcttctgctgataacttggcttttttaaactaagaaaaagttttacaatttctcataggattaaatgagtctttctttcctgtttgagctcaaatattactcattgaacctttcccttccctgtccaaagtgtttcccatgatcattcatgaagagcgatagaggaaactcaagaacccccatattcctcttattgcttttgtccaagaatcaaatccatatggagctcttgcccaaaatccctcagtatcagcatctaatactaacaatgaacgcaataagaaaatgagaccatattgctccaactgtcacaaaccaggtgatttgaaaggcaaatgctatttcttgattagcttttctactagatacgggaataaacgatcataatgccactatttctattaatcaatcactggctaatctaaccaaacatgaagatatttaaacacacatatccctcctcagccaaaaatagcaacccaccacttctacctctaatgcatctctcccatttgcattaaatatatctggtaatgttcataactcttcttgtttatgggtcattcatagtggtgccacacaccatatttgttctaacatctcacttttcacaagtttacatcatactgcaatagctcactttgtttctctaacaaatagcactaagataaaagttcacaaatcaagcaatattaaacttttgaacaatctttgttttacaaaatgttctttatgtccccaattttcatctaaatctttttagtgttccaagtttccttaacaatcttaccaatatcatatcttttacttacactttttgtgtccttcaggattcataaagaaagaatattgggacaactaagaggattggacatctctacttcttgctgccatcatccaattctcacatatcttctaataaaaatttacattgtaatcaatcattaacactattttttcttggcactgtagacttggacatccctccatgtcaactactaatatcatccataaaaagtttcatttgaatacttctactattctctctccttgttccatgtgtcatttggctaaacaagagagttacctttcaattcccaacataatatttctcaatcatgtattgatttggttcacatatatggggacctttatacattactagcattgaagggtttagatgatgatcatagtaggttcacttgggtttacatgctaaaatcagaatctgatgtacaacacattattctacaattttatagcttagtttagacccagtaatctgccaatatcgaagcagtaaggtgtgacaataccaaagaattaaacattacctcgttttacattcaaaaaagtattaaaatttgtaactcatgtgttgaaagacctcaacaaaatttagttgttgagagaaaatatcaacacattctgaatgtgtcgatgtcttggcttttcaatcatctctagccttggtttattggccatatttaattaacactgcagcatatctcatcgatagaacccccctccattacttcagcataaaactccttttgagttgttgcataacaaaccacatatttatgactatttgagaacatttggatgcctaacttatggttcttccttaccaagtaaaaggcacaagttttcacctagagctcatgcctgtattttcattggctatcctcgtggcatgaaagcgtaaacactcattgacattgctactaataacatttttcattctagagatgtcatcttctatgaaactattttccctctcaaaggttctttatctacacaacattcggacaatttctttcctgttgcgctagacaatattacagaccccacatctggtctaaatactactacaatagacaacaattttgcctcagatcctactgcagtagatcacaacattgctgctacactagatcccactccagaaaccacatctagtttaaaaactactgcaccagatgtgacacccaacatgcagccaggttcaactcctggtgctgctattccctctgcccctgatccatttgcatcagttcaggttgacaacatgaagcttggtttagcttctggttcaactccatatacaattccatcaccaccagccaatacaacagatttcatacttgtccagctcccaattaccaaagcaaggagacaaatttccaaaccatcccatctcaaaaatttagtatgcaactcatctactgctcacctccttgctgaatttctcggttatgacaggtttacctcttcattttgaaatgctatcttacatgcctacactgaattggaacctaaatcttataaataggcttcccaattcacttaatggctaaatgccatgaacaaagaattctttgctctaaaaaagaataaaacttggactgttgtgtccttacccctggattccagtctactggaaacaaatgggtatacaagatcaaatatatttccaagggtgaaattgaaagattcaaagcatgcgtagtggtaaaaaggtatacccaacaacatgtcattgattatgcagaaacttttgcacctattgctaagttcaacaccctcaaattgttccttgccctggctaccattaacaattagtcactcaaccaaatggacattgataatgcattcttacatggggaatttcatgaagaagtttacatgtctcttcctaagggatacgtgcatgagggggagcttcttccaaattcagtgtgcaaactcgataaaagtctttatggcctcaagtaggcttccaaacaatggtttgcaaaactaagcaccaccttaatcaagcatggcttctccttatctgcctatgatcattcatttttcatcagatcatctccaactgatttccttgcattattagtctatgttgataacattatcattgccagcaataataatcaagatgatgctgcctttaaaactttttcaaagtccaagtttcaattaaaagaccttggatctccatgatttttccttggcctcgagattgctagatccaaattaggcatctttgtctcccaacgaccatttactatacaagtcttaactaaaattggtgttttagaatcaaaagttatcaccacacctatggaagctaatatttcccttagcaacgatgttggacctcttgtttcaaatctaacctcctatagaagcttaattgctaaactattttttttgacaatagcaagaccaaatacatcctacgttgttaacagacttaggcaatttcttagtgaccttagacaaccacatatgaaggctgtccaccgcatcctctaatacctcaagggcactcctagacaaggattattttttcattctaacgacacttcatagctcttagcagagcaccttcaaagcctattctgatacagactggggcacttgccctgccacaagacgatccataactagattctgtatcttcattggccaaaacctcatctcatgaaaatctaagaagcagatcattgtgtccaagtcctctactgaagctgaatacatatccttagctaacactacgtgtgagatcctttggctcatcaaaatcctctctaactttggaatcaaacattaacaacttgtaaccctttactatgacaaccaagagaccattcacatctctgagaatactgtctcccatgaatgcaccaaacacattaacattgactgtcacattgttcgggaacaaatcatcaaacactgcatcaaactctcccatattccttctcggcacaacatagaagacatcatgacaaagacccacttcccaacacaattcaactctttattgtccaagatgagtgtcaccaacctctacacctcatcatgatgggaagtattagaggtatgtcatattcactagttgttattagttataggttgttatttcagctagtccactggtcttgattgtaaccgactcctcgtgagttgctcttgtatataaattttgttttacacttcaataatacaattttgatatttactttattctaatactgatacacagataaatctctctggattaaataagtttgaaacatataatcaccactattctctactgtgatgaaatcactataattgtgaataactatatgtttatgatttaataagatttatacataatcatggttattgataataaatatgatttctgaactttattaataataaataaaactacaatgaatttgagttttatttaaggcataaaattccttaaaggtgtaatatgattattatagtagaaataaggggtgtttattggaccacatcaaatatttttaggtctatccagatccgatccaattatatattgaatattagattttaccatctgatccgatccaattaatttcagtcatccaatcaatctaacaatcgatccaacatccattggatgttagattggatcggttctatccgttggatgtatttcatatatatttttttggtttatttagatttattcaatattttagaactagtattttttggataggatcagatatatctaatattttaggtccagtatgtattggattgaattggatctatctaatccaaaaaaaaaaaaaattaatgttaatttttatatatacatatatattttacgtataataatatataaaatctaattactcatccacactaaatgaaaatactaattagttcgattggatgttatatgtattgaatttttggatacccactacaaaaaaagtcatttttagtgataacttttaagtcacaacaaaatttttttgcgacttaatatgacttttagtcacaacaaaaaagttacttgtgactaaatataatatttagacacaaattgtcactaatataattttagtcacaa

SEQ ID NO: 17994 - DNA, 12470 bp, Cannabis sativa
  modified_base (214)..(218): a, c, t, g, unknown or other
aaaataacacatattaacttaagagaagagaagaaaatagagaagaaaagaatgctgaaaactctttgaagataatgccttcagtattgcagttgatctctacaattcgtattccgtattctgctgtttatttccttctgaattgcttgacgaaattaactgaaattcaatccttgtatagccattgagggactaaaaagatagaaaaacgcannnnntgaaaatcctattcagctttgaattaggaagccacccaagcccacgtgaagaagaaaaaagataagatttttgtatcagcaaaggggtgggccacgacaccctccttgttgggccgcggcccgtgtgctagcttcacacgtagacgcctgctcttgaggatgtgggtcgcggcacgcccaatcctgggtcgcggcccatgtgtctttttccctacatgtacgatgcataatatcttttcttctagacaggattccgatttttcacattaatattttatgcgattttttatctttttttttctcatctttttctgttgatatttttctaatcttcttttattttaaatctgcaaaaataaaagataacaagcgtaaaattgctccaaacatgaataaaactaaattaaaaatatactaaacttaatctaaaattaatactaaaaataacctatcagaaactagattattcatttatcaaagtgttcgggtcaacatgttttccatgtgtcaaaccttaccaattgcataaattttagttccattcacttaaatgtgttaacttaggctatagtgatcaccaaaaagagtacaaatgcctaagttcacttggaagggtttttgtcactagaaatgtcatttttaatgaaagagaattccctttttataaataaagttttctaaataattatactccaaaaaacaggttgttgttcaaacctcatagtggtctcaagtaccgaatctccacattcaaaattttatccaaaatagagtccaaaaccatgttgatacaaattctgctgctgcacaagaagcatctcatggagcagcactgaacctcctttccaagaggtaagtgaaaacacattatttcagctactgaacacactaactttgacaatgatgatgttgaagatgcagctactaaaccacttcaggacgtccaacaggaaccacaacgtactcctgttcagtttcatccgatgataactcgtgtcaagattggcattttcaaaccgaaagtctatatgttgggcaagctctatggaattcagttggagaggaacctagaagcattgaagaggccttgaaatctaaagtctggaatcaaaccatgaacaatgagatgggtgccttgaaggcaaacaaaacctacacattggtgccatatattcatctcactataatttagtgggaaacaaatgggtatacaaaatttaaaggaatatgcatatgggtctgtaaagtgttttaaagctagacttgtagcaaaaggctatcatcaatgacccggaattgacttcagtgaaactttcagtccagcaataaaatctttgaccatcaaaatcatttctcacaattactgtcagcaaggggtgggaagttagacaactggatatcaacaatgcattcttgatgacacccttgaagagaatgtctataggcttcaaccactagtttttgaagacagcaccaaaccaaatgatgtgtgcaaactctacaagtcattatatgacttgaaacaagctctaagagcttagtccgagaagctcaaaaagacacttcttggctggaagtttgtcaactcaatgactgatacatccctattcttttacatgacaaacgagattataattcttgttctaattaatttatgtggataacatcattataacaggtaatgatgataccaaattgaagcagtttataaatgatctgaacaagaattttcctctcaaagacttgggaacacttcacttctttttgggaatagaagtacatcaagataatataggaatgtatctcacagagagcaaatacatctctaatttgctccacaaatttgatatactgaatttaaaaccttgtcctacacccatgatttctggcaagcctctctcaaaatctgatggtgagttaagttattaataataaaaaacacatgagttaagtttgataatttcattatttcaacaattatctaggtagtattaagcattacattgactttgtttcatactgtcatggagattataggggctcacttttgggccaccctttcctgacctatggtgatcgagtggtcacctcctccttttgattggatcaagctcaagtgtgatgttcatcttgaggagaatgacatgtgtatcgccgttattgctagagaacaccttggtgcactagtttgggtagttataaaaccattatatgcttctttgatttgctttgtggggaggcagttgcttgccctttaactttggatgtcgcggcatagaagcaagtatatatgttattgtggagagcaactctagtggggttattgatgccctaaatggtgtttgtactaattgggggttgattactgcactagtcattgcaaaaaaatttatttgtcttttgttggttttttattttcaaaagttgtaagatattgtaattttgtcgcttataatgtggttaagtgggcatttcttctacaattactataatatggtggagatttaatttcagtatcattctatgaacctttttattttatttttttaaaaaaagctcatatcaaatgccccatataattcctagttcagtagtaaaaatcttatttattttaattttcaataaaatcaaatatatttttttgctaaacaccaagatgcaatcttggtttgtacaacctaagtgaatatgatgggtgatattgccaagataaatatttaatttaaaattattattaaactagttaaagataacaatggttgataatttcaagatgaatattatttaaattgaaattaaatattaatttcgaacttagaaattggagaagaaaatacaatctttgtttcaacaactgatttaaagaaaaaataaatatttattttttagctaataaagacaactgtcgatattattaagatatatatttaatagtggtcataattagcatatagcctagcaattcacactttttcttaaaaaaaaatctcaaattaaaatccatctctcccaatatcaaatatataaaaaatactaaaaggtatcattggtgcctaatatttttatggtcatatcactattggtgtaattaaatatattggctccatataatttaatataatagcttttgataaatatcactaccaatcataggacgctacatctagaacgtgttaggatttataaaacactcaagaaatacaaataattagagatttaatcatatttctaaaagtgctttaatataaaaaaatcctaaattatattttatagaacatttgctaagttaaagaagaagaagataacgagatgagcagaagcactaacctgaattcattgttggagattgtagagaaaattaattatgatcttctaagaatacactatttcactaaagtattttctctgatggagaagaaaagaatacatgaaccctagtatttcttggaaaccactacgttatagactcattatataatgagttttgggtatttataagttgaccccttaacaaattataacttaactaacggtatctacattatttttatgacaacttaattttgtattacactttataatagcatatacattatacatatgtgcctacaataggattttaatccaacaaaagatgctaagcaatactggtgtctaacaacagtgctccaaatatatatacatttaatattatattttttaaccaataacaaagatgtcattgatactatcaacatgtattttatttattaaataaaaggctatgtttgttttagctataacattttatttattgaataaatatgatagtataattacatagtagtgctatatagtttaacatttctcaaaatataaaaaataaaatatatatatatttatatatatatttgctactttggttagaccaccatcgagcaaagaatccatgcacatacgcagagatgtctacttaaatataagataaagtaatcaacgtacgtccttcaattcatttcacattttaatcaataaccactcttcagtaaaaatggccgaaggagttttattagacattgctgcaactcttattgagatgttgatatcctcagcattcgaagagattggattgctttatggtgcaaaagacaagttccaagaacttgttgacacaactaaagtaatcaaaggcgtacttcttgatgcagaagagaaaatggttgtcgatcaaagtgtcaaagtttggctcaaacaacttggagatgctttcttccttgctgatgacttggtggacaagtttcataccaaacttctccagcatcgagtcatgtttgggaataataagtttaccagacatgtatgtattttcttctcaaactctaatcaggtgagggaagaggaagttattgggagagaggatgaaaagagagagattattcgaatgttggtggaaatggagtttggggaggatgtgtcattcattccaatggtagggattggagggttagggaaaactacactagctcaatatgtttttaatgatttaaaagtcgaaaactattttgaattaaaaatgtgggtgtgtgtttctgatgtttttgatgtgaaattacttgtggagaaaattgtaaactctaatacttctaataacagtctagaaaatttacaaaatgaacttagaagtaagataagtggtaagaagtatctcctagtgttggatgatgtttggaatgagaatggtgaggaatgggataagttagagacgttgttaaagtgtgggggaaagggtagtaaagtcttagtaaccactcgtagtgaaatggttgctaggataactcagacagttcaaccattaaaagtaagaggtttgagcaaagatatgtcttggtctttattcaaaagaatggcatttaagaaaggtcaagagccggtggagggctcaaaagaaatggagctagggatggaggttgtcgaaaaatgcaagggagttcctttggccataaaaacaataggaagattattgcaagaaaagttatggctgtctagagatccacaaaaggagttgtcaaggtttttgaataacgaatttgcaaaaatagatcaaaatgaaaatgatatcttgcccaccctcaaactaagttataatcatctcccttcacatttaaagcattgttttgcttactgtagattgttccctaaagatcatgaaattgatgtaagggagttggtacgactatggatggcacaaggatttataaaatgctctaataacaacaaccaatgtctagaagatattggttatgagtatttcataaatctattgtggagatcttttttccaagaaccaaagattgatggatttggtgatataatgacatgtaaaatgcatgacctaatgcatgatcttgcaattaaggtggcaggatcaaatagtgtcataatcgatcaaaatcctaaattttctaatgaaaattgtctccatgtgtcattagttaattttgattttgatcttgaaaccaacaactcactcgagattttcgaattcttttctcaacaaaaaagacttcgaactttacttttacatcatcgtaaagggttgagcttcttagaacttcaagattatttacccaaatttaagtgtctacgagctttgagtgtacctttcatgagtattgaggtgttgccaaagaatttgtgtgagttggaacatttgagatatcttaatctttcttgtaattattttctaaaattgcttccaagctctttgataagattacagaatttgcagactctaagtgtcgtaaattgtgaaaaccttattaaattacctcaaaaaatgaagaaattagtcaacttaaggcatcttatgattgaaggatgttgtagattgagagagatgcctcctgaatttgggtatatgagttcccttcacacattagataaatttgttgcatctgagtcgagtgggtttcatgaattgagcaatcttattaacaacttacaaggaagattagctattaaaaaactcaggcacacaattaaatattctgcatcagaaacaacttcaaagaaagccgtttgtgaagggaaacataatcttcaatcgttaagtttagagtgggaaaacgtttatgaaaataacaataatatggtggaaaatgatgaaatgttacttgaaggtttgcagccaccttccaacctaaaagaattgcatgtgtggcatttcatgggagtgagatttggaagttggctttcttcattgaataaccttgttaaactgaagttaaacatgtgttacaagtgccaatatctcccaaaattagatcactaaacgttctcttgaggaacttatggtatcaggagtagaagcagagtacatgtgctcctctggcgaagatgatgattttgatgccaacttgttctttccatccctggtgactcttacaattggacattgttcaaatctgaagtggtggtggtggaaaaaggaagtggatgggaataatattagatcatttcctcgtctctctaatctagtaataacagactgtcctaacctcacttcaatgcccttgtttccaactattgaaaaggttaaactgttagcaagtagctcaatgtcattagaagatacgtttaaaatgatgaggggatcaagcaaggcacacaacactactcacccaaacatttcattgctaaggtctatccatataagaagctgccccagtttgacatcactactggtggaagggattgataaccttacttcccttgagtctatcttgatagaagactgtcccaatttgacatcagtactggaagggattgataaccttacctcccttaaatctatcttgataaaagactgtcccaatttgacactagtactagaagggattgataaccttccttcctttagggatatctctatagaacactgtcacaatttggcatcactacttgaagggattgataaccttccttcccttaggtctatctatataagagactcctctgatttgacattattactggaaaggattgagaaccttccttcccttaagtctatctatataagagactgtcccaatttgacatcattactggaagggatagataaccttccttcacttgagtttatctatataagagactgccccgttttgacatcaattcccgacaacttcagaaaagtgaagaattcttttattaagaattgtccaaagcttgaagagagataatgtaattgaagtttctatgtgagtttatatgtctttctctctctccctctctattgttagtgtttaattagattaatgtgtttatgaagcataatgcatgcattttaattttatttataagtttgttttttcatttgttgtttttgtgagtatcatgtgtacaagtagaacagtatatgaatattgatatggaaccctctccagctgtacatgttattatgtagaagagagttcaaactctgggatggttcctatgacagggcagggaatggggtcaacattaattcttcttgtctagactgatttacatagtggcatgtctcttaaaatgatatcatcatcttcgctttacttattatttattgaatataggatttcttatacatgtttgtttgtgtctaggaagacttttgcattgaagttattggcaaaaagtatagagtaaattattgttggagtatacagagaataaagatgcagaattgggcatccttggctgtcaaatatcaattgataaattcttacaggtacaaaaagagaatatctatctatgcatactgctttgttttgttgttgagtttaattattgactatgaatgattcatttcataggttttgattggacacaagagaaatggtggagagattggacagagacaatatgccatttggccaaagtgcagaaagatgatcagaccgaaatagatggagacataagtggagttagctgtgaaaaacaactagtactttcagagtctcattcttccatttcaacagattcagtcgatgagaagattggcgttgtcaagaatttcaggagaatggttggtgtcaatcaaagttagaaaactctatttttgcattcagtgaatggatcgtcatgcatatttctactagcaactgttgtttctattggacgacgaacatccaaatgaaaacttctattgactctaatatgatctactttttctcttatatctttaatctgttggcccatcttaaactcattcccagacatgactctacgctgaagaagtttgttatgaaacttgtccaccaagtcatcagcaacaaaaaaagcatctccaagctgtttgagccaagctttgacactttcatcaacagccatcttctcttctgcatcaagaagtacacctttgactacttcagtcgtgtcaacaagttttcgaaactcacctttcacaccataaagcaatccaatctcttcgaatgctgcagaaagcagcatctcaacaagacttccagcaacgtcaactaaaactccttcggccattttcactaaaaaaaaggtatgagaaaggaaggttaataggaatagaactcaaaagggtattaaatttttcttttcttctgtttataatggtgtggtgtgagatgaaaggaagttcatttttatctaatatttatagcaatgaataagtgctaacttcttctgacatcacggttgagagctccatattatctaactttattgacttagttaacaaacaagtttaataagagataatcataaaaaggtgactaatcatgtctaccaactctgttttatatacataatacaaacaaaatcatgttgtttttctggccggcctcaaatcttattaattaattgattaaaaatattatcattattttcaattgatttttttttttttaatttgtaccagctataaacagagaattttgaacaaagttcaagtcaaacttgagtttaatgtcttgctaactggtccaatcagttccaactcatcattatggattatcattagtatatttgctaatcctaatcaccataaccaacagaaggtgatgattcctccatcataagcttctcaatccggccgccatgaggagtcatcggctcagtcactttcatcttaaaaggcttgttctcatgcaagtgcaagaagatatatatatatatatataatatatatatttatattgtttaattagttgctcattaatagagttattacattgtagagcaatgaagaactcagtttctcagtttgttattagacttgttatagcctggaaagtgacataagatattgagaatgagaaaaatctgttttttgaatgaagtgttttgatactaactaacttgtacagtatgtgagagtcataagatattaaacaacagattctgatataaatatataacccatccaatccatggagattcatgcttcaacttatgtcatcacactgcaatgttgatccctacacaaactgaaaaaagaattaacagatatgaaaattacactaccaatgaatctaattaacaaaactgagagataaaaagagataactcacatgtataatggacaaacttcaatttcagtatctgtgttcaaccttaggacaaccctcaatatgaaaatactgcaattttctgcacttgtttggaattgatgtcaaattgggacagtgatgtcaaatcgctagaggtattgatcgtgatggactcgagcaatgaaatgtttggctgagtgttgtgtgcctcaacaccctctgaatgttccttcacctcatcattttcaacctatcttctaatgcctttgagctacattcgagttctactatttcaatagatcgaaacaagggcattgaagtgaggtaagagcagttgaatattattagattggaaaaactcaaccaccaaattgtacaaagagatataaagccaccaaaaatttaattaattatatctttttttaatttagctacaacatcaaatatttaccttaaaatcattatttaacatgtaagtaaataaactttattgttgcagaaaatatatggcaccagaatttgcattatggggttacttatctgataaacacaacatgacatacatcatagaaccttaatggctggcaaaataaaatctttaagatcttgatctcaaaaagaaaagaatgaccaaggtacgtagctcgatttttttgaaaaagagaaagaggccttcgtctaagactgaactctcgtcactcacggccctcaaaaatcctagaatttctttccaatcaaacagcccaaattaatgccataatcgctgttctccacagtttggttttgcgtttgctgccccttagtttactcaccgtggattcaaatatgcatgacgattcgttcactgaatgcaaaaacagagttttctcagtctgattgattctccaaccattcccctgaaattcttgacagctccaatcttctcatcaacagcatcttcaaattgaatgtgttgaaatgaaagaatgagactcttctttttcacagctaactccgcttatgtctccatctttttcggtctgatcatctttctgcaattcagccaaatggcattgtttctgcccaatgtctccaccatttctcttgtgtccaatcgaaacctatcaaatgagtcattcatattgaacaattaaactcaacaacaaaacaaaacaattaagcagtatgcatagatagatattagagttgtgttgtaaggagtcatttcttactttgtctgaatcataacatcgttgatcattggacaatcaatctcatattttcttcacagttcaatgcagccttcccagagtttggactcctctttgatcttgttccatcaaacataataactaatcaattcaattacatcactccctttctgccttgttcttgtttatcaccacaaatttgctccatcgcagacttgcaatcttcaaacaattccaaattaatgcatgaatgcttcataaacacattagtctaattaaaccataacagacagagacagaaagagataaacttacagagaaacttcatttacatattatctctgttcaagctttggacagccccacatagtagaattccccactctcctaaagctgtcgggaattgatgtcaaattggggcagtctgctatattgataaactcaagggaaggaaggttatcaatcccttccagtagtgatgtcaaattggggcagttatatattctgatagactcaagggaaggaaggttatcaatcccttccagtactgatgtcaaattgcggcagtgtcttatagagacagatctaagggaaggaaggttatcaatcccttccaccagtagtgatgtcaaatcggggcagtgttcaatatccatagaccttagcaatgaaatgtttgggtgagtgttgtgtgccttgcttcctctcatcattttaaacgtatcttttaatgccattgagctagttttatacagtctgacattttcaatagatggaaacaagggcattgaagtgaggtgagagcagtggtatattgatagattggaaagacgaggaaatgatctaatattattcccatccacttcctttttccaccaccaccacttgagattataacaatcttcaatttgaagagtcaccagggatggaaagaacaagttggcgtcaaaatcatcatcgtcggcagaggagcacatgtactctgctccaacccacttaatccttagttcctcgagataacgtaattgatctagttttgggagatattggcactggccacacaagtttaactccaatttaacaaggttatttaatgaagaatcccaacctcccaatctcacaccctcgaaatgcgacatatgcaacacttttaggttggaaggtggctgcaaacgttcaattgccatttcattattttccagtaaattccactgtaaagttaaggaatgaagattatgcttcccttcacaaatgactcgctttgaagttgtttttgatgcagagtagtttgtcgtgcgccagagtccttcaattgttaaacttccatttaagttgttaatgaggttgctcaattcatgaaccccactggacttagatgcaacaaatctatctaatgtgtgaagggaactcatatacccaaattcagggggcatctctctcaatctatcacatccatcaatcataagatgcctcaagttgactaatttcttcatgttctgaggtaatctaacaagcctattaca

SEQ ID NO: 17995 - DNA, 13320 bp, Cannabis sativa
  modified_base (29)..(35): a, c, t, g, unknown or other
  modified_base (1635)..(1642): a, c, t, g, unknown or other
taatctggattacattgaaatggagtttnnnnnnnggcataaaacccaacagtgttatgctcacgcgtctaactagaataaggccttagaacggtttatctcagttctaattactgagtctaaccaaattatacattgaatacataattttttacttcgatatatatagcatggcataggatttaaaatcatctagtcactagggtaataatcctaggccatataaccgctcactttagggtaataaccataatcccagttctcaattaatcataattataatatcaaacatgagcgccactgcgcttaactctacatgctaactactgtcttacatgatgtcccaaaaacgtggagattctaaatccctaggtgctcctaaccaagcaccggttatactagtcacaatttctgggattaacaaatagggttaatccctaaatccacttccacataattataaaatttgcattcacaatacaataaacatacagagcttagaacgagttttcaacgatattcggaacacccaaatctgagtccggatcgaaaagttatgcacgaaacaagattcggcacacaaactgcccagaaacctcaaggtgggccgcggcacaccccaagcgagtcgcgacacttgggttgaaaaacccagaatttctagggccgcggcgctcatagcagaggccgcgacacctgggttccaaaccctgaaaacccacttttcagcagcacgaaaccaagcccaacacacaccaacctcaaccaaataacatgtacaaactcaaatccaatattcatagattaaggccatcactaacaaaaaattaaaatcacaaaatcaagctccttacaacatcaatatatacaatttaagccaagctcttctagaattaccacaatcaacaaacttacactcataatcacaaagtttccactacactacttaacctcaaatattcatacacaagctcaatgattcacaacaaacttccagctctcaaaaatcaagattaaacttaaattcacacattctaaactcaatccgagctttccaataatcatagcattaactagagatcctaactaacaagaaaacttagctaaaacatcacaaattcaacccaattcacatacatgcattcaagaacacaaacaacatcaaagcatactttttaactccaaacttcagcaacaaaactcaagataaagaggtggaaaaacttcctcaagctcctcacaaatccaagcaccaaaatgtcaaaaaacccaagctaaggtaaattccttttttgttgaaaataaactcaaatagtcaaaagaccaaaatgcccctacgaccaatataccacatatgcataaattaggggtgttcataaaaaccaataaactaaaatcgaccatcaaaccgaccagaccgtaaccgaattttcggttccacgtcatcaccgaattttgcagttggtttcggtttcgtttttttttatatggcggtcagttttagtttttgaaataaaaaatagttaaactaaaaaactgtcaaaactgccaaaaaccgtaataaaccgccaaaaactgccaaaccaaaaactgccaaaaaccgtacagttggttttatacggttataatttctannnnnnnngttacgatttttgtaaaataaaaatcgtaataaaattgtaaaaaccgaccacaaccgaccgattttcacccctagcataaatcaagggaaaaattatcattccatcacacactaatctcaaataaatttcaaattattcaattactaataaaaagccaaaataaaattccaaaaatgtattttgggtcccgaacctggctcgacccaaaataccgagttttgattataccgcctcgacttgtcagaaaacacttgcaaaaggacaaaacaaatatactatataataatatagtccataagcacgctataacattaaaattacagttttaccctccccaagtcaaaattacaaaaatatccctaactcaccaacggggtcttaacatgtcatttattggtataattcataaatattaaattatataataatataattccacattaatacatatttaattagttagggtttgctaatctgattccttaatcttaaggtattacagatatggtgaagcaagtcaggtctttctttctttttggagttcttcctgctggtttgaatcatactcacattgtcctaattccaaaaaagaagaactcagtaactatgggcgatttgaggcctattgctctttataatgtcctttataaagtttgttctaaagtgttagctaaccattcgaaagagttctctctttggtcatttctaaaaaatcagagtgatttcattccatgtcatttgatttcagataatatcatgatttcttttgaggttatacactacttgaaaagaaagcaggttggtaaggaagggtacatgactccgaagctggatatgagtaaagcctatgatagagttgattgaaagtatcttcatgctattttacttgaaatggattttcatagtcgtttagtgaatttgattttccattgtatttcctcgattagttttatggtcactcatgagggacgtgaattgggtccttttgttcctggtcgtggtattagacaaggtgacccactctctccccatttatttcttatctgtgtggaaggtctttcctctcttgttaagaaatatgaatcttgggatgatcttcataggtgtcgagtgtgtaatggtgctccagttatttctcacatactttttgcggatgacaactatatttattgcaaagctacggaacgtgaagcaaggaatgttattcggttgttacaagtgtttgaggctacttctggtcagtgtattaatgcttctaaatcaaccattttgtttagtttgaacacctttctggcgactaaagattcaatttgtggaattttgggtatgatagaagctcctaaatagtctttatcttggtttgtcttgtacaatgggacacaacaaaaatattattcttggttttcttaaagataagatgcaaaaaagaattcaaagttgggaaggcaggtaaggaagttctattgaaaataatggcttaagttcttcctacgtttgctatgtcggttttcttgttaccatttgaaacatgtattaagttggaagggatgatgagtgaattctagtggggttcaagttctcaaagccgtggagtaagttggattagttggcaccgattgagagcacataaatatcatggaggcctcgactttcatgatttgtgagatttcaacttgtctatgttaggtaagcaggcttggcgtcttttaacgaatgactcttctcttgttgctcgtctttacaaagctcgttactaccctcggggttccttccttaatgcaactcttggaagtaattcatgctttatttggaaaagcatttttgaaactcgagatttgattaaagctggagcatgttggtcggttggctctggttcaaatatgaatgtcctaagggatctatggcttcctgatgcctctttttcctttattatctaatttttaattggtcttgataattgtttagtttcagatcttatggtggtagattcaagaacttgggtttcaaaaatcattgcatatttgttttatgagagagatcaagaactcatgttttgtggaaaattacttgattgaaaattcctcctaaagtcaatcaatttttatggtatgctcttagtggctgttttgcaactaaagtttaattagtgtctaaacatgtattaattgatatgacttgccctatgtgtcattaagaggctgaatcaatcttccacctgttggtaaattgtcactttacaaaattatgttggtcccgttcaagcgcggattatggtaacttaattggacaagatttttgtgactgatttgggaagattatgctacagcgctctgcttcatctggtctgaaaaaagaggcagcaatggtggcttgggcggtgtggaatgttcgaactcggtggtttggcgggagaagtcttcttctacaagtccttaatcaataattatatgcataatcaaagaaaaggggatctctgtttattcctttgggatcagaaagagatttggagcattcaacgaaaccagtttctaatacgattaaggtgaatgtcgatggggcaatttttacttcagctaggaagtgtggtattgggttggtggctcgtgatagttctggcatgttgattgaagctcattcgttgtgtcatgatgggtgggcaaagccagcctttgtggagacttagggatcaaagaagcgctgagttggattgatttgaaaggttgggaagttgtacaacttgaaactgattctttagtttcagtgcaagttttctttagttctttgaatttgccttccccttttggtgttgtggtccaacattgtacgctccttttagtttctctgaactttgtcaatttatcttttgttaagtgttctgtgaataaagttgtttattgtgttgctcgtaattcttgtttatacctaaattacagtttcagtatagatgatatccctgctgaatttttatttaatgtaatggttgattcttgttaataaaatttccattctttttcaaaaaagaaaaaaaaaaaggttccctattataaaaggcctagcttaaggttatttaattttttattatagaatgtaaaacgacgtcgtgtgttgggtacaattggatatatgtgcgtgtgggagactgactggtccaaattgagagttgaggcctgaggggttctattgagagaaatgagatgagaccacactgactacttcccttttcttcttcttcttcttcctcttcttcttatccgttagacaagataacggtggagaccagagtctggagactgataatttatcttcatcaccatcaccatcatcttcttattcttcctctttccatttctatgcataaacattaccattagaactttggtggtgggtttgctaaatagcattaagaagaagaagaagaagacgaagcatgtcttgtttattgccacagttcaattgcaaaccggatacatttaccgcccaaaagcatgccttcagaacccactctttccccgctactcccaattctcatctccctcgtaagtgtttttttttgtttgtttatttttcttcattattgtatgatatctttgtagtactcactttcatacctcaagagataagctttaattcaacccacataaatatatttatatttatctaattttgattttgattttggctaataatatccattcctttctgggtatttctctttttatcttagttacctcttacctgcaaatgcaatacgacttattctcatcattactggcatttaagactgtaaagattactccttttgcaattttcatcgtgttaactaattaatcttgccatggttgcattatgcagcaaaagctagagatccgggctcttcctggccacaatgtgttttatccactccctcttcctcaacctctactgttcttagcatggacaaactcaggttaccttccttggaagctaactctgaatccactgcaaatagaccctggacctatactgaggtaaaaattcttgttttctgtattgccatgtatttatgttcactaaattgctcttccatttctctttagtcttcacatttttattgcataggttaatgttgtaatgtttgagtaacttttgtttctgcagacaaactttcaggcaactttagccacagaaactcttcttaccagcgaggaggctgtaatagctgctgctgctgctgaagctgttactcttgcaaaagcagctgtgagggttgcaaaggatgctgctctgctagtgaaaacttctgaaaaacatcaaagtacttctgtagttactttagaagctagttattcggattttaagggtgttcataatatgaaaactacacaagctgctgtattaggagattctgtgggaagtgagattgctctgatgcaagatcagcccctgaaatgcgagtccgactttgagggaccaacatgtgaagaacttcaagcactgcaggaacaactctctagtagcaccgctgtaagatcaaatcgccaaactgaaaggaaggccagaagagacagagctgcagagaaggctgctgcaaatgttgtgtctgtgaaatctggctctaatagcaggaaaaaacgttcttctgtacaagatgtagatcattctgatccattgcgttacttgagatcaactaccagctcttctaggcttctgactggaactgaggagattgagctatcagaaggaatacaggtgtgactatttatcagtttttatctatttgagggtattggaatcataatcattttcttgttttcctttggttctccaaaaatatacttattaatgaaattattttgtgtagctttttttgtttttaaaaaagcaattattgtagtgcaaggggcttgatcttgtagttgtgtatgttttttgtgataaacatgaaatatgaggtaatctaaagcaccagaatgctaatggtaaatttgtgattctttgtgagctcacaaataatgtttttccagctattagctggcgaagcaagcatcactgttatcctacagggaagttttttgttccatatttttcaaaggataatagtatttggatgttgtgattcattatttttggccaattaaaatagtagccatcaggtatgtgttcacgatgcgagtaaaaacataattttgaccttcttctagaattgtttaacgagagaaaggtatttgtggtagtttgtagaccaattctttgatttcctttgagcactagaacgaagctttgggttggtagttagtaatgtacattttttaggaagcctttaagttattcattaaatcctactaggcttcttctgaattcttggaatatgtgagtaaattctggaaatattgttagtttttgtgaacttagtcctgttgttattagtgatggggaatacttctataatatttttgcaagttagaaaccttagaattgttgacctctttagaattagtttctaatgcgtgtattaattgtctctttaaaaaactaatctaggtgctcctgaaactggagaagctccaggaagagcttgctgaacgatgtggcagtcagccaacgtttgcacaatgggctgcagcagctggaattgatcaaaagaccttgagaaggcgcataaactatggcattttatgcaaagacaaaatgattaaaagtaacatacgtcttgtcatatcaattgcgaaaaattatcagggagctgggatgaatcttcaagatcttgttcaggtatgtaataatgtgaaagtaggggacaagtgaatttttaaattaaatgcttgtcactttttattacattttctcttaaatataaaatttactctttaatttgtaggaaggatgtagaggcctagtaaggggtgcagaaaagtttgatgcgtcgaagggttttaagttctccacttatgcacactggtggattaaacaggcagtccgcaagtctctttctgatcagtccagaactatccgcttaccagtcagttttctttccaatgctgtctaattttgtagggatgttatttattgcaatggtcatcttggccggtgttcttgatagcagttcttctattccaaactatgggattttcatttgtattagcatgaaggagaaagtttaatgctaaatccattgctattttgtttatatataaaagcacaaatgtttggttcttttattgattctttcatgttatttgatgcaacagttccacatggtggaggcgacttatagagttaaggaggcaagaaagcaactgtatagtgaacatggaagacaccctaatgatgaagaggttgcagaggcaactgggctgtcaatgaagcggcttgctgctgtgttattgactccaaaagctcctagatccttggagcaaaaaattgggatcaaccagaaccttaaaccttcggtggggcctcgtcttaattctaattaatttatagtgaagtttttggggttcagtattaatctctattgggttctgtattctgttgtccaggaaataatatcagatcctgatgcagaaacttcagaggatgtgctgaataggcagttcatgaaacaggacttggaaaaggtactggatagtctcaatcctagggaaaaacaggttataagatggagatttggaatggaggatggaaggatgaagacattgcaagaaattggtgagctgatgggagtgagtagggagagaataaggcaaattgaatcatgcgcatttcggaaactgaagaacaagaagaggaccaaacatttacagcagtatgtgcttccatagcacagacaagactacaatttgcttacataactggagtctcttcccttttgatgaagacatcgtcacaattttttttactccttcattttctggtgtagaaatttagattttacagtatcagagagcacttgtgcataaactatttatttccctccccccatctcctttgaaatcaggcattttctcatattattttttaatgtattttaatgtactagtaaagagcagacactgagaatgaaagttaaaattgcaatttatatttctaatgaaaactttattgaaaagaatggatatgagaaatgaggaatgtgtgcttgataaaccaagaccaagagggttctggcttctgtacaagtaaatgtttcatcctttttcttatggataatgatggcataactaaactacaagacataattagatagaaataacaacaatctagctcactcaaacttcctttcattaaaaaaaagatcagaagaagaaaaaactctctcaaagcaaattaatatgtaataagaagcatatgatttattcctttcatttatcttgatatatccagaaaaggagaagacaagagaaaagaagagaaaagagaaaagagcaaaaaggacagaagttgaaaagggagcacctttataaagtttaaatttttagtttttgcgtagagagagaagaagagataaagataaaagaggagaagagagaatgaaggccctcacaacatttcatcgtttgatttcaggtgtttggtttgtgggttttggggtttagacatttttgaggagagaagagaaaaaagaagaagaatgaaagtgaagggaggagggaagaaaaaggggagctgtgacacaaatttaggcggagattccgacactaacccaccacccaatggctccttgtcgtctcagctcgacccttctcttttccctctttctcttcaacaacaagatacccatctaaagctccacgatgcccagccccagccccacccagatgttcatgatgctgaaaacaacgaagaggacgacgatgaagacgaagatgacgctgataatgatgatgctaatgaaaacactgagcgtcccaagcttgacgacggcttctatgaaatagaagccattcgccgtaaaagggtccgcaaggttctttttctcttaccctttctcttcagtactttcgtgggtttgctttactttcttgattatccctaaaagtagtttcctttgttttgcaaaaccaaaaccaaaactatagggtcagcttcagtatctcatcaaatggtgcgtatgtcgacccttttacttaaactttgcatttcttgttcttttacatttatgtatcaattctaaactgttatcttaacgttctttgctttgtaaggcgtggttggccagagacagctaacacatgggagcctttggagaatctccagtcatgttctgatgttattgagttatttgaagagaggtattatctgttattttccagaataagctgcgcgctgttaaaactaaaagggtcaacattccttttatataaattattgttttttcttccattttaagcttgcaatccgggaagcataggaagcgaaagcgtaagcatgggactcctcattctcaacctaagaagagacaacaacgtccaacaggtgctcactttaacggcacagcgttggaaaccactgatatgatggagaaatcgactgcagcccttgataatttgagccttgctgagatttctgctctcccacaagaagaatatcttggggatgtcattgtcaacaatggtgagacattcaagaagttcaatgttgaaaatggtgtcacgaatgcttaccctaaaaaatgtgggaggaaagatgaaaatgagtatgatccaaaacttagtgagcttaaaacaacctctactagcaatgcagataaactgggcgtacagcatcaagaaccaaagtcttctgaaggcaatggccccacagaaggaattccccaggtgcactgtgctgaaacagttcagaacaatcgcagtatgggagctaagagaaggaagtctggttctgtgaagaggtttaaacaagagttgcctttatgtgatgctcctgttatccaaaatataacaattggaaccagcattctccccggcagcagaattgaactactagggacaggaagtctcactgctgctggggaaaatccaagtgacaataatagggctgatgaatacgaaaattcattgtgtatcaccaagattatcaaaccaataggctattcagcttctgtgacaaacaatattcaggatgtgtcagtgacctttatggccatgaggtatgtcattgaattactttaaattatttctattaactttttacatataactgtaaaatgattgggtttgagaataatttgtataccttgcatcattacgtattatgcattctttattggatatcattgcgcctcccataaaatatgagtgaagccttgttggaactcccttgcttgctaccttaacacacttactattgtcacattatctcatccctctgaactctgtctaattttctaaaccctttaatgattggtcttgaagaatttgaagttattaacaagggtcgtgttatctaaatgaaatatacctcttgtttaaaatcctaagactatgtttggaagtttgatatgaaaattttcgttgaattgagtgtttttctatacaattttctttctatcccaaatatgataattttttattttttattttccactttttttttacctacattttccttacctttttctttccttgccgaaatccaacttccaaacatagccttaatgaaatgtacctctcgttaatatgcgaaacagtgaatttaactttccttgggttgggatttattatgctatgtctaatagagtgctaaaaattattatgaactaattttttgcactagtgtcacttaaaaaagaaagggaccaatgatcattttgggtcaccatggtatgtgatgcagtattagcacattttgctgcttgtattatactttatatgcgtatacatgttttccttaacaatgttaccttttttacaggtcggatggaagagaggtgatggtggataacaagttcctcaaggccaataacccacatctggtaattaatgttatctattgttttgtgttgtcaatatggttatcatcactacctggctgtttttactgttattatcaattctcattttctcttattcatctccagttgatcaacttttacgagcagcatctccgatacactgccacattgtgacttcatcagctattgtggtcttcaacttgtttgctgttagctttatacagttctttccttcctagtattgtagttgcaggagtactgcagttcaacaaatgtagttatcagtgtaaaaactaagtaatatatgatgagactagggttcataccaccagtgtcaatctgcccattatctcattttggtttctcctcatatgatatgaccagagatattattgctatgtattttggatcttaacatgagaatgaaaatgatttaaaaaatcatacttcactgtttcagaaattcactgtactctctaccatagttcttgtaaagttgtgaaggttcctctttcaaacttctttgtcttaatagtatgacgtgtgggaattccatcatttgtggagtcaacatatattattgtgattttctttcattttggcttctcctcatatatattattgcgagaatttgacttttcatgcatatatggtttcaattcaacccccaatgatttggttctataattttctttcttgttcatcttctttggtatccaaagtcttaaaaacttatctggtcagcatttctttttaatatgatattagtcacttatgttaaaaagtctcgactaaacaatttatttaccttacacaattaaatatatttgaactggtctcgtttttctcaggtgtgttataatgaaatcttacacttgtcaaaagagtataatattaattagtacgtagtaggaaactcttgttttttatggttggcggccagtttataactgacaaatgaaatgtattagtgactagagtcgttggcgtagctcaactaatcatatgagatctctataactataactgtttttgttattagagtcatatcagctcaaaattccaatgggagaaagagggccatcaccattgataccattgctattggtgggagtgttggcaatggttatttttggaccattcttactttgtctttgggagactgtaataatgcctctattagaactgggatcaatccttgccatacttatacttcttttagttttacttgtacacttgaattcaacattgttccccaaacttggagctggaattgggatgtctatgtcatcattctcctctgtctctgcttccacgccttcggacgacgatggctttgggcttgggatgggaagctttcttttactactgctatttttgcttctttataggctgttctgaagccaatgctccctcccttggtgattgttataattgatagttgatatataaataagagactttttaataagtggtaagaaactttggttgtgttgtcttacggataagttgaaatcttaaaaatacaactttgtacatacattgtagacgtagtcattagaatctctcacaatttctttttaaaaatagatagatagagatgtataacggcatatgaatgtaacacacagacaaaataaagcaaagacttgattaataaacaacaactatcaactatgaattctcaaaatgttatacaaacaaaggaagaaaagtgaaagaaattaaaaataaaaattagttctt

SEQ ID NO: 17996 - DNA, 7698 bp, Cannabis sativa
tttgccttattgtcatcactcatcatcaccatcaaataataataataataataataatgcactgtgtgtacatacaatattaataaatactaataataatataatataatataataagattgatcactcttatttagtttttatgtattgttagagatattttcacttattgtacggttattgcaatgtttagtggtattatatcaccgctgttttctaagcatacttataattaatgatattatcttgcagttctcaagtttatcttgctggtgggtcagatatgataatacggctcaaaatttacacgagaattggtgaatttgaattttccttaaatgggttcgaatcgtattagaattgattcgtctaacccatttaataaactgatcgtattcaggttgatgcagttaacacttaatctattaataacttatttaaagttattttagttctttaatatgttataaatgggtcataaacatattgaatatgtcataaacgtgcaattagttgacatatttaaataaaatatacttataaataagttacaggttatcttgtgtcaacccgtttataaataagtcgtgttcaaattctatgacacaattattaaacattcgaattgagcatatacttattgtatacgagtcccaacacaacactttccaacacaacacttaactaacaactctttactcaagtcgttttaacaaggtcgttttctgttttctaaaatatataaacatatatatatatataaatactaataactataataagacaataactaactaacttaacggtcatcaacattcataactaaaaagatgaatgaatacgtattggaaaaactgggaaagtgcagtaacctcaaccatcttaaacaacttcaagcctttctcactctcaatccccattcccattcccaatcccaattctattccttcaagcttatccgctttgcagtcatctctctcgccgatctctcctacgctcgttccattttcgacactctccactctccaaacgtctacatttactctgccatcatcactgcttacgcttctcactcacattcccattccgcttttgatttgttccgccttatgctcagaaggggagaccctgcggctgcccccaatcattttatatatccccaactcttgaagtctttgccccaagcagcacctctgctccacacccacattctcaaatccggttttgggaccaacccaattgtgcagactgctcttatcgactcttactcgaggagattcgatgtcgatgttagggatgcaagacaggtgtttgatgaaatgcctgacagaaatagaaatgtcgtttcttggacggctatgatttcgggctacactagagttggagatattgacaatgcgatacttctctttgaggaaatgcctgttcgtattcgagacgtgccttcatggaatgctttgattgcggggtgcacacagaatggtttctttcagcaggccatttctttgttcaaaaaaatgatctttatcttgggagatgatcatcatcatcacctttgtcttattggactgaagcccaaccatgttaccgttgcttctgttctttcagcttgtggacatagtggcatgctcaggcttggaaaatggattcattgttatgtttatagaaatgggctcttaccggattcgattctctccaatgcgctagttgatatgtacgggaaatgtggcaacttgagagaggcaaggatgatttttgacatgacctcgccaaaatgcttgacttcttggaattccatgatcaattgctatgctctacatggtgaaagcaagagttcaattagtgtgtttgaggagatgatacgatttaaagatcgtgatgtgtcaattacacctaatgagattactttcattggcttatttaatgcttgtactcatggaggattggttgaagaaggcattgcttatttcgatatgatgactaacgtttatgagatcaagcctaaaattgaacactacggctgtttgatagaccttcttggtagagctgggcgattcgacgaagccatggaggttgtaaggggaatggagatggaagctgatgaagttatgtggggttctttgctgaatggatgcagaatttatggccgtacagatctagcacaaatcgcagtgcaaaagctcatagagattgctccacacaatggcggttatgtgagtatgctggccaacatatatggagaattggggaagtgggatgaggttagaaaggttaggaggatgttgaaggttcgaaatgcctataaaactcccgggtgcagttggattgaagtcgatgaacaggtttttcagttctactcttctgatacagctcatcctagaatagaagaagtttacagcatcttggaaagtctaactggatttttaagtttaaaatcaagttagaatagctatatctactttctcataacaacaaagtatgttatttgtagtttattttatagagaaagaaagctaagaaaatctctactctatacatccattcatttactattactgtcaaaaatttatttcttttctgatgttgaaatatgtttaataaatacacaatgaaagtagatttttaacagtacttaatttattttattgattcatgaaagtagaagtagtactagtgaagttaaagttaaagcttggactaagtaatgttcatcatccccattctcagtttcaaaaagttaagaaacattttgcggagtaacataacttaacatatacgtactggccatcataaactatctatgtatgtaaccaccaagcacttctaagcttcaatctacataccctttacagagctggccccaatttttattctctttttatttttgctcaaaacgacaacaaaaggaacgattgctcattgtgttgtatagttttatgtctctttctcagtttattaaaatctgggttttgaaagacaggtatgcagtggatagcattttttctcatagtataataggcagagccagaccatcttaattgtcttgcattaatgtctcatgcactcaccaatcttattgtaagatttttattatatacagacatattttatatgaagcttagattacatgatcagcagatgagtcttcgttggatacatgattagaactcttcccctacatttttctccccacacttgtagcgacaaccatggcgccgaggcttttctggatcatctgagtcgcttggttccatgaagagacctctgaggcatcgtcgtctgacattgggttcatgagtaagcttctcagaaggggttattgtaacttcagccttgcgggtttgcatggagcttgatttacccatcgacctgacttcctcagcaatgttttgagagtaagttagttgaacacctggatttctttcttcgattgaagcattgaagacaatggagttgttgacactctgtacattgttgttaacataagcttttggtgaaggagcttctcttttcatttggtctgtgtgcctctctcctcttgagcttgcttctccatcagtggcagtttcagtttcagggctgtcatcagggttagatttatagccccgatgaatgtgaactgatgcttcctttttagctggttcagagctcatgtgcattgttgctcctctattatcaccagttaaggtaatgacagtgactggcttttcatcaacttgggatccacttgtgagcttttgaacaagcttagacatgccttctctaatctccttctgtagaggaacttcttcttcctctgtggtcgaaacaggctttcgaaactctgttggatgtgatgacttgccagcttttgtatggtttgcaataaaactagtggttgttgtagtctcctttctatcagaagtttcttgcttttgttgcctttttggtgcttcagatggaacattgtgtacgtccttggtggtgtccttttcagaaattggtgctgaaacatgcccattgattgttttctggactggctcttcatgaactgccttgtctgactttccttctctgggatgttcagcaattttctttagttgttcaggtttctctaattcaggtaggggattcaaatttgacttctggggtggggcagcagctacctcgacaacttccttagaaagtactgaccttgttgttgccataggcattggaacttctttctgctccctttggactggaacatcttgaggggtctttacctttttagtttctgatgtaattttctctctctctggttcttgctcataagctgacaattgagcttgagttttgccttgcgatttctcaagagaagatggagattgagacacagagccaacctttggtttttgctgagtagctttcccagttggagaagaaacttccaaattagctatccgggcatgctgagatgttggggattgagattgaggtgactttcccgattctggttgaaactgagaagctgcacgagattggtaaggagaagcagcatttgcctttgatttggtgtctcgttgtggaggtgacgttgtgctactttgagtccttacttgaggtggtgactcgggcttggaactaagttgagatttagctactacatgggatggtgaagaagttgattgggaagcaactttcgaatcctcaactgattgaggtttgatagattgggaaatggcttttggggactcagctgtagttgtactagctgacaacaattggcttttaccatttgtggtaggttgtgttactttagaagacttggtagctgcacttgatggtgatggtggtttggaagttgattgggaagttgtttttgtggactcattggaacgatatggtgtttggcttttgtctgttgttgatgatggtgtttcttttcggggttcgttggccacaggagatggtgttccctttggagacttagtggctgcaggagatgacggtgatggtggtttggaagttgattgggaagtggtttttgtggactcattgactaggcgagatgatttttcttttggagactcgttgggacgatatggtgtttggattttgtctgttgttgatgatggtgtttcttttcgggattcattggccacaggagatggtgtttcctttggagacttagtggctgcaggtgcaggagatgatgtttgagctttagctgttgttgggacagatggtgtttgttttggtgactcagtttgtgtttgagatttgtttgttgaggcagaagatgtttcttttggagattcatcaatgatagcgcgagatggtgtttcttttgaggactcggtgactacacgagatggtgatggagatgatgattgaggttcagctttgggaggtggttgaggctgggaagcagcaggctgagcgggcaccctgccagcaggtctaaacgctggtcgagaagcaggttcagatgttgttggtgctctcgaaacagcatctaacgtgggacgcaagcgttgtgtttgttgctctgtagagcgttgaggggctaaccaaggtagtctaaagcggaatggttgtcttcggtctcccattatagattagatagatgatttgtgatgctattgattagttgttatggaaagtggttgatttttctttgtatcattttgtattttgattcggaatgtgtatatatattatatgcatgcatgcacgcatgcatgcatgaataaaaagaagagtagatactttagaaacatgaatacataagactttagactctaatacctttctttgttttgtctttcaagggataggaatatattctgacagaatttacttcatttaccagattagcatctcatctctcatctcatttcgtgtgtaaaattatatatattattataaaaataaacacataaatgcatacaaaaatggtagcccttggattggattggatttgtcttttcccaaccccaattggaaaagacaaaaaccatgccaaacacagcacagcccacccactatattataatgtcctaccatgaccatgtgaatgtgatttgatcattcattatcattacccaaaccaaaactctttcttttgtcacacttttatattaattaattcctttgcttttgctcatctgtcattcttaggtatatggattgtggagatattctatattatgtctatgaatgaattaagtttctagtttattcattcatggtaagtaaaaattgaagaggaacataatattaagttgggtttattacaggtgaaaatgtaagtgggcaacttgagataataaggagccttggtcttcaagcaataataataatataatgaaaaagttagtgttaaaatactaattgttgtcccaacaaacatattattattatttattcttttaataataaacaaacttttattataaaatatatacgattgagtacatcataaaatataaataaatttttttttatttaaattaactcattatccaacttaaatgtatatacatctaattcatgcataattatattggccgaataatttacataaataaaaaaaaagtcttaagaaaattagacaataaattaaaaaaaaaattgtctaaaagggagcctaaataaattcagaaagaaaatttcttgaaaaaggtaaagatgtaatctaaataatcaaactaaaagaactatgaaagtgtaaaatccctttcgaaccacccacaccagcaccagcatcagtcacatctgacctttctgtaagcactcaaacatttgactttctataaaatgagaatcccaagtgaatagaacagagtccccaccctccattgattcaaactatttatattttccatattattatgatcattctattgtataatacaagaaatcaaatttcatcacagcaaaggcttttatgagcacagatcatcatacatcatagaagaagaacacgtagtatgtacaataaactaagcaatttgaagtgtactaaattgcattgcatgcatttaaattaagattaatgttgtacacaaacataaatacatgttgcatacactagaagtgcctttatgaaagaaaaaaaaaactatttttaaattgagaggaggccatcaccatcatcagacatcagccatttattcataagaaccccagtttgcaaactggtaaaatggacttgttataactttttccaagtataaacactttaacatacagttgctactacttttactgcaccattccgtctctgatcaattcttccaaccctttgcgaagtctctcggccgccactctgcagtcatcttccactaagcctccaaaagatatccttaagctaccggagcatccacatgcacttccaggaatggccaccacaccgtggcggtgagcaagccagcgaaccacatcgaagtcgttgacataagcttctggaagctttgcccacaagtatattgcaccttcacctcctttgacagcatcttgtcctaggggagaaagggcttccgttaatatttctctgttcttgacaagggatttcactcgttcggttacccattcaggtcccatttcgagtgagtagagagcaaggtactgtgaaaatatagaagcacaaatgggaatgttgtcttgaacttttaggagctgagctgtaaagccttctacatctgttgggtatgctatctgtgtgtacaaaagtaa

SEQ ID NO: 17997 - DNA, 3964 bp, Cannabis sativa
ttagggagtatcgctagccaatcgtaacatgacatgtcgagaaggtgttagacaccacaagtgcctaatagcaatgctctttaacaaaatagtattgacaaaaataaatagagattaatatttaatatttcattcctaaaaaaaaatgtataatatatgagtatatcacatcaaaaacataaagcatttatggtacaaatttttgtggattaaattatgtaaaatttccttttcgaaaaaaaaaaaaattatgtaaaatttttggtggagtgtagcatctaactatttatgagatattcacataataaaaaaaaactatttatgagatattttacgtggttttagaaaatctgaaaatcttttctaagcaatatcgtcacgagccgtctactaaaggtttggggagttagggtcccaccttttttcttccagaaacgacaagcatcagcatggatggacaaccactgatgatgggtgaaaccgtcgtcgttttgccacagtggtgagtgagtacaagtgtctccataatacgacacagcagagattcgtggaaagcacgcttttctatgcctcgcacactcaatctgaccgttcaattttgccacgtgtattttacctctcccagttcaatttgcaaattgcaaccacaactcacctatacttcctttccttcctgttcctcgtatgtatataaaacctccataaccccttccatgccgctccactcaaaccgatttcacctctgttttcaagtttgaaacaactattattactatttctcaatatttatttatatattcatagaaatttcttaagttatttctgaaaatacagatttacgatttgaaaaaagggataataaaaatggcaaataatctaaccttgactggtttgttgaagaaggccgccgtagaatttcccgatcgacgagctatttcattatccggtaaataccatttgactcatgctcgattacaagagattgttgatcacgcggcttctctcttactcgcttccggcatcggccatggcgacgtggttgctctcacttttcctaacaccgtcgaggtatatattatgtaaaaattgaaactttcattttttattttttctttcttctttttcgacgttttctaggcggccaaacagggttgagtaacgtacgatttccgtttgtttggcagtatattgtgatgttcttagctgtgattagatgccgagccgtagcggcgccgttgaacgcggcttacacagctgaggagttcgagttctacctctctgactcagaatcaaaactactcattacggggcctgaaggaattgaggcggctcatgccgcggcttcgaaactcaacattattcgcgtgactgccaccctacccggaagcggcgacggccttatagccctctcttcttctgccaaaaacgagtcaagcctcgactcggtggcggaaatcacaaacgatccgtctgacgtggcactcttcctccacacctctggcacgacgagtcgcccgaagggagttcccctaacgcaactcaacttggcttcgtctgttcaaaacataaaatcggtgtacaaactcactgagtccgactcgaccgtagtggttctccctttattccacgtacacggaatgatcgccggattgctgagctcgctcatcgccggagcctccgtgactctgcctgccgccgggagattctccgcctcgacgttttggtcggacatgatcgcttgcaacgccacgtggtacacagcggtccctacgattcaccagattattctcgaacgccacctcaacaagcctgagccaacttacccgaagttgcggttcattcggagctgcagcgcttcgttagcaccgtccataatggctcggcttgaggagtcatttggcgcgccggttttggaggcgtatgcaatgacggaagccgctcatttaatggcttcaaacccattgccggaagatgggggccacaaaccaggctcagttggtaagcccgtgggccaagagatggcgattttggaccaaaatgggtcggcccaattagctggggtcagtggcgaggtctgtattagagggcccaatgtaaccaagggttacaagaacaaccctgaagctaacaaggcagcttttcaattcgggtggtttcataccggtgatgtcggttatttcgatgaagatggttatttgcacctggttggccggattaaggagcttatcaaccgtggaggtatatattttttttgtctaataattcgagttttaattatatttatttaaattatgcaagtaaacaactcaacatagctttctgtagaataaagtttaaaatatgaggtaccccttttgacattttgagtgtggtttgttttctttgttatgacttttacaataagagctttatgagcttttgcgtgtgatacaatgtcataacctatcaatcactaaaaagaagtttaatatttctttattttgaaagaaaatgcattaaatagtgtttcatttggtttggtttgtttggttacaggggaaaagatatcaccaattgaagtagatgcagtgcttttgtcgcatccggacatagctcaggcagtggcttttggagtacctgatgataaatatggtgaagaggttggtccattaatctcaaccccataactatatatcataagaaaactcccaattaaatttcacaccataaatttattacttatatataagtttcaatttttgtcagatcaattgcgctgtaattccaagggaaggatcagaggtagacgaagatgtggttttacgtttttgcaagaaaaaccttgcaacttttaaggtcccgaagaaagtcttcataactgattccctacccaagactgctaccggaaagattcaacggcgaatcgtggccgaacacttccttgctcaaatctcaaccgctaaagttcccaagtttggtgcttagttctatgaatgcaaatgcattatttgtgacagtccactcagacattttttaacaaagttcccttctgcttcttttaagagtgcatgtgtattaaaatattttcattattttttatgttttcatgtctcaatatacttagtatgtgtaccttaacaataaccaaagatttgggtaagtacacattttaagaattgagaggaaagtgtagaaaagattggaaaaaaaaaaaaaaaaaatcaaagctgtagtatgtagagtggattattttatttgtgaaataagacaaatttttagatacaaagtttatcttgtcatttaatacgtgtttggtcatcaaattgatctcatatttaagaatattatcatgcacatattatttattttaatattggattaataaaacagatttcaaattatacatgaccagatcacccacttgctttaagtcctctatttcttttaggaatggtcttgatcttctgcatcaataataatggactcttaactatctatgtacgtatacagaattatgtaagttatgagtaatgagtcactgccagaccggtatttcatttcaatcagtaactacctggccagaagggaccttcgtaattccaattaatacagtccaaataaaatgacacatcttaaagaggtaattcttcaaaataattgtatttgtacataaagattttgtccttttccaatagtgttcgagcttttatttataggaaatagaaagcaatgtagatatctttttaactttataagaaagaaaacaaaagtgacacgtattttatatacaaagagaggatagtattcattagtaaagtagcaagaagagtttgatgagatattgattttgtgagcaacaagagagtcatgattatatatatatagtagaacctcaatacacttgagaccaaataaattatattctaattgaaaggttataactaaataaagttacactaaaaaaaaataattattaatactatat

SEQ ID NO: 17998 - DNA, 2481 bp, Cannabis sativa
  modified_base (2451)..(2452): a, c, t, g, unknown or other
cgatgaccaacaccatacagtctatatcatactgcactgcactacaaagtacaaactgtaatctaaactatactgtaacatcattctgcttagagggtccattaaataaaaacacaaagacaaacaattttaataagtatatgaacacaacacaagaagtccatacagaaaactcaagtatgttgttaagtttcagtgggaaatactagtaaaaatactaacctgacagaaggaacaaaattttcaagttttcatgttcatataaatcctacatatgtatggctataaacaattagaattctaccgatttgaactaaatcagagagtaaaaccaatgaaatatggatataagttaagattttccagtctttgaaatcgacatacctttttagctgacgataagtgagactgtaactgacgaacatattcttgagcttcaggggacatatcaccaacatcttgaatttcaagattctcagatggttctacaaaggtttcttcagatttggacatgggttcatcttttcctgctaatttgattatattagcactatcaagcaacattccttgtaagtcaaacctacatattttaagcttctggttttcaaggatttcttcataatcatccatatttctttccagacaaagtctatattctgcatttcgtaaagtatacctacaatggaagagaaaaagaaaaaaaccacattcaataagaagttaaaaacgttaattgaattgagacaaagagaattgagcatacccagtcatcatagaagaaaccaaaagcttggaaagaggttcccacaaagactcaataagaacttgaaattgatcagatggaagtaaacccaacatgcccgaaatggttcttttcatagcatcaacagtagctggtggaacatctttctgaataagactcacatccaatggttcaatctcatgaatcaaattagagagaatcgatttctgaaaaaagaattaggaacaatcaaatccaatacaacacgaaaaatgattttaaaaagtaaaggattaggaagaagaaccttggaggattgaattcgaggagagcgggcattggagctgaggtcatggtgatgagaagcgagaaggagagagcgtgattttgtggaagtaagagtgggagtcagataatggcggagagggaaggttagagaaggaggaggaagaagagagagagaagaggaagagaggaaaggagtaagagttgccatggccatggatggaagaaccaatgaccactctcctcctcagtcctcacaactctccattctccaatccaattctctttgttttttcttaatttaactctaatctaaccacaaccaccaattgccaaacaaaaatataataatattattattaatgatgaaaaactaaacatcaaacgatgtcgtttttgtcttgataatatgaatgaagaagtgcttagtggtgggcaacatcccatctcatctaattgaatcgaaccgatcaaatctaattcaattacaaaaaattggatatctaattataattagattggattggattggatgctaaaagttagattctaattagatttgatcgatgtcaatctcaaaatccaattaaaaactgatccatttcaattacatttacatatgttaaaaaattatttatatttatttatataattaaaaatataatatatattaactatatttttattagggtttcttttgtgttgaatttgtaacacttgattgttttgtgtatttatttttatgatattctgttttattttattacttagaaatgttgttgttttaattatttgaaacttttaggtgcattacattgtaacaattatatgattatggagtataaaacttatataaatggtgatatttaatttttacgtatttttcttcatatttttatgttaatattaaaatttaggtatgtaattagatattcaattaaaaaaccgatcaaatccaattagtaattagattggatttgactggattttgaggtctaatttgattggattgaatgataaattttcaaatccaattactaattgaattggatcggatgagaagaaaaaagttagattggatcggaagcccacccctattgggcacccgtggtaattagcacctctaaacatgtcgccttgcgattcactagatgtactctctaaaaattattatattaaattatataggactcaatacttagttgacccaatagcgatattggcacataagagggtgctaagcaccaatggtgccttttagcatttctctatgaataattagtattttaggccctgaattttttacatatatgattggttaataatacattttgtaagtagttctgtgatccgtaagaggaaatatcaggtaagctgtgcaatctcacatcgcctggggaaggttaagtgggatgattctgagnntgtgtaggtatgggactacacagtcgaag

SEQ ID NO: 17999 - DNA, 15524 bp, Cannabis sativa
  modified_base (8553)..(8554): a, c, t, g, unknown or other
  modified_base (8659)..(8666): a, c, t, g, unknown or other
  modified_base (10659)..(10660): a, c, t, g, unknown or other
  modified_base (13698)..(13700): a, c, t, g, unknown or other
tgttataggcaagtatttataccatgaaccctcaaagtccatggcacagactcacaatatgttttctaatatttgactagttctctatgattacctatcagtctgaagatgaaaaactgcactgaacttcaatttgtactcataattccctaatgacatatcaaaattttcaatgtaaactttggatctttatctaaaacaatggatttaggagctccatggagacaaactatctccctcgcatacagctcagcatacaggtccattgtataaatggtctttaccagcagaagtgagataactttgtgaaatggtccactacgacctaaacttaatcatacattcctgtggttctaggcaaaccaacaacgaaatccattgcaataaccccccacttccatttaggaaaggataatatttacagtaaccctgtcgacctctggtgtttcgctttgaattgctaacatgttaacatttagtcacataatccactacatctttctcacttctataccaccaatactaaggtttgtaaaatcctgatacctcttggtggttcctgggtgtaacgaataaggtattgtatgagcttcatcaaggatttcctttttaacctcacaatcatctggtacacaaactcgaattttttaaagtaacattctgttattcaaggttgaaaagtccctaggccatccggcaagtacctcattccaaactttatctaactcaagattttgtaactgtgcccttctgtaacatccgaacataactgattaaagtgtcaggttatgtaacttcccaaccataatttaatttcaaatttaaaaatttcggaagttacggtgtcaaagacctgcccaggatcatttctactcaaagcaaccaccataacattggcgttcccaagatgatacagaatttcgcgatctatgtaaatctttaactaattccagccaccatctcttcctcatatttaaattttcctgagttaagaaatacttgaggctcttgtgacctgtctaaatcttacatttttcacttaaaggtagtgtcaccatattttaaagcataaattatagcggaaagctctaaatcatacgctgggtaacgctgtttgcattccttcaattgacagaaagcataagctataacgctatcagcttacatcaggatgcaccccagacctggtctggatgcttcacaataaacaacaaaattttctcgatctgatggccaagcaaacaccgatgttgttatcaattattgtttcaactcctacaaactttcttaacacttatcaaaccatgcgaacagttgattcttttttattagctcaattaatggcataaagatcttagaaaatccttcaaaaagatgccaacaatatcctgttaaattgagataattttgcacttttgccactatcttggcctcgaccaacttttctctgactcgatcttccccgggtcaaccatgattccatcctttctgacaacgtgtccttgagaaaacacctccaattacaagagttcacactcttttaattttgcatacagcttttgatccttgagttgttgtaataccattcagagatgttgctcttactcctaatctatctgagagtacacggggatgtcatcgataaccattataacacagttatcgagaaaatccttgaatactctatttatgagatccgtagaggccgctaaagcatttatcaatctgaatgacattaccaaaaactcataatgactatacttggtctaaaataaaattttgggattatcttcttctcgaattctaagctgatggtaattaggtcgcaagttaatcttagaaaatacaaacttttcatgaagctaattgaacaaaccatctactctgggcaacaaatacatattcctgatcgctaacttgtttagttctctatttttagtatatatttgaagggaaccatctttctttttcaccacaaaaccggtgctctccaagacggtacactaggtcgagcgaaccattaattaagcatcccctgaggttgtattttaacgccttgagttttgctgaaaccatcctgtatagcgcttctgaaacaagtcccacacaaggtaccaaatcagttatagaatctatttctcgttgtggcggtattacaggtaacttctcaggaaatatgtcgagaaattattttacaactttgactacttcaagcccaaatgttttgggtctgttggagtcaatcacaactgctaaaaatcctgcacatccattgtatagtaaatctttagcccttaaaattgaaatcgttgtgattcaaaacccctaaacagattcaacatagacaaatggatcttcaccctctggctaaaatgttaccattatccgcttacaattaatgttgaacaaatacttgagacggaaatccatcccaagtataacattgaactccactaatttcagctctactaggtcagtactcaactcaccatttactactctagccggcatagacctaatctgatttttggagataaccaactccccactagataacagggttccaaacccttttccaataaagtaataaggcctacccaaataactaatcacctttgatgcaacatatgagtgtgtagccccagagtcaaataacaccgtaaaataggagttattaaagagaaactgacctgacatcacagaaggactggctgcagcatcaacttaagtaatagcatacaccggagcaggtacgaattttgcttcctgctcctactcttctttctctgcctgagggcaatctttcttaaaatgcccaatcatgccacactagaagcatgctttccgattgcactctctgggatggtgtgtcatgcaacatgggcactcagggtaagaatacccctggcatccacctctgccttgattcccaaggagccgcttgttttgtcttaaacccaccactgtcaacgtaggtttcctcttctgctcaaccacagagcccctaccacccccaccataaatggaagtaaggggagcagtaactcgaccttctatcataacctccttaggctttaaaacaaatactttagggctcctagtccaaaaggtgtccttcacctctgaatctccttgaaaggctggagattcttgcatccaatttccccctggtaatagtttcacttggttactagccatactctgctccactggtaatactggattaaaaacttttagtatataaggtaaaggtaccataggagatctttgttgtttgaacctctgaatttcctcttcatcctgtttaattatagcttccatatctacaaacctttgctccaaatctagcagagtctgtggcggataatcataactcccaccaatagccctccaatggctttcacctcagttatgggaacagcttagattccattctctccaactgttactagccctgaccacattgttctgactctccacatttcaccaggtgtcaattttataggacaaacctgtcgattcgtaagtcagtctggtcaggcaacgacccaatttgcaatcttactaaacaagtaaaggcttacagaaccatgagccaagcttttctctgattatgattatacatgtctttattacgatcttcggtggacaaacctgtcagctttgataccaaaattgtaacgccctgatacttagttgcacaacagtgattttctaattacagtgccacctttacaaatcaaaggggttttcttgaaaatcgtgagaaattaaaacttttgatttaattgctgaatgttataaaatttcatacatttatttgcaaaagccaggatcccatatttaaacttttataatattattaaaatatatttataattggtcgcgcagcgactacaaaataaaacccagatgtctcgagactgaactctctagctcgcgtcgccttgacatgtacaatcttcatcgaagactagagctcactcctattcagcctttgccttacctttacctacacatgaaagtaacatccgtgagtcaacacactgagtaagaaaagcatatatcaaatcatataatcacgacttgtgtttaggcacccatacacccatccacaaggcttaccagatgacttaagattgttcttaacaattggtactactgaccatgatatcacccactaccagcactatgatcacattgcgagaccgacactatgttcgcaccgcaatgatagcatcaataatacctaaaagtataatttgccatgatatcattttaactagtacgatacctatactgctgaaccgacacaatggttgtcccgctatgatagcgccaattaatactttgtggggtgagtaccactcttaacctgtacgatgactgtactgctgaactaacacaatggttgtgctgctatgatatcacccaaatcatatacaatcacaacaaaacatgtatatataacatacatacatacattagcatatacaaaacgttctatactattcttaactaatttccgaattcaaatgagttggccgaccagaacagaaaccttagtactggatggatgccctatgccacatttacataaccgggtaaataacacgccaaaaccctaatccgggaaactcaaactccaacaaagggttctgccattactaactaataccccaataccctaagtatcaaggaaataactaaggcacgagaaataacacgaatcaagaacacaaaaaattttggaaacccgtttctgatccagttaaacagatttacagggccgatacaaccggttaaccgatttgcaccaggtaacccaaacaagttcaaattcatgcccaacacgtatccaaactttaccaatctttctagaacacctataaaaacctcaaacaatatattccaagaaagaaaatccagaattacacccaaaaagaaagtgccattaatgactcaagtttgagtttttaaactcaaacttgatcatttcaaacaaaactcatctaaaccagctattacaactcaattgcaactcaataacaacttagaaacagaatcacaaaccattcaaaccctagcagccagtaatccacaacaatacatactaaaatcaaacttacaactcaagaaaacttgaaataaaaaggtttaggctttacctcaagctacaactgaattttcccacacaagaagagcccttgaatccagctaaagtgaaaagctcaaagaccaaaccctaggtgttggtttggtttgaagagagaggggaggagaaaagagataaacattgcttttcttttaattatttgattttcttcaaaatcctaaattcaacattaaaccttgctgaataaaagaatatggccagccgccatcctagtatagtgcaacctaattccaaaaatggaaatatccaaaatgcccttggtccttcaaaataggtaaaggtaaatctaggggtaaaatggtcaaaagccacaaccccactcaaaccggatatcctatctatctcaaatatttatccaactaaggaaaaatgttctagacttgcccatgtgactcaaatggccatcaattgcattttccgtcgttgtcaagcaaaaactataacaaaaaaaagcataattgatatataatacgaataatacatctagagtttaataaaatatttagaattgagaaattacaactctaatgcccatttctaaaaaaaatgggacccacaactaaataaattcataaatatttatacgaatatcaataattaacgctaattgtctttactaatcaatattctaaaatgtggtcagtacaagcgctttggtgagttgtaacaattctacattaggaaaaaactctagtccaagtggatacaaaagaggtaactcacaaggacatgataatccaacaccatattatgggagcatcatgtgaaactgttttaagatactaggtcacaccaagtttgagtgtaggaagttacagttcataaattgacaaccacactctattgatattgcaagcactagtgatgcatctaacaaatcagtccttatttctacagatgaattttccaagttctcaaggtatcacgaaaaacttaagtcttcatctccctctgtcactgtgattgctaattcaggtaactctaatacattccttctttccaaatcttcaaaatgagtcattgattctggtgccacagatcatataacaggtaattccagtcgcttttccactttttagtctcatagtccgacttctattattatcttaagtaatggatcaccatcttctgttcttagatcttccgttgttgttcgtacacctctgctcactttatcgtcagtcttacatttagctaattcgtcctttaatttgcaatctgttagtcaactcactcttaatcataattattgcatctcattctttctcgatcattgtttgctttaggatcttatgacgaagaagattattggtaaggacatcaatctggttgcttgttcgagtgttgcttatgcttttgaggctcattgtcgtttgggtcatccatcccttcctttgctcaagaaactttgtccccaatatagtaagttgtcttcattagattgtgagtcatgtcagttttctaaacatcatcctgttagtttacgtcttcaagtcaataaatgtgctagtgttccttttgagttagttcattctgatgtttggggtccttctcctattctgtctcaacctggattcaggtattttattacttttctcgatgattattcttgtccaacttggttatatttaacgaaacattattttgagttattttccatattctgtgctttttctgttgagattcaaaatcaatttaatgtgtctgttcgtactttgcaaagtgacaatgccaaagagtacacattagctcaatttcaatcttacatgacctctaattgcatgcttcatgaaacttcctgtgtttatacctcacctaaaaattgtgtagtagaacataaaaatagacatttacttgaaactgcacgtgccctcttattttaaatgaaagctcataaacctttttgggccgatgtaattttgacatcatgctttcttattaattgcatgccatcctctatacttaatggtaagatcccatttaaaattctttttcctaataagtcattatttccaattgctcctctggtatttggtaattttgttttactcgcgatgttcgtccacatgtcaccaaattagaccctaaggccttaaagtgtgtctttcttggttattcttgtctttagaaaaggtataggtgttattgtcctgatctcaacaaatatcttatttcttttcatcttcaactactcctactcattagggagaatatgatgattttttggtatattctgtcaaatcctctgcgcatgatacatgttctaacgagtctcttgttccttcacttgcctcgatcataactcccacaatgcctacatctccaccacctccaccactacctcgacctcctatagtgtacaccacgcatccctctccttcacctcttgtttcatgtcctgcacttgcatctttgtcatcagatctggaattcaaagatgttctttccattgcactacataaaggtaaacaccaatgtacttttcttatttcttcttttatttcttataatcatcttcttgctcttttattgcttcacttgattctatcactattcctaaaactgttcatgaagcaatgtctcatcttgggtggcttgctgcaatgatagaagagatgaatgcttttgttgcaaataatacttgggacttggctaatttacctttaggaaaatgggccatagggtgcaaatgggtgtttacagttaaattcaatcaagatggaacaatttctcacataaaggtatgtcttattgccaagggttatgctcaaacctatggaatgaactatcgtgatacttttttcctattactaaactcacatctgctcaattgttcatttccatggcagctactcatcattggcctttgcatcaacttgacaataaaaatgctctttttcatggagatcttgagaagaagtgtatatggagcaacctcctgggtttgttgctcaaggggagttagggcgagtttatcgtcttcgcaaatctttatatggattgagacaaagttctcgttattggtttggtaaatttagtcagcctgttgagaaatttggtttgttaaaaagtaagttagaacattctgtgttttataaaagatcaactgctggtatcattttgttagtggtgtatgttgatgatatcgttattatttgaaatgataatgaaggcatctcatcccttaagtctttcattcgtacccagtttcacacgaaggatttagaggtgcttaagtatttcttgggagttaaagttactcgaagtaaacaaggttaaggaagtattgaattgaattgttaacttagaaagaaaaatagggagcaaaaccttgtaatgctccaatgaatctacctgtgcatcttacacgtgatggnnaacaatttgaagatcctgagaaatatcgcagattgattggaaagttgaattatctaactgtgaatcatttagatattgcattcccaattagtgtcattagtcagnnnnnnnnttctccaacaattcatcattgggtagcattacagaaaattttatgttacttgaaaggagcaccaggacaaggtatactttacaaggatcatgaacatacacagattgagtgtttctatgatgaaattgggtaggctccaatgtaggtagacgacccagttcaagatattgtgtattttttgggggaaatctgatctcttagaagagtaagaaacaaaatattatttctagatccagtgctggatcagaatatagaactatggcatagtctgtgtgtgaggtaatatggaattattagcttttgaatgaatttgggtttaagacttctgttccagcaaaatcgtggtgtgataattaagctgctcttcatattgcctcaaatctcgtgttctacaagcgaactaagcacattgatattgcttgtcattttgttcgtgagaaaattcaacaaggcctgatctccacatgatatgtgaagactagagaacaattcagagatatttttacaaaggatttgaatggggtgtaggttgattatctttgtaacaagttgagcatgattaacatctatactccaacttgagggggaatgttaaattattagatgtaaaaattaggataaattgtatttaatagtttcctatttgtatttagtagtttcccatttagtctcctagctttgtatataaatatatactaatatatggaatataacacacaaatctattcaccattctctataataaggaagatagaggtatgagttttagatacatttgtttatttaacaagacactcttggctaagcaagtttctcgcatttaccatgttcctgattgtttggcttgttgtatgttaaagggcctgtatttttgaaagcggtcctttgtcgagatcaacaaatcaaagagtggctcttttgtgtagaaacatatcttatgggggaaagaactttttgactctgggctggttggcatgtagggaatgggaatgacattgctatttattctaacagctgaattccttcagttatgccttccgttttgtctgcttcttctttaactgatggatctagaaaggtgtcggtgttacggaaagattcaggtgtttgggataatgtgttaattcgatccattttcttgcctcatgaagatgaatctatcctttctatccctcgatcttcacatgatgtgccaaataaaataatatggagctttgagaattcaggttggtattctgtgttaagagtggttatcggctgggccttcgcaattctgctgccccttgtgcttctctgtctgatgtcgtatctggttggtggaaaaagatatggtgtcttaatcttccttcaaaggttggactctttgcttcggagcgtcccataattggattcctactaaaactaatctagcacttcatggtctattatctgatggattatgtcctttgtgtgggttggaagatgaatctactcatatgctctttgggggtgtactacgttgttacagtgcaggaaactctaagagtttgtgttgggggatcctcttcttcattgtgtggattttcttgactttattaatagtgttaatgttgatttttgttagccaaatttgaacctcgcgatgataattccacacataaaaaataaaagctatagaaaaataatatatgaacaaagggttctttacgtggttttgcagttaaaattctacatactccacgagtcaatcttattcagatttctgagtatttttttcagggcctctttcataagagtttttctgtcccctcttttgatcttgtctaccactatttataattgcatagcggcagttaattacaaagctgaccaaaatatgtttacagccattatccctaaaatcgtgggatctgattacaaattaagccaaataaattagggttttacacagctgtgaatatcccgcttttattgggccgagaagaacgtgtaatcaaaaatatacggtaagccnnatctcatagggatgcctcgccgagaatggagtcaagataactttgatagcgagcggttgcttgtcgagatgatcttctcgagactaatattgttttaactatgataactatgctttctggtgttgagatgatcttcctcgcatgcataccatcttcgagcaagataagtgcctcgctgtctgctatcttgactcgtcacactatctatactcagtttttatatcgtataatatacgctaagtattttaagtgtagtcattttctctttcatgcacggaggttgaggccctgtcatgaacgcgtgtacccacatggtttcttgtcaatacataagttagtagttcgtacatttttgtctcgtagaaggctcttcagcaagccgagttataaacatacgctggaaattatatttccaacaagtgttccatgctaagtatactttcgtttgcgtgtttgagttctcgttcttcccagctcgacacatgtcttcctctgatgtgcttaccgaatttcgggtataacaattaccccttaaaaagttcttttctaattaaaaagagctttctaataattacaaagggtatttttgtcatgttcttcttttttgaaaagacgcattccctctaattttggcagttgtgcggtttcaaggtacatcaaaattaaatgaccatcttttccacttccgcttcaaatcatgtccattggatcaaatctttctttgatctaatgaaaccattatcatgggtataaaataaggaaaaagggaccacctttgcaccatttcagaaagtttgagaagaacccttaaactcttttggcaaggatcaccattaaatccgtccaaagacttgcatgccatccttgtctttgacctttttcctgcgagtttccttcgacttcattttctcaaagagatccttgcttcgttcaaaggtttgcagatggaattacgaggcattgccctaagccctaacttcaaacggtaagttactttcttctttctcttgtttgttacatagtgttgatcagttacttgacttgtttgtatcgttatcatctcatcttgttttggtagttttttagggttaaaactgttcatactaggattcaggtaatatgtaggttgttttaagatctccaactcattaccttctggtttgataaaattctctccaaggattgggactgcttcttgacggcagcaatgtcccactctggttcagcaatttatcttccagaagttttagagtttgagtttcctacagaatcgaccatcctatataaacccaacctctcaaaacccacctccaaattagagctaaacaatgctaggtctagggaacacacagtgagaaccaaacatgaagatatttctagtcgctacaggcacttcctggaagaaatatccgaaaagagacgccgattcttgcgagaagcagcctggccagaacaacgcatcgtggcctttattcctgtggcaaagcctttgtttttacccaacgtcacaattgcttttaacccaggtgacttggattttgagattatgcctcccaagccacgtacgtctaaaacgcctcaggatcccagaatcaccttggaggctgagttgataaaatcgatggtccgatctgtctcaggctatacgggcaacatgctgaagacctttggaattgcacttgggcaatcgtgccacgttagttcagtacgagagggtgaattcagttgctaccccctgcacgctttgctagcagtaacccatgaaccagtggtgagactactactagtggttcaactagtatgggcacctagagccttgagcatatttgtgtaggggccatcctccctcttcgggactacttcaaagactacatacatgacattggggttgccccattccagctgactcccatctcctacaggattctcagtagtctgaaagtcttgtacaaaattatgaattggtgttgtcccacacccgtagagatgactgggtatctttactcagttaaggccattccatcgaggaagcacgccacagtctattttggtactcacgctagcgagccaaaaattattatagacttgccaaataaggtgtctttcaaggacaagctcttctagacatttggcctctcccccattagaacaaccacgttttgcaaactccgtaagtgattgctctcttcttacttatttgtatcaatcttcctttttcaagtaattgactaatattttgtttgttctgacagctcttctgacgagacctactcctaccccccgagatggtaagtaggcacaggcgcctgatgactctcccttatggtcttcaatcatgcaaattcctttcgaacgaagttaacttgcgatcggcgggccttcttgctgacaaagaatacacttgcaattacaaggttcctaagtattcttcttggcaacaaataattgttccacccgaagaccaggcctaagatcacttagcccaatcacaataccttcaaagcactacccctcaggaatccggtgaaggagcatctcgagataatcaatgtggcttgtcacctactgtacttaaggctgagtataatacattagttaccttccaagactcccgtcttaatttttatacttggaatgccattctcgtggaccacattgctcataagtttgatagttggtatcctagattccacgtccaaattaactgtcacgagtcattttatggtatagctgagcaatacgatactatggaagatagggcaggtcacatagatgcgagctgggatttagaacaaatcgacccttttgatatattcaaaattacaggctgtagggattttaacgaatattatggtcgttctaccccttcatctagtgatagctcgccttctagtgattttggtaaatatcttaggtggaaaattatactcctcccctttttaatcggcttttataatgattgtaacgcctcgtccggttttgcagacatgggttatgaaaacatcctagaccgtaaggggaagaaaaggacatccaannntggagtccctactgctgccgaagtggttcctgctaagaagcaaaggaaaaccactgcccataagaagaaattacttgccaagcctatcgatctcgaggttttggacaacgagatccaagagcaagttcctcctctagttgttcccaatgccaatgcccctcatctcgaggcgacccccgctaccgcttctctgagtcaggccatcgagaccctgtcggtcgcagctggagaagctggctctgaattttcccaggcatatggggtcgcctattggcgcaaatttcaaactctccttccccctaattgggatattctcaatcttaggagcccaaaagagatgctttcaaggaccttggactgcacttcatggtatgtcgcctttgttattataattatattatcttcttatatctcttttatattcatctgcttgcaattctcaaggcttcttttgcttcttttgcttccaatcaactactctttgagcgacttgggtatttggagggcaagaatcacaaattagtatcccaatgcaaggttgtgtgcgagcaacgagacaacgcctaacaggagattacccgcctcatgcaagaagtcaaaaaagcaaaggaggaagtcgagaaagcaaagaaggaagccaagacggaaaaagaggaagccgagaagatgaaggaggaggccgagaagaccatcaaagtccaagccgatgagtttgaggagaagcttgctgaaaaaacttgctaagaaagaaatcgagaccgtagaacggtgcgataaagtttgtttttgcactgtatatcaggcatggctttggaaccctaacatataccagcttcttggaggagaaggaagagaaaactttagctctttgcgagaagaccaagatggacgaagaagacggcgaggtcgaggaagaagaagaagatctgtccaagtctcgcagcatgtagacttggtttatttatcttcctttttttttcttttaggaaatggccctttggtcgagacaatggttttgcccctagtggcacttttttgtaaagaaagatttgcaaggttgggcgaccaactttgctttttaatgcctcacacttttaagtgtaaactttattatgtggatgtttgcttgtattttattcacaatataaactatcacatgcataaagtttattacgggtttccattgattgtcttttcctccgacgttaagtagttaacttcctactttacgcgcgagcagcttatctgcccgttccttaatctgcgagccatcatcgattccatctcccaataattgaaaatgatcttattttaagcacattcaaatatatttttaatgaacttgtcatcttatatatatatatattttcattgctgacatgagtagttaaaatttctacccacgtgttgggtttaagtattttttaaagacatttggatgtcttgtttaatactttcccttagcgcgagccgttagtattcagctttatgtgctagtcataacttttgattttcctttctcgtcagataggttataaatcaaaaaattacagttgtttcatccctttctcgtcagaaaggtttgatcaaggcattataatgattcgacccctcttccattgaaaatgtttggtcagtgagttataacagtttgacccctcttccatcaaaaaggcttggtcgaggccctttttttttaaacaatgggtttgcattttactatgtatctccagatcaattctggttaatcatacatatatgcccctcaagtaattttaaagggtttacactttataattacttgtttgaaagaaatgattattt

SEQ ID NO: 18000 - DNA, 2791 bp, Cannabis sativa
tatatataaatatatttcaataataaatacttttaaaaattattaaaataatattatattattgtttaataaatattaaatgatatatttttcttattttatgataaaatagtaataaaaaaatatgaaaagatgaaattattaaacattctttttcactctaataataaaaatctattaaaatgtcaaaaatatattatttacacaattccatttcctttggaatttctctcaagcaaacttccaaataaatattacggaaagacttgaaggatgtggggcactattcactcaccaatcaccattaagtatttgcagattgacgaaatgaaaaaaaaaaaacacaaatagattaagaaaaaacacatagaaaatatacataagaaaatagaaaaaattataggaaaatattttgggggagagtgtacgtaaagggaacaaattatagagtatagagacaagtgaaaagacaaatatgtaataatggatctccaaaatgtgtggttggttttggaaattaggtggggaggtgtctgtgtcataatactctcctctacttgtttgtttttcacttgagatatctgaggggacatatatgtagtagtatgaattgtgtttgtgtgatgtccacatgagtttccattgctcaattctctttctctttctctcttgttttagcaattataatttatttatttttggataaactactcctcattcgttcgtacaatcttattatgtgttagtgtgaaaatggataaagtcttcttcaccaagaataaatgtcattgtaacaagaaaaggagcccatgttgtacagattctagaccaacaaaatctttattaattccaaatccaaaacttttgttgctttcacgtgcctgagtaaaaaacaacaagaaaagactatggtgtcccaccatgaaacgatttttagcatggggggccgcctcaccttttttaattgccaccaaaacaacataaatttaattctctcaagattgaacttctttatactcgaatcaaaaaaagatttaaatcctttacttgatgggaaagatcacattcactcttatctttttcttctttttcttttcccaccctaacaccaataatcaaagcaaagcttagtttggcttgtatttatttatctttccctccaacattagagctttattttatggaatctcattcgaggcctagtgatcagaaccacaaacactgatatgcacttggttctatctttattactaaatttatcaataaaaattccaagaaaaaagtggagttttcccactatataaaatagattaaagagtaaggaacaaccgttcaatgatgggccgagccgatgccctataatgataattttcctccaggtttacatcaagctcttgctgatgttaaaactctcaaaaattcaaaatcagctagtaatattctttatccactaacccacaattggtatagtgataaatatacacgcaattgaaacgaagggggtctagattgacaggtgtgggttcctaagtgaggtggcaagaatttctctccctgtcaattttttttcctctatgtatttgtgctctatgtttcattcattatttcttaaaaggttcggttacataccatgaaatgatgacgataaccatttacaagagaaaaccataaactagaaccaaaaaacttgcctcgtcactacatacacattagtttggaattgtatacaaacgtcaaaaatacaaaataaattattttgtcgtgaaataaattgttacaaaactagctctaaattatttaaaatttcacaagaattgttgcattaaataactataatctatactatcgtaaaacagaaatgctcacatttcaaaaaaaaaaaaaagaagaaaagaaaacagaaatgctctgatggagataaaagacacaagttgtaaaattactctataaatatagtatagttttatgtttttacgtgttttcataaattgcatgctattcggtaaattaaatttttttatatatatgatcaaccatgaattttcattttacttgctgcttattcatgtttaaaataatggtcaaaaggatttataaaatattgaaattaactaaccaaagatatggtaattacaaagtttcgaatctaaaataggtggttgctgagctgatttttgctccttgtcgatccttatccatttcctaactcccaggtcaaattatcaaaaataagtccctacctttcctatagccttctatctagttcttcaccaagttgccaacatttttcaactagctacttatccaaatatatttttaaaacaaattaataagtcaataaccttggtcacactaaataaacatgtgttagaataaaacagtaattgattgtgtatgtatgcgtattaactaaagcagcaaaagcaagacaatagaaagaagtgagcaaaaccaatgttggaacctccttcacaacttatcttcattgatttcaaagggtgttagcgttcaaacaaaacatcttgtagttaagaaactggatctataccttaataattaacaaaaccgaaaaaaaaggcggtggacgatgattcttgaggcaaaatttcaggaatccttggaagcattctgattgcatgatagatgactttgatcctttggcagcaaatagggtggaaggaacgatgggatgaagaatgccaagcatagacagagtagcaccatggctgcaacccaccaagctttgtgtggaatccccaacaaaagttcatcacaaactaaagtaaatagc

SEQ ID NO: 18001 - DNA, 7121 bp, Cannabis sativa
gagagagagagagagagaaacctgcaatggtgagcagttttcagtactctcgaagaatgaactgcaagtctctctgattccaatgaggataaatttctagcttccccaattccctgcaaatggcaaacaagacagcaataagtgaatatatgaggcataaataaaaaagattgaaatgcaaggcccaataggaacctacattaaaataaatatgcacacgagtgtctaacatatttcatccactactttactcataaatggagggtgcacagaatttagacaggaacaaatgttttattatgatatcatcaaaacttgaacaattgagaagaaaggtactacctagtacctacaaaacaatatattaatttgacattctcagttcatacataccaaagcttttactccacttgttactgcaggggagggatctgaggccttgggactcaaaatagatctttccaaaggtgcagcatatttcacaaaagggtgattcaaaagttcagcagctgaaggacgattaattggatttcgttgcaagcattgtaatataaattcctttccatcctgtgataaggtatctggaattgctggaagctccttgctattaccaatcttaaacatagcagctacctgcagaccacaatatgcaaatataacaaataagaaaagaaggatagtgttctactctgtaagtgtagtgaaatattactagatcacatccaaggtccaaagagattattattgggattcaaagcaattttctcaattattaaccatacgtttataagaattaattcacaaccctagtcaataagaaggaaaaaaataaaataacacggcaccagtagttcaaaagaccaaaaagaaggaaaaacatgaaacttagtagcctagtacagaactagaatgaatagaagaaaaacaactacacttttacttctacatgtctatttactttgatttttttactcagttttgtaattaaaagaaaaaaaacacattagaaacaaaaatctttgaaaaaacatttgaaaaatatataaaaagcctgaggcaaatgttaaaacagctaaataaaaggttctagatttgagagctatgcctaagtgggttttgaaacattacaaattgcctttgattaattgaggcatgggttttcaacaattcacaaaaacataggttttgatacttcttttccatcctcactcaacaaaacaaagttgagaaagcttgatcaagctcactttgaacatgaacaaatctcaatattgaattcatagaaaatatttgaggcatataactgtaatctaaaatactgactccttcatactggctccagggtggttttgtagtagccatttccaaaacagtgcatccaaggctccaaatatccacagcaaggttgcagccagttgaattctttattacctgggagaaaggcaggaagaaggatgaaatagaatcaagatcatacacaatgaaagaatatcaagacaagcagcaaaaataacttcataagatttttacctcaggtgccatccagtaggggcttcccttgaatgataatgctgactgaccagtgatctgcacagcacatcggagtaagaaacaagatcatcatgcagcctcaaccattacagtcaagcctgatttgatttataatggatattttcttaatcagcatatggtcatattagtatacagaattacttaatcacattttgattgtgtacatgaatatactaactgaaaaagttacatatgcattgtacatttttgtttgctgaatacgagttaccatggttgtcatgcaaccataatgtaccatttaatatatgtaataagttcctaaaaacaatacttttaaaccacttgtaagaataagattctgatagaactaacatgctttgccatcccaaagtctgccaacttaacacggccatttgggtctacaagtatatttgctcctttgatgtccctgtacaaagataaacatttgtagacccagttagcttgttaactttatagatgcagctgttgaatacacataacttcagaagttcagattattcgtataagaatgattaacttaattcacctgtgaactgtatttttagcatgtaaatatgcaaggcctgacaaaatctgttgagtataactacgaattgccagttcaccaaattgcccataatcccggagcaatttatagatcgacccccccgatacatactccaagtatatgtataatttgtcacccacctgttcaaggaataattcattaactaatccaaagtaacatgttgttagattaatagaaaaaccattatttggtgctgaaagtgtctgatacttgtgagccagtagctactgaatatgaattaataaattagctctcgaaatatttaaggaacaagtcatttccaaatgtcataaccaaacacaagattactaataacaagtttgactataatagttagtaatgtctcagatcaaagataaaacacttactgcgtcagatccataatactgcacaatgttcgggtgccttaaacggcttagtagagtaatttcctgtccaaacaccaaatttatgaacttgttcgtgagtttaccatatccatgcaaattcaaataagaagttaactacatagttagactaatataatggtcacaatctcacagaaaagttacctgcattaattgcttagcactttccttagactttgcatcatctgaaaacaatgtaacctccttcattgcacacatgtctccactctcgctaaacaagttcatacaatgaatcacaaacgcagaaactcaactttcaataaacaaaaaagcagtcttaaatgagaacagacaaacctgttaaaaccaacataaacatgcccaaatgtgcctctacctatcagctttcctttcttccagcgagaaccagggcttgcaggattctctgccctacctggacttcgtggcacagaaggagatgttgctgctgaattagtagaaaaatggggaggattagagattgtcccaggaggaagaggcaaacggtgactttgttgtttgccatcatcaggccagcttgtctgagaatcacagggcatccctcctgctcttggatggataggtgttacagtaccactatgaattcttgagcctgggccagggctagtcattctaggactgggtacaggggagtactcagggctacccctgctttgttgcaaaaaaaattgtgcggacatgtctccccccatagaattatgcccagaattatgacctgaaccaggacttgagcaatggccagatccagctaaagtaacatctggaaatgggccatatggcttccctgcccaaaaggcagagttgactacttggtcagagccaaatgctctcattggacttctagaaggacttgacaaggagctgtctggagcactgcagaaaccaccattataaggaaccagtagattcggcacatgattgcttaaaggccttcgtttcggagatgtggacaaaatatgattattggtagggaggttagctggttttcttacttcccttgggcttatttggaaaacattaggggtttgatccttgggcatcacacttcagaaataacccaaaaagattcattataattggtaggggtaaagcaaagtgaaaaaataataataaagcagtaaacatgtaaatcaattcgaagacaagaaaagcaatatttagattatcatgaacaaaataaaatctatctaacctgggaggacttcctgcaacaaccctatttccattgtcatagtcagttgcctgaggactacgttgacgtgagtcaactggctcatcactttcacctgagctttcactagacactgaaccagtgaccaaatcaccatctaaatcagagggactgggcctgctctgcaaacattttggcgttgggagaagaaatgatgctggcttagagcccttctcgcatcttggtgataagttaattccagaatctgtgcgaccaacagtagcaagatgaaggcctgggagcggaagaggctgagcatgaggtctgtcgacaaaactttgagaccttggtacttgtttagaaggtgagggagatctagattccaggggtgatcgagatcctatttcagaaattgtgtcactgcaacgtcttcgagaaacctctgttctattgttgactctaccatcagacgggctcctaaatttccgatgtaatgattcaatgaaactttccttgcttgttttcttctttgcttctttggatgacgacttcccccaccacgaaggcatctttcttactaaagctttacagttagcaggcaagtactttttaaagtatacccattttcaagtatcacattacatagggtaagcaatcagtttctgaactcatatagcttccaagaccactagaagttttcattgcttacgactctcaccaaatgggaaccccaattaagccataagtaccaactctagaatgtgatatggaaaatggggatagctccacaatcaatacagcacataaaacctgtagtgaaaaagaaaaaataaaaaaatctgttgttttgtacatttatctaaaatcttcatgcaatgatttaatcattaaattccaaaagtaagttggatcaaagctcatgtaatgaaaacacccctgaaagcctttcctgaaggatacgctcaaagtggtattaatatatacttagacacacacacacgaattcttatgtacattaatttccaagactacacggagaggcgaagtttgtgatttttttttaactgtttgcagggatgtatttactcttagtaagcttgcacttgtttatcaatgggcaaccagaactcaaacaagataagacatgtatgtatgtaggaaagaaggcaacaagttttatgagctaaggaagaaaaacacttaaaaatgtgtgctgaaaatataggataaaacaaatctaacattgacataccttctcaaaattaaagacatagtgaacttggtataaaatttagaccaaccagctccaaaatttcaacatatcatttaacataatgcttacttcggctactttatagaagaacctcatactccttctacctcgaagtagtctgatttaacaattttcacgtacgtctattatttttaaaccaaaaatcactgactacctttacaaattaaagctcagctcaacatcttccaattcaactcaataacaagatccttcgtcagctttgactacactgaaacaacccatccactaaatttaataatattaacccatactcaaacacctaccatctttttaattttctaggaaaccaaacaagagtttacgatcccatattgctcatgccagctatatttatacagatctaaaaaaaatacatctgtttaaccgaactaaagaatcaactaacttaacgtgatttcaacaatcttcagtaaaaataaaaaataagaatcaacataaatatattcagagagaaagagagtaagcatactcgattgctggggaaaatcacaactgagcccaactcggtttacccactctcgagcgtaaatccgagttgaaaaatgactgaaattgcagagcaaacccctgcccaaaaaaaatcagaaccctagaaaatcgaaaaatgtaagagatgatttgattcaaaaatggattcttttttttgcagcggaattttgagaatagaatcgcataggacgacacaaagagagtatatctgagttaaaaacacattgtgttgtctcaaactgaacgaactccatttttttttttctttttcattttttctaaataattatttcacattttctttttcttttttttttttaataatttactttttaacaataatcaatgacgatttttttttctttccgttgacctgaagtggagtatttgagctcactcatctaattaagggtcaattttttttgtgtttttcagtaacgattttaagtaattttatattatgataagttgtaactaaactcttaaattaatagtcaaattaaatataatttcaattaaagaaagtgaaattaaacatattttatattttgtttaattttcttttctcaatttaatattactcaggaaaaactattaaacaatagcatgaatcacgtgtgataaataaagaaaaaattgttaataattattaatatttattactggcggtaattgtttattttaaattataccttttagtttggattacaattagatttagagaccccaataatacaatgattttcatatttttattaaaaacaaacagatagataaataacaatatgttatatcaaccaaaggaatcgacaataataaataaattcattttctttaaacaaaattggcaattaaatttacaaaaaaaaaaaaaaaaaaatcttattgtgttattttccattgacaaatattttaaaaagaaaaaacaacatgattaaacactaaaaatcacatgggccatgtgttttttccattattattattattattatttggatgtggggttatgagctatatgtcttcccaataaaatataagtatacttttaattttttttataaattagttatccattcaattgtctcaatctaaaaccatacatgtttttggtttttgggtttggtatatgaaaaagattttgtgaagagtgaggttaatggggatttgggaagtgggagtagggtgctgctggggtctttagcattgatttgagtgagttgagaaagaataatgtataaaaacaaggcagggttgcttttattcaaagctatatcatgccaagtattcaacattcaattctccaataattatagtgtcaaaaacatactacgctaaaatcatttaaaaactcattaatactacatatttaaaattcacaattttttttaaaaaaatatatctacaggtagctgattttaggaatttttacactgcttatcaatttttttaaatatttttacaataataattttaagatttgttcaagatgagataattaccttaaatacctcaagcataacatgaaataaataaaattaggatttttgaagtagtgattagtgtcataaaagttaa

SEQ ID NO: 18002 - DNA, 4334 bp, Cannabis sativa
aaattaatatataattaattaagcacatttaattagcagtcaaatgggtaattggctccaacccatatagtttcattaattcaaaccatttcacgagagatgaatgggaggattaatctcatcatatctgaatgaatctaccttgttgtttgtttcgtttcagatattttttactattgaaaacctaactttggctcagagtttgaagatatatatcaaatttagggtagtatctctaaaattgtatacaccgagtttggttctattactttggtttcgttttaaagtataattctaatagaataaaatagtggaatgattatttatttcgaaatggaaagaaaaatcattccgatgcaagataagaaaaaacttaataattttttttatgttttttaaatttgatttcattccattcctattcatattcccattctcatttttatttctataatttctgatcaatacttttgcatttgattatttgttgtgtgtagaggcaccagtaccaatattagtgcaacaaggtgaaaattcatcagggaaagaagaagtgaatgattggctttatggattgctggcaattgggacattaggaaataatgacatcaataaagaagatctctataattctgatcctcatcatcatgagaccattaataaaccaccaccaccatcatcatcatcatctttattattaagagacccaaaatgtgaggctgatgatgatgatgaggaggaagatggaagcttggagctacaaattgatttgaagtcattaatattgatgcatgataaggaagcagcagcaggtgctactggtgatcatccctccttggaaagatttctaagtagacaatcacagtcaattttggaactctgtaagagtactagtaataatactagtggtacaaccttagctctcaacagaggaaaagatgttactacggacaacactacaaaaaatgcaattgttggcaagaaatccttttcttttcttcttaagaagatttttgtttgttcaagtggctttcctaactcacctcccactccaaaatctcccacttcagaacaaagaatggaaaaggtaaaccaaatacgatcaaatatttaattaatcaattacttatgtcatatttacatactatatatgctttttaaataattattgaatttgatcgaaaatgatgtagtttaataattttttttacttcacataattgatggttatttaatctgattaatctaattcagtttttagatactttcacattaattattggcattaaatttacgaagttgggtgtccatattagaagtgtatatatgcatatgtcagctagcattgttatttattagtttgtatctaaaacattataattaatttaacttgttacagatactaagagcaatacttcacaagaagatatatccccaaggttcaagtaatccatcattgtctatgaaaaagtacatagagaatagacataatgaagacgacttaactgatgaacagaaaaatgcagtactcaatggaagcaaatgggtcaaaactgattctgaatgtaattaagcttttacaacattattaccatatacatgcctattttcttttatgcattttatctaatatatatgtgaaaatcgacttctttctaatatcactattattgagaaagcttccctcagattgtcgagcatagccattttgcaaaagattatcaaaaagagatttgtgcaaagtaacttaaaaataattatctcgccgaacacttgcttcttgtgtttgacaccttatttttacagtcactttgcacaatacattatttagataatttttttttttttgcaaaatgacattctcaacaatctgtttaattagcaaaaaaaaaaaaacattctcaactcaacaatctcgataatatctatatttagatttctcacactcagtaaaatattttagagagactattttgcaaaataattactcgttatgatttatcatatatatttttatgtgagttgaaccattttcttaattttattgtagatattgttttagagatataagcttagctgacacgtcatcatcgacagctaggcttcggagaatacagggtaaagatattatttcattgaaatcatttcaaaaattaattaattatgatgattattaattaagggagcaagttacctatctcttcttctaatagatcaatctctacaacatatcaatgcaggttttaaatagaagttcaaacccatattgttggaggaagtaattaattggaggtgcagtaatttgggatcaccaaagaattgtttacacaccttatgatatataaaaaataatatcattatgtacgtatagttatatatatatatgtgatatagtgaaaaggcaggtgactttactttagcttgtcttttcatgtaactaatgtaaaataataattcataataagctccgatcgtggaaaggaagctattaatattgtgctctctcattcacaataaaattaaaattgtatacaaccatttccaaaagtttcttattataacggactgtgaggggcgtaattaagaaaaacaaaattcaacccttacactaaaattaatattatatatttataaatattattttttttattacaaatatatttcataactaactaaaatatatacatttatttcggaggggcgattatcctacacttttatgtagatttattactgtataatacttaccattgaataattttctctgagaggaggtgtgtaagaaattttttaggtagtatgaatttaagaaatgaatttttgtctaatcatttttagaccaaagtatatacatattcacatatattaatatattattcaatcaatatataatgaaaaatgcttatgatcaattttgtgtgatatttgagggattgcaagtgtcacacacttgagtcaatatgactccccatcagtgagctaattaacaagaataatttataacctgcatattaacaattaacaagaataatttatagtgagttgcctacatatatacaagaaaagcaaataaaaattcatgttttgatgttggagaattaaagtagctaattaccagttaccatatatatatataatggacatacttaatttttcagaaaattgtatgctttgataaatttaaaattttaaaatacatcaatttgcatgttttataatattgattaatactgtttgtattaactagaaattttgtcccccttcaaaataaataaattttggtaaaggatccaacatgtgatatatatagtagataaatgtataaacattgcagtggcgccgtactaaaattgcatgcatatatataatataattaaggaatattatcacattgaattgttactcgtccttagccccttagggtgccttgggagacattaatatatgatggaccactcataactttcttatagaataataacctatttaaaagagatagtgcaatgtgtcatattactaataatgatgcgattattatccaatttttttattttaatttaataattattataaaaaaattctaatcactcataatatatcatactaatattaattataatatatcataatatatcaaaaaaaaatattgtacaactaattaggagtgtttacaaaccgcccacactatatactacaccacacaaaaaatgcggtttaaaatatccaggagaatgtttttttgggtatgaattggaaaggaggtcgatagatataaatgtttgtatgctatcacacaacactggtttgtgcatttgattctcggtcaaattttttttctttcatacgtgatcaactatgaaataagagctaattatctagagataattacataaaatattatttttttttaaattttttatattattatattttttatatatttttacggtattttataaaattacataaaaataacatgaattaacattcaaaaaataataaaaaaataacataaaaatgataaaaattcaacaacaaattaataagggtacaatataaaagtacatcaaaagaccatatttatataaataaaatcataaaaatcgtaaaaatggttaaaattccgcataactgtatttttgtatttttgtattttttttttttgtttttgtatatttttgaactaattccaattatctaagcttaattttaggtatcatttagatttgggattgtgtctttttaaaatatatatatatatatatttatatgttttgctcatatttttttaaaatatatataggaaattttacacaaatatccctatatatata

SEQ ID NO: 18003 - DNA, 7214 bp, Cannabis sativa
attttgaattggatacccataatcatattcagtttctctctcttaatttctccacacgatttcaaccttgatctttccatcatctcaacttcttcaccatgatttcttctctgttttgttcttattctacaattttctatgtaatggcaataactccttcatcatcttcttcatccctcctgcaaataaaataaaataaaataaaattcctattaaacatccagaagctccaaatataggtgtcatatcggttggaaaaaaaaaagaagaaaagaaagttagatgaagataattttgttgcgcccttacctaaacagaggaaggattctggtaataagaaatctaaaagtgtgatttttgatggtaaaaaagagaagaaacaagctgctcgtttgaatgaggttttttcaagaattttttttagtttctgctctaattttggttctatcacttttggatgttgttaatgttttttgattcacgttgtttattagttttttttttaggtttggtttgttgtttcaattattttaggttcatttgtattgctcattagttagttttagggtttctattggtttctcaacttcagaatcaatttttgtttgttaactttcttaagggtgttgctgttatttgtgatttttatattttggaatcagtttttcataatttatcttcttgtatatatgtatataaagattcacctaccatatatttaacgaaatacctttaagaaagaagatctccacaatttcaatttttcttcttgatattgctctactgtttgtgaaaatgaaaaaatcaaattttgatgaggtttgtattgcatttttttttgccatattttaggttttatcttttttaatttaggtatggtttccgtgctttgatatatataatttctcagtttgttaggtctgttattgagtttcatttatatttcgtattagttggttttaggtttcttttccgtttctcaacttcggaatcatgtttctctttttaatggtttatagtacttgctgttgattttgctttttatggttatgaatttatgtatgttgaatgcttattgtagtgtgatttattattattttttttttttataaatttcttaggtttcatttatgattcattaattatttttattgacaattgtgattatatttatagattgttgcagattttagttatgatgtgaaagctccactaagagtagtggagattgtttctctgcttggtcaagaaaataaatgtattttacttatgtcgttgtattttagttgttaatgtatttcagcatagttatttttaactattttgattattgtattttacccagtgactatggtgcttttgttgctacatttgttgagttcgaaaaaatgttccactaaattttgatatcggagcttatctcacgaggcttgctatgattttgtttgtatatgataaaagaaaaaatgaagaatacattgatagtgagcatgagaagccttagaagtctatgaagaatgtttaagggaagaacaagactctcgtgattggggactgatttctatagcctgttgaatgttattatttattttaattatttgttttttaaatgctagatgttaaatcttggttattcatgttatagttctattattgttttttctttttgtttaagaattggatatcaaattgttatcttttattgagactatattattttgggttataatacatatatttttgtatgaatttttcgtttatgccgatatataaaatatttgatttaacgttgggacagtgtttattcaaaatgtctaattattatatttataaaagtaagttagagaaatcacttgaatcaatgtgttatgtgtaacacttgctatacaattatcattcaattgtttagcaactgttgaataaccaacatgcttgtcaacaaaataagaaaagttttttgaaattctaattaatgtttcaaatatggtgttgctaatgctttacatttttgataatatgttagatctgacattcagctacaaaacaactattatgcaattttttaaaaaccaatagtgtatcaagtgtaataacaatgtactaaagtgatattttctgcctgtaaaagtttacagaaaaaaattaaacaattcaaattaatgttctttcaatatctatgcttagttatgacatgtcttcctataactttttgggccacatttgctgcacctagctattctatttttttatttcctgtgcacataaaaatcttcttttcttgggtcttctcgatcacacacaatgtatattttgtgaaggttctttcaattttagttatatgtagaagaattgttagacccctgttaaccaattttatatcaactaatttagtatattaataaaactaaccatgttataaaattttttttaaagaattttgtattgtattgacgatatgaaatacctatatgaaatatctgtaaattcattgtatcattatcaatttgtaataattgatatgtcaagttttagagcattattaggaaaacggttatgcaattatgattttttgaaacataagaaactataaacgtatatttatgtacgtacatgactctatcaacatgtaacctggtaaccaaaaaaagtaattaagcatggtaattaatccttatttttttgtgacatgatggtaattaagagttaaaactagatgtagtggatgtctattatttggaaaataattccatgacaatgttgtcataacatatggtacattcacattggttgtatcatgatataagtattgtcccatgattttacatatatatcttacaggatcagcaggaggatgcatgtgggccttttctttttcaagactgtttgaatagaaatatacttcaatgaggtcatatagtagcattttgaaatttcggaatcgtatgtggtcttgcatggaattatatgtttcagactttcagtctctctgctctgaaccacaataatgcatgggtataatattgaagattttgttattaataattacttaagctatattagaaactttcagtaataatataatgacggccactagctagttttaatgcataaatattatatattcatacagtacttactccaaataagataatgattgccatttaaaattgtattaattaaaggatgtaatagtatcttagtcatgtgtgaaatacttactctgcatggctttatcgtatgaactaattatttcttataagaaaattcaatatctaaaaagtaatgagaaactctttgttaaagatatgatcagtttttaaagtatattaaatcaaaacgtacctacccaactactactttaaatgacaaagtaaccctacttatataattatattaataactattctggttttatggtcatgtttttttaagttttggttcatttcaaaaaaaaaaagaatgaatagattttagtttaaaataaaaaggaattagaaatttccttccaacttcaacacttttaataatgaaatcaactttgacatttcattattcaccaatccatcataataattcataacgtagtaaaagttttgggccatggattatatatatttatattagattaaaggaatctctgtatggatatgttagtagagatttgcacgtattgtgaacatataatttttacatttgtaaaataaaaaacaaaaaaaaaccttaaactaaaatttatatatgcacacttttttttaccaaaatctactgcaattaatcgtcaatcaatttaaaaataaaattgggtaacaaaataaacttggacctcaattacaatatttaattgattaactaattaatattattgacttaatgtaaaatcaataaaatatagtaattctatacacatcatataacaataaatcccagcgtggattgcgccacgaaaataatagcactgtactttaaatatatatcattttaaacttttttataatcacataatgacaccacacatcccagttccaagctcaataatcaaaagtttccatggctttcaagagacagtggtagccccaaattatgcaaaaataaacataaaataaatcaaaggaatgtacagaatatgattaaaagctttaaatgtgggacaaattaatcactgggccatacttgattttttttttttaattttctgctcatctctttaatctcctgtttacaaacctgacctgtctgtttcctttttcaatttttgtcttcttccctttcctttactagctcccactcatacaaaagccccaatatgaaaacaccaattttgacaatatacaatttcattacattttcttaaagcaaagaccaaacaaagttgaagaaggaaaacagagtgtgtaatactaaaatgaatcaagaaatgaatggaactgaagctaataataatgatcagagtcagagatcttcttatcaagagaatgggcatgagaatattgattacgttttcaaagtggtggtgattggagattctgcagttggcaaaactcaaatactttccaggtttaccaaaaacgagttttgttttgactcaaagtccaccattggagttgagttccagactcgtactgtcaccattaatgacaaactcatcaaagctcagatctgggatacagccggccaagaaaggtctattctattttcttttcttctttttaatcatacaaaacaaccattgttaagatctcgatcatatataatctgaaatttcatgtaatgaaataggtatcgagctgtaacaagtgcttactacagaggagcactaggggcgatgttggtgtacgacataacgaagaggcagagcttcgaccacgtggccaggtgggtggaggagctccgagcccacgccgacagctccatagtgatcatgctgatcggtaacaaggctgatttggtcgacatgagagccgtgccgacagaggatgccgtcgagttcgccgaggatcagggccttttcttctccgagacatcggctctcagcggtgacaacgtcaacactgcgttcttcagggttttggaggagatatacggtgtcgtttcgaagaaaagtttggagtgtggaaatgggtcaaagactaatggtgtggaacttcagggttccaaaattgatgtcatttctgggtctgagatggaaatcagtgagatgaaaaagctttctgcttgttcttgttgagatttgctatagagatattacttactaagtttactatatatgatgatttacatgattatttgtttaatcaagctaagcacagcagtgattctctatctatattactctatgctttaattaggttaatttgagttttcacttattttttattttaaccttccttgttcatttttttttttttgaggaaagtgaatatatttgagagaagatatctttgtggatttatgatctgatttagattttatgtttacaaaacagagcacttgtattgtatgagtatttgcctatgaaagtgaacatgtagctttttattttctatctacttccaatttaaacctatctaaatagtaattaaaaagagtaggttataatttgagagcaatttgattataattcactgaaatttattacaatatatatgttatgttcagagttagaatagtagctctcattctcaacacagacagtaatgttttttattgattttgcatgaaattgagattactttttttctttttttacttttgagtaataagaccataatttttgtctgtgaggcttggaaggaagtaataagtggggttatgtgccctaaaatgtgagatggtgtaggtacacagaaatctacaagcatcacaatcgtaatctttttcaatagcaaatttgcataaaatttgtatattttctttgagccagtggagtgaagttgacttggaccaccttccttatcccatgggccttacccaaaagaacaggtcccaatacattaatgaggagattatattagatgttattggtgactaacgactgacaattaagatgactctcattgacatgtttcattactaaatttataaaatagcttaatcgcaactataaagataccttccttttgtgttaggtacactcattacgtattagatattgagttaccaactttgcattttaagtaataaaagttcgaaagtgaaacataactagtattttcatttcatccaaaagtggcacagaatctggttcgtccattttttctctcttgaaattggcaccaatcaattctcaaatagtcatataagtaagtaaattaagttgtcactctgtaactggactgcaatgttttgaatgtcttactgtatttattttgagttaaaaaaacaatagaaatcgttgaattcatgcaaattttaagccaatatatgtcaaggttcatgaatgttaaaattctgggttttctttaggggaatcaaaatgtggtgtggtgtgaattatgggtcgtatacagagtggcagaaaaaggaataggctgcaaggaagttgggtgggtcagaatatgaaacttataaaattgatggtatgtgtatcaggtcagctggacacagtctgctctcattattcataaacttgcattttcttttcttttttcagattgaaattaataatgtgatggtagacaagaaaataaaaggcagatatatattgctgttaatttatattatatatgcagagcagagaagaaaaaaatatatgatatttatgcaaaataaaataaaataaatattatgaaaaatggaacctaatcagatttaattattgaattaaaattttaatatgagctcatatttattattgtgtattgttatatgaaattctatctacataaaatgataattttagtgattgtgaatgttgtgtattaaaatatcatgagttaattgtatagatattttaagtggttatttttaatttattgagaagttaaattaaaaatattaaaaattaataatttattagtttataaattggtaataatcttaaagataacttaatcatttccttctttcctgtcaagagaatactaaacaggaaaaagtaatttgtggtataaaacttaaatttaatttttggttgtaaataaattaattttttatagtaataaaatttaagttataattttagaatttgtgtagtacttgactgttaaatgttaagt

SEQ ID NO: 18004 - DNA, 2818 bp, Cannabis sativa
catattagcaagaacttgagtgaacaaaacttagtaaacttagtggactaaagtccaagctaacactaataattttcaaccaagctagaacacatgcttgaagtccaggagtagtgaatgagatattcaaagcaaaagtccacatctctatgcaagttcatttaataacaaagcagtaagtgacaagatctgcatatggaaaatgtaaccattcattgcctcattatgctaaaatgccaaacacatttgcatattttttgtataaaattaacttagaaagtaattgatgtctgaaaaagaactcttctactgagtgattcaaactttgtacagaagcagcaagaactaaattttaaccaatacgaagaagatttttttttaaaactcatattttataatgtaagtgcagattgacatacttagctgcataaggcatcccaacatggtacttctccttggagcctgtccagagtatggaattctagtatacgaatacatgggcaaaggaagcttagatgactgtcttttcccaaaagggaaaaccccagctatgccttggcaagtgaggtttcgtattgctgctgagatagcaacaggcctgctctttcttcatcagaccaagccagaacccttagtccaccgcgacctcaaaccgggcaacatcttgctagactataactacgtcagtaagattggtgatgttggattagctagacttgtcccagcagttgcagaaaatgtaacacagtaccacattacttcaacagcaggaactttttgctatattgatccagagtatcaacagacaggaatgcttggtgtgaaatcagatgtctactccttaggaatcatgcttttgcaattgataacagccaagccgcccatggggctggcacacttcattggaaactccattgagagaggcacatttcaagagatgctggaccctgcagtgactgattggccaatggaagaaaccttgtcttttgcaaagctagctttgcagtgtgccgaactgagacgaaaagacaggcctgatctttgtaatgaagttctaccgcatctaaacaaattgagagaatttgctgaagaaaacatgaacttcttctcacccggtgctggtttggtaccttaccaaaaccctgcttccattcatcatgtaagttatgaaaaaaaaaaaaaaaaaaacccaactattttctaatcatttaaccataacaaagtgaaataactacatatgttttaacataattaacatgaaaatatcacacatttgttaatctatatactgtatagaaacgtaccctttgaagatatgaaatgattgaaaaatttcttgcaggatgtgatgaatgaccagtttcctcgttctacctcatcttcagttactggaacccctacaagtagagagtgaggaagagcatttttgcctgaatttttcaagatttaaacaaatgtaaaggctgttttttataacagcacaaacttacagtgtacaaaataaacacttagtttcagaaaatgcatattccaaatttgtatattttcattcctgtacacaaatgactctgtagttgttcctgtgaacataagttggaaattttgttgttctttccattgatttttctattgttggttctagatatggagaagagcttctcaataaatgtaaagaggaaatgataaagactttaagtttaagttcctttcctgatagtcaaactttgttcatgttaatttgagttcaataaagtctttatagataataactacgataaacttgattataaagaaaatatcaagtagtgtactgaatacactgtacatacattactatatttattgagataaaattgtaaatgcaagtggaaataatttcctttgtgataaatagactctaacctttaatacttcgaaattcgaatcttctgaaaaataggcatgagagtagaaaccaaggtgaaaaggtatctaaatctaacattgaggataaaataatgaattgaaattctgcaaaaataattttagaaagagaaataatgacaacaaaaagaacaataaccaagaaaaatggatggaaagccattgattagaatttgatgtaattagaaattaaacaactgaaaataattaaggaggccaacgattaaaattgggtgcaatcagttcaatcaagttatgttctccatgaattcagcaaaaaaaaaaattatgtactccatgattgataatcgaggagtttccttatttcagtacttcataatgtctaatttttcaatttactttttttagtggaaaacaaatttccaacaaaggttttattaacctatccattttagcatttggtgtgtttattcatttgaacgtgggagagtagaggaaaaaataacgatacactaattatagaaggtggcacattccagaacaaaagacaataacacgtgtcctcttagtaagcatacgtgtgttacacagttacactcaaccactttgtttctacattctgcaacacattaaataggaaactcaaagcaaacaaaaccttagattctcttcactcattttattaatctcaccaaaaaaaaaagtagaatatatatatattataacgatgggacaaggccaagaagtgaagatcagacctgaatctcaggttcaaattcaggtgagtaatgttgtttgttgcatatctgtaataagaactttctttgtatatatatgaaaattaatttgtagcaagtattgtaggagaggggagagatattcttcttttacagaccaaaagtgaacaaagaagaggtgcacagtgcagatgagg

SEQ ID NO: 18005 - DNA, 1574 bp, Cannabis sativa
  modified_base (53)..(66): a, c, t, g, unknown or other
  modified_base (515)..(521): a, c, t, g, unknown or other
aaacttcaaaaactattttttgttttcatttctaaaaacaattttttgaaaannnnnnnnnnnnnncaataccaaacatgctctaaggtactcttgtaagaaaaaggaaaattagagttgaagtccacccaagagattgaaaataagtatagtttatcaatagtctatttttcatttctaaataaaatgttatgccacaaaaatttgcaggtactataattgtaatcatgtgtccatattaccataactttgtatctaatcatcttgttgattgtttgattatgaggatgatgatcaccacgatcctaacaaaaaccctcatatgcatattagaaagtttcatgttgttaatgtgttaatacttggaaagaaaataccatgtataagaataattattgacaattaattttgagataaaatttgacccgttttatcaaaattttaaaattagaaatgagatagtctaggaacttttggtttaaaaaaatttatatttactacaaaaaatcttactnnnnnnnacaacaaaacttgtgactaaaagttaaaaagttgtgactaattattaattatcattctaatgttgtgactaataagtccgtgactaaatgttgttttagtcataatacttgttgtgactaaaagtaaattagtaacaatttgtgtctaaatgctatgttttaatcacaagtagttttttattgtgactaaaaattatatttagtgacaaaaaaatttatattgtgataaaaaattatcactaaaaatagttgtttttttttgtagtgattctacatatattttcaaaacaagtgtattattttggcctttttgttttcttggaccgcaaaacaggccttgtataattgggctaattctctggtccaatagcaaaataaagtgatacacaacacttaccccttataactcaataatacttcactttaaaatatttgtgtggttatagtttctatttcttaattgctttttgatattagttcaaaaataaataatatattcaatcataattaatgtatgtgtaaaatgcaattttgttataagtgttttgttattatagctatgacacactcatctccaaagcaatagcttaaaaaatttgctaactctattttaacattatatatattattcattgattatctatttaataattatatttttgaggacaaaatataccgaaagaaaattatttgaggtttgcatgtgtgtttccaatgacatattaaaagtgaggttaacatttaagtactttcattaagagcaaagaatacaaatctttgttttaatttttttttaagacacataatggttgtataaacacggaggagaaattagactgatacaatcgatctaatagttgttgatctgaatgtgcagacgcttgctaacccaagagattcagctaggacggactccactctgattaatcctcaaccaccaacaggcccacaaactgtaggtcaaggagtgacaacccctctagcggggttcaccctaagtgtgtaagaaattggaactaccagtactgcaattgagcaaaccacccctggttt

SEQ ID NO: 18006 - DNA, 5522 bp, Cannabis sativa
  modified_base (1992)..(2001): a, c, t, g, unknown or other
gttttgctgtagcagaattactttctgctgctgcaaacgcttaccgtttttatattttcttatatacaactgacatttgtaaaaacacagtttttcagaaggcttcctgcaagtgctcttggattgtgatttaactaatatggacctgttgggccatccattcacttgggaaaagaatcatggttgtgacaatcggttgcaccaatactaaattgtggacgttaaatttgattgttaaactgtgattggttacccatatgaagatgtttggattgatatctctgttgctgcagagcacgatttacaagcttaggacatttatattttcaatgatatttcgtttgcaaaagctacactcatcaataccaatctttgtgcgagatttgttctcttatggaggaaacagtgtagtaggagagactgtcaaaatagaagaattgggtgtcgagagaatgtctttccctaactgagacttgagacgaatttcttctgttatcaattcactaactattgaaccaatcgaaggaagcggagaacgatgcaatatatagaaccacaatgtctctccaaatcactacgaagagccattaaaaattgaaccaatcattgtttctctctacgaacaatatatggtgcaaaagcatgtagctcttctaattcgatgagtgttaattaatcccagagatctgtcattatagaataaaattcttgaatgctcatatcgttttgttcaatagttgtaatattagttttcatctaacactattttgcaagatggtcctaaacttcttttgctatcctgtcctttgctaattgggtgtcaatagatttttcaacagagctattttaatacgaataattttttcctatccacatattttttcttacttaaattttttttcataacataattttaataccaataattttttccatctaatctcacactaatctcttaaaggaaattatctttattggtagtcattacaaaaataaacaaattacaaaaatctctaaatacaaaactgatgaaaatttaaaattgtaatgcaaatacgaaactcaagagaatcaataccaaaagttattaggcgaatcaagaaaaattcaaagaaatcaatactaaaaattgggctgtggagctgtacggacattgtttgaagaacaaatgtataatataaaataaaaaaatgatgtataatgaataaaaatgtttgaagtaaaataaaataaggaaaattttaatgaaggattttgaaaactagggtgaacttttgagaagactaatttggtacgtcgtattacatcagtttatattatacagtataatacaatataatacaatacaatttaatacaaacaagagcatctcttagtataaaaatagaaacacatgtcaccaaagctaactagctgtatttgacgttttaccagctagatctgagtcaggactcaggagcccacagtttagactagatagagcacaacttgtattgtataaactaaaaaagttgatgaaatgagaaagaggaaatacataaatgaataacataaatggaaagataataataataataatacaataaataatacataactcctacctccttttaactttgataggccaggaccaccagccatggccaaccagattgacggcttcaacttcgagcagaggcacggcaaagccagggtcagagtcgccagagtatggaggaacatagacggacgccaatccatcgtcgaatggaacgtcagcattagcctcctctccaattgcgccgcctcctatgttaacgacgacaactccgatatcgtcgccactgataccatgaagaacaccgtacgtatctccctccctctcgtttcctaatcctaacctttttggttctcgagaaatttaaaatctctgacttcaatttgactcccagattcaagtgcatcaaggaatttgctgtgttacttgtgaaaatattaaaaaaaaaaaaaaannnnnnnnnngagagagagagaagaaagaaaaagttagatttatatcaacctgattcaccattttgtctttgaattgaagcaaattatagtgtttgaaatttacaagtgtgtggaccaatatgttttaaaagaagcattcttgtttcgatccaaatgaatattcttgattcacacacagatatgtatttatatatatatatatatatatatatatgcgcgtgtttatgtggatagcactgatattttgcggtaaaaaaacaaatgagcgaatcatcttaataagaaatgaatgttatcctttatagcagtagagtatttccttcttctccgcttaaattttcaaggttatctgagattctgagttgctatacaggtctatgcaaaagctaaggaatgtacagagcaactctcagtggagaactttgcaattgaactgggtaaacacttcacatcatattaccggcaggtgaatagtagtaatgattctgagttgttatttaaatgtagtttagtatttaaagttattgttattcttttgattttagtactgtgctgtaggacaggacaagaatgtttgttgtatcagtatgtataggatggtccaaaagattttagtttattttatttttggcagatttctacacctgttttcagttatgtttcaaagaaatgttaatggcaatctatgccattgagattgaagaaacccaaaaactaccacaattttcccttctcttctctcctttacttgcctctttcttttgttttttatgtatatatcagtaattatttttatctgaagtacctaatatgggagtgattcttcttcatttgctaaatcttatatttgtaactatattttaggtacatgctgccatcgttaagatagttgaaaagccttgggagcgtatctctgtagatggtcaaccccatgaacatggttagttttgcagtcttttgttgaagaggaggtggggaagaaaagtataaacagtgatatgtgatgaattcattatatgataaacgccctctagtctctctacaatttaatttatgtaattacattttcatgttcatgctcatttgaaatcaattcaagctaaatggctttgtgactgaaacataaatgataacatcaagtgtgtgtgcgcgtgtgtaagagacagagagagggagagacaatagtgcttgatgaattaataagagcattagcaatcacttcttagttgataaagaattctttgctgggttgcttatttatcactgaattcctcatttttcagctgactttgcttttgaactgagagagaagttacagtttcactcattttcaggctatgtgaatgccaaaagtcttcaatagctttgtggttaagtttttgaaggttgaaatagtgggagaggactggaagtttatatttgggatttaacttaactgtttactttccatgtgattggacaagattagagccaagttggcagtagtgattcatttggaattattttcaattatatgctggatcagaatagtttttagttcgtttaatttaaggtagccttggtgatgcttgaaattggttatgctttcaagtaaaatactttaaggctaccttcctcttgctaatccgatcattattaaacctgtctttcccactttattcattcaacagaacggaagacttctctattgtttcaatcccagcttatcatattatatttataatctaatgagtaaaccgcctttctttaataataagatcaggctatgatgcccttccttcagacggttttagtttttccttgtatatattggagctatgaagctaacttgattattatataaagggggaaacagcttcttcagttcacagatcggcagtgcatatgattcattccaaagaagtaaaattgtactaagcaaatttaaccaaagaatatattttttcttggtgaactgaaaaattatttcaacttggattaatcagttttaaacaaaaaaacagttgttattatatttctatatattaccacatcttaatccttgtaaatgaataatttgaaacctcattatttttcttattattcttttataaaggttttaagcttgggtctgagaggcatacaacagaggtagtagtgcagaagtctggcatgctaaagttgacatctggagttgaaggtttggctgtacttaagacaacaaaggtatgtttatttcctaaatagttcttgcatccaaaataagaatttaagcttccttcattcttttcttgagtaagatttctaccatgtacagttaatgattgaaaataaaagattatccagtctcaactgctcattcaccaaaatgagtagcgagaaaatttgttagtaaaacgtttcaatggagtttggagttataatttggaaatatacaaaagaagacgattatttcattatttgatgcactaatttaaatgctgattgctttatattttttcttacctttatatgattattatttccatgagcagtctggttttgagggattcatcagggataaatacacaattcttcccgaaacacgagaaaggatactagcaacagaggtaactggaacgtggaggtatgaatttcatcctgatatgttaatttgattgacttatgattgaacaatcaatgtatttggttctatgatgccttgttataatttctcgatgtatatatttgaaagatatgatttatgtgatacacttaatgcaggtactcatatgaatctgtctccagcattcctcagaatctactgtactttactcagagatacatggacgtgaaaaaagtattgactgacactttttttggtcctccaaaagagggagtctatagcccatctgttcagagcactctttttcaaatggcaaagactgttcttaacaggtcacctattctggcacttacatgtggtgcttctttcatctatgacagatttatattaaatttcagtatttgtgttttcaggattcctgacgtaacgtccgtgcaactcaaaatgccgaatcttcatttcttacctgttaacctgtcgaacaagaataacagtatagtgaaggtaggcttctttttattgcttataatttgtgctaatttgagtggaagaataacatacaggtacttaaagatcatctatgcaattttccataaatgaaccttttcaaatggacaagctgacatctgtattgttattgtggcttgtgtaaataattcattaattggatgcaacagctggtgtgtttataaggtcatatatacattcttatttttcaaagggtactgaaatttctgttgtctctcctgggcttcagtttgagcttggtatttgtattttcggaggagaagaggaaaagttaaatgaagcccaagtttacttagcccctgggtggttttagttttaaacttttttttttgagaaaaggcgtttatattataaattaaaactgagtttagacctcacggtcattacataaaatagcttccggtatagaagggaccgg

SEQ ID NO: 18007 - DNA, 5538 bp, Cannabis sativa
tatttttagtttcaacactatattggtttgtttataatatacacattaaaatgttatattttaaattatatcacttaatataaatacaatatatatacataaaagttagaaaattaggcaacaccgcgcgaagcgcggcttagttctctagttaaataatacaacatacattgtattaaaaaatttggtcgtaataattaatagaatacattgctttatcgaaacgtagtgttatttattatttaatacaatacgaccctcatacggcataccaagcgagcccaaaaggtataagatatcaggcacaacaccatcatcatcagtggcatgaccgagaactagagaggttttgacacaatatcatgacagtatttattatttatatgtgtcaattcaatcctgaaatttcaatgcattcacttatatacaaggaaatttacaaagtgagcaagcattatctgtacacattttcgtcacaccaaaatacaattttattaaagctgtcctaattgaatctatttttccaaaatacctactctatctttattccaccaatgtcaaggttgtccagcttcttaggccgcttatagtacttcaagagcaaggagcagcaaacaacactgacagaggaggctgccatagcagctccagcaatccaaggcggtaatctaaatccggttgatgggaagagtgctcctgcagctattggaatgccaagcacattataacccaatgcccagatgtagtttagtcgaattctagaaaatgttgttctagagaggtcaatggcagttatcacatcctctaagttgctcttcattagcacaatgtcagctgcctcaatagcaatgtctgtgcctgcaccaatcgccattccaacatctgctgccaccaaggctggtgagtcattgatcccatctcctaccatggcaactatgtggcctgaagcctgtgaataagtaaaattgagtttaaacaatccaactttttcattagaggaacagaaaactatatagcaatttctacgtaggtgcccagagactcttgtgggagcaaatcacatgctttggtagtttatagtacattcatattgagcatacatgtcttacaaaaatttgccaggagttgagcaactacattccatatatgtgtgcgtatattatatctttactaggatttgaatatacatttatattataaatataattatatatgtacctgtaaatccttcactctctcagccttctgctcaggctttgcttctgccaaaactaaatcagcctcaataccaacttcattagcaatagaattggcagtgccccagttatcacctgtcaccatgatgctcgtaactttcatagacttaagaattgagataacttccctagcacctggtttaaggggatcagatatggctagaattccagctacttccccatctattgatacaagaatccctgtttgagctgatccttcagcttctgcaagtgcatcttcagcatctacgggaatggcaatgttgtggttcagcatcaacatcttgttcccaaccattatttctttgtttcggacagtggctttcactccatggccagtaatggagacaaagtctcgtgcttctggccagacatgattctcttcatcttccctgaactttttcgcatgctccacaacagccttggccaagggatgctcactgttcacctgattgatatcaccatatgagcattttaacaataagatagagaaatacttaatgttcaattgatttcatatttaaacatttgaatccatactaaagcactgtttccataaaattggtgagtcttgcacaacaatgacagcttacctcagtagcagcaacaagctcataaaattcgcgaagtaacatattcttcaggagttttgttttaacaaccacaggcttcccaactgtgagagtccccgttttatcaaatacaatgcaattaacctattatttaagaaaccacaagaacaagataagaaacactcaggttacaaacaataaagggaaagtaattagtgtttgcagtgaagtataaattctactatctagtacccactgaccttatgagcactttctaatgcttgaccccctttgatcagcacaccttgagaagcacctactccagtgccaaccatgactgcagtgggagttgctagaccgagagcacaagggcaggctatgaccatgactgatattccaaactggagcgcaagctcaaagctgtccatggaagatggtatccaagactctgggtagccatggtattttccagccaaaaaccaggcaaaccatgttaagaaagaaagcatgatcacctgcaaaataaagccacgcttttaaattttcacaaaccatgacctaagagcatagaaagacatttatatatctgaagtaaagtacttaccagtggcacaaaatattttgaaatgcgatcggcaaacttttgtacaggagctttagccatttgagctgactcgacaagttttacaatctgtgacagtgcactttctgatccaatccttgttgctctgatatgcaggacaccattctcattcaaagttcctccaatgactgaatcacctttcctttttgacactggccgagattctcccgttatcatgctctcgttgacatggctttgcccccatatcacataaccatctgaagcaacttttgcacctgggataattttaataacatcattcttttgaatcaacctgctgtcgatttcttcttcgttaatcacatttcccttttcgtctagagacaataaagttgctgtctcaggtgccaagtccatgagcttagcaatggcatcagatgtctttcccttggccaacacctctaagtatttccctagcaggataaacgagataagcattgagctagtctcaaagaaatctgtgcctttaaaatgtgatgaagtagcagctctcaaaaccgagtagactgagtagaaataggctgcatttgttcccaaggcaatcaagacatccatattagcagaaccacggcgcagggctttgtaggaaccagcatagaaccgccaaccaatgatgaactgaactggagtagacaaaacccatctcaaaatctctccaatacttaacatgttcacaactttagtatccaagccactcttaattccaggaatgtacataaaaaccatggaggtcagaaacactggaattgtaaagaccaaactccacatgaacgacctgtaatatttcttgatctcttcatttctatgagtttctctccctccacctccttcaggaaatatatttgccttgtaacgcttagacccagttgtctcaatcacattaatgaaagttctaggccctgtcatatcaggtttgtaagaaatggagatttttttcccttcaagagaagattcaagagcgagaacccctggaagggcttcaagagactgctcaataatcctcatgtaatctccagtttgtactccattgatttgcaggtctatcttgctcatgtcttccccagaactaagaagaatagcttcgaatccggtgtcttctatggcttgcaaaagctgaatgtagcttacaactttaggatcatactgaacatttgcttcctccgtagctaaggcgacttgggcctcttggacaccctgaattacttgcaaagctctttcaatggtggaggaacaagaagtgcatgtcatcccttttatacgtattcggcatacttgtgtggatctgtcattagtgtcgtactctggaatgagcgtagcttcaaatccaacatcatcaatcgtttcacgaatggtctcctcctgagaagtggtacagatgatagcatgatgattccgaataaatgagaatgacatatatcagcacttagaaagcaatccttgcattgccatgcagtataactcagcaagactatatacgaagtctatacacatcaaattctggtggaacaaacgacccaaaagacaaaagcagaaaaaaaaccaaagcaggtcagcatgctttaaaaagtttggacctataaactaaacaatgaaggccaaatcgccaaggtaccaactaccaaccaaccaactacccatacaggaaaaacaaaagtaccatgccgttaatcaaagctttaaacacgaaaagaagtcataaaacaacaaaataaaacagaatgggagttgggataaaaacagaaacgctgtctttttctaactcctataataatgataccactagcttcagttaaaaattcaagtcaaaggtaaaagttggtttgtgcgtagccttgaaagtaaagaaaactaccatatttttgtgggtcatgcaacaaaggaaatttcaaggccagaaaagaaaacaggtcatgggaaattgacattatctctcaattatctgagtttgttggaaaagcaagcaaaagttaggtgaaaaattgcgaactgaaaaagacagaaaaaatgagctatttcgtttttcttcttctttttcccctactgggagctaaatcagtacttcaataataagaacaatggaacaaacatcaaatctattactgaaacaacatacatatcataacataagaaccacatagttttactgaaaaataaatttaaatatataataaaatttcagttccagaaacaaacaaattaaaagtaaagacaaaaaaaatgatgttaaatctcatcaaaactagcacagtgatacgagacaaacagcataaatacaattatatatacattatggatgtatatataaaaggtgataaaatgtttgatcaacttacgttaacgaaatcagggaagaagataacttgggcgcggccattgaggacatctacggcggcctcacgaatccccggaaggcgcttgatggccttctcaactgaaccagcgcaggcggcacaagtcataccgacgacactgaacagtactttagcctcggccctggacaccgtggtatcgtccacggcggctcccttagggtatttcggcatcgacggataatgaggggtcggcgaaaggccagccgaccggctactgccgttccgatttatgcaacccaacgccaacaacttcatcgccatcggaaatgaatattaaccaaagaaaaggagaggtaatgtcaatggtgaaattaaaaaaaaaaaaaaaaagaagagggtttatatataaaaagttttgaaaaaaggagggtaatttaaaaaaagttatgacaaaaaagaaagagacagattgtatattaatttacactgacttgtcgcgtgttaaaattaattattatttttaaggctatttgtacccctaaaataataaatacacaacaaacaaaaaatataaacttaaataatttttaaaaattatttttaatatatttttaaattttttttcctcacatgttaatattaaacttattttagtttaacttttataatttttctaactcatgtatatacattttttattttttttaaaaaaattcatataattttttattttaattttcttgtcataatattta

SEQ ID NO: 18008 - DNA, 5942 bp, Cannabis sativa
atttgcgccagataagctttatcaacacaagattatgccataaatgtttcatcgttgaaataggttttgtcaacgtgttatcgtgaacgccaacaaaaatagttttgtcggtgcaaaaagatgtcgacataaaaggcaaccgctggtaaaatgtgtcacaaaaaatatttggaagacaggtttgttagaattttggaggattttgtcgacataaaaacaacaccgacaagacatatatatatgtagttgttgagcttatatggaatcaataccaatattggagacgattaaaacatatcacttacctttaatctgtcaaacactagggtgatgtctgtggctttgactttggaccagtctagaactcagcttggaatagtgtttcgagtgatgaaaaaccatatggttaaccaacatcttttcctcctcacttacaggcttcccagacacctcatcaaattttgtagtcaacttcttcaccttttgcttctagagtgcatcttcaatacacgtcccattataggcatgtgtaacccccttccccttgttcttccttatcgggcatgttgaagagcttgaagcagacatgttagaaagataatgtgaccagttctgaacacttctataacatttctgaaccgtgtgaccagttcgaccacaaagttgacagatgggtcgattgccattcgaataacctctgccaccaccattagttgatcgaccaccataggatcctcttccacgtcctcgagagctgtttgaatttccacagccattggtagtgggagggccagattggttcttcatgaattgggcataattggctgtggctcatttagatcaatggtggcatgagcttggtttgctttaattcgaatttcatgactcttgagcataaactgaacctcaacaagagtgagattgtctcttgaggtcagattgacaacgacagcttcatactctgttcctaaaccagcaagaacatataagatcaattgttcaccgagattgggtttcctgtagcacaaagaccatctgcaagattcttcatcttgaatagatattcatcaatggccagtgatcctttcttggtggattgaagctgattcatcagatgaatttgtcgagctccagatgcagttccaaacagttgctcaagtgtgttccagattttagaggaagtagcacaattgaacacatgcccaatcattgattcagaattagttgacattaaccaagaaagaagaaactgatcaagacgcatccatctattgaattcaggattgcttatcatgattgtggattctggagcttggcaaatccttgtctaaggccaattttggttgaggaggattccttcaagatcatgtgctctgattgcaggaagaacttgagatctccaaaagaaataattgtttcgattcagtggcaatggtggaacaaagattgtagttggaacaacggactggtgagctgcaggattggaggaggacgccatggaagttcaccgtcggctttgataccaagttgaactaagaaacaaagtgatgaagttgagaaagaaagagaaaaacgaatcttatttctgttgaatgaattagttagctacagatacaagtatttataatgacacatatacaagagctgaccaactaattctatatcataacaattctaactgtctaagcaacttcctaaccgttttccttttcagtatcaacatatacatataattgtgtataatgttataatgcatatatgtagttgccaaaaattagtgtaatgggcatgttctcatttatttttcttagttctttctataatgtttcattgtcgtctagcagattgttggttcacacattaattttgatcattgtaaattttggattgtctacaacatattatgactctcttttagctttatttttttccttatgcgttagcttataagaaaatcttactcaaatcaataataatattggtctatataataatcaaatatatgtgtgtagattgtttgcttttcttattgtttaagatatattgaaactaacttaaattaagaaattaacactagtgttttggtattgggcaatgttcaaaatccttttcgtaatgcttaatataatctgtgtcttggtcttggtgagataggatatccagtagaaagagtacccgaagaaaagatatgtattatttatatagatatatattaattgagattgattacttatttgccaagaaaactcaaaattttggttttggactaaagaagttgttcttggagttatatatattgtcctggctttaggtttggcataacttaagaaaggtaatacatatacatttgtctatgagtacccatgactgtatgtatacacataatataacgtcttatatatgctctaacttttcaattattgtatgttttttactataatgacgctttccaccgatggaaagatataagtagcaaaaatatcataaaagattctattaaatgcacgaaaaatggtaaaaaccacagctgtcaaaactatactatattaatgtattgatgtaattaagtatttgaattttatataatttaatttaataattttaatattactaacaatttatgcaaatgttttttttatttgacaaaatgtaaattttacactcaagactataaaattatttagctttctaaacacaaataacagattatttgcttatttattttttaggaaagttgtaattttataaatataataagaaaaaaaaaaatgaaacacctacaaaattttatcaaaatagcacataagacatttattataactttaacttatgtttttttttttttgatatttcagagcgggacttgaactaggtcctctttatgaggagaggtgtaacacttgattatacggatatttttatgtttattttaatccaaaataaataaaataaagaaagtaaaaatgtttactacagtttttatgggaaatacttgatacttgttaatgttatttgttcaatttgagaatcaatttttaatggatgtcggcatacacatatagcagttgactggcaggaagctacttacatgcatagggtcaattatttggtgcatctttcatcaacatacgatctgagatggagtaaataattaacgcagtggtggtttatgatcaatttgcttctaaattacttgtacaattttagtccaaacgaccatcaccactgccaccataccccttttgggggcaaactcaaattaaatgttgatggctgaagatgttcatacaaatactattgatgttgttgcagctgttcacaatatccaatggaaatgttcttgttgcatttttatagtcgatagttaaaccattttgcattacatgagatatggaagctaaaactgtgttaatcatagtttaagttgggctctctaattacaattgccaattaaacaagtggaaagatatcctttactcgtttctagtgatttgaatattcatttgtatatgaaatctttatattgagatttaatagctaacttatcttgttgtaatttatcctctcacaaagtttttgttgctcaggttaaatggagtgtcaacgtaaatacttatgatttggctaaatatgttttactgttttagtgttaagtaaagatcacacttaattagttggagaaaatccatgaaaggatgtcattgtaaatgattctcatttatatttatctcaaaaaaatataaaaaataaaaaatgtaaaattgcgattactaacactttctacttaattgaacaactagttaataatgttcatatgacttaattggtaaaaaaaaaacatataaattaacaatctttacggaagattttctttttcttccatttttcattttaatcttaacttaatcttttctagattattttcttaattagatttattttttaattttcattaatacaattactttgtttaagtgtgttttctggagattttttgggattattactttaggacaataccatttctagtttttttttttatatatatattgtaatacaatacagtactgtggctctcttttttgtttctctgttgacaaaattgtaattctgaaacaaaattctgaccaaaaagttgatttgcgaatattaagaaccgattgtccaatgaaatgttgccaattcagctcaatgtggaagatggaattaaaaaatgaatatgtactaatttatttatttcttaaaagaattaaaaaaaaaaagagtagttactggtgtggtgggtgcatttctgagtgggaccagaaaagttgtgcatgtggacactttccagaaaatatgaacgttagaagatctcacaaaggagaaggaaagagaaaatgagcgccaggcgccgaaacttgtgcgtttttgtttaagtgggccccactgcaaactcctgcctgtcactttcgaaccctttctcaccacctgggaccgcctatagccggtgccggtcactccttgtttttcttcctttatggaaatttaatgtattaatatttccaattttataaaaaaaaaatatattatagtacgattttgtagtcttacgaaaatattgtgtattatagtttacgattttgaattaatgcaaacatgaattctattcatttatgagtgtcgtaatgactctaatatcaaatccaatactagatgataaagatgaaaaataaatatgttattatgttaaacaaaatcaaatctaactaaggcaagtatgttatgtttgggatgaattgaaattggcaaccggttgagggagtaaccggtcagcgaacgcgctaaggcccaaaaataaataaaaaaaacttccataaacggagagggagaggtttaagagaaagaaaccaagtgaagagacagacaaatagtattctcatcaaaataaacacctcagagaccttacttttcttctctccaacacctcagacaaatatatacatatatacatatatctatatataatatactgcaaaactcagtcagtctttgccttggttttgataaatgtaaaaagacaaagaggactgaatttcttctcatacatatttatatataaaggatttgttttcctttatcattcgtaaatttagcttactgggcggctttcaatggctacgcttaagggctctgtgttgtcctccgtttttgggttcgtctgcattgttttgttctcaaatatctgtttcgccgctgaccccaccatttcttacgagttccatatctcttacatcactgcttctcctcttggtgttcctcaatgggtttgtttactttctccctctgccttttatgtaaatcattgtatatgtatgtttgtattacttcccttttcggcttactttgaatttggtttttgttctgggtggtaagaggaaaacattttcatatcacttatcagcactggatccggccggtaggaaaaccatttttgaaaacttcttactttaacatatatatatatatatgatatataagtataaggtttatgaggtccaaaaatcgtatatattctgattgtcagatattagtatgggctttaaagggttgtatatgttttcttttaaagtaaatatcaaatgggtttttgacattttcagttttggttcatcaaccttgttttaggttctgcaaatctaatctagcatctaatcttcgaatataatataatattattttatttgagggtcaagtggaggactggagttttttcactatacttgattttcattccatatttcattgatttattgatttttgagtggcaggttatagctgttaatgggaagtttccaggtcctcgaataaatgccaccacaaataataatgtccttgttaatgtcttcaacaaattggatgagaatctcttgattacttggtacgcttgcaaaaaaaaaaaa

SEQ ID NO: 18009 - DNA, 2808 bp, Cannabis sativa
  modified_base (2780)..(2782): a, c, t, g, unknown or other
aagtccgtggtcattttccaagtacgagacttcagcttcaaccatatattatgactcatctggtaatcaaggtcaattatcttctcatccctcttccttgactaatcatagcaaacactcttcgaaatccaagtgtttcactataaatacacctcagaagaacactaatatgagcacaagcagcacaatgctggaaatggaatcatctcgcaatttgagtgtcaattcttgctgtatgaaacgaagaaagtccatttgctcttcacctgtgatttgccttattgatgaagagcgtgatgcttttgatgccaatccttctgacagtacaactacctttaatcaaagttctatagccaatggagatgcaattcgaagaattgattttactgttgagactcccaattcaatagaaggaaagtccgagtcaagtgttccccaactgctcactatgaataattctactgcaacttctgaactcatagtaatgaacaagagactgctcgtttattgctcacactgcaaaaatgctttgggtcttcctgagaatcatcaacaagtcacctgctgtttaactttattgtccaaaattcagttggaatctcttcacagaaagacaatgaaaattgagtctgcaagtaaatcaaaaggcgtacatgttcttgtaacggatgcttcgtcagttcatcaacaactctgcaacagtagtattgaaggtgattccgagcagcagggtatatggtgtgaaagagatggatgtgtattcaaagccatcttctgccccttgtgtggtacggacaacaattccattggtgtacaggtcctggcaacaaatgcatctaatcttcatctacttaacaaggtaggcctttcataaaaatgcctacttaggcatctctttactaaaagttgctttctgttataagcatgctgtagacccaatatttggttctgcattataaaaataaatgaataataaacatggaaataaaattgtttagcacatagttttgttcaaatatattttaccccttacaataatgaaagagaactatgtcataaatgagagcatacttctatcattgagaaggtgaggactctaagcaattaggagcaatagagctatgggaaaatatgagctctttgaatttggtgcgattttcccagctaatttgtttactcggtggtacgattcttccaggtgttgctttatgttgatcagttagaaattaaaacctttgaagcatccatgcacaaggattcaaatgccaaggtaaattatttgtatggtggttcgtgaatttatggaggcatgaggaatgatttcatgattaaatttttcatataattaattttgtaggatgcgttgcccattagaggctcgagcatagataaaggtgcaactcagaactcttctttcgacaaatttgcatatattcccgactcatcagaaggatggagaaccaccagatccaaggttagaagttaattaaacatgtatataaaactcctttgtagagtggtacagtactgtagtgctgttgtttgtttcattcatgtaattcgtttctgacacgcgaagtgctttggtgcagttaaaacttccaaagaaaaggacacctgttaatgcagatgaggatcattcatgatagctttagcttaaatgtgtgcaaatgtaacaatttgtagtgatatatatagagagagaaagagagcatgtggctcgattggcaagatattggctttattgcatccttgcttagtcagcaagcaactgttctctgtttcattcttgcttactagttagcaatcagcaccattattttgatggtgtttgtacattaataatctaataaatgaatttcagttattgtgtagaaattgaatgatcaacactgttcattaattttataagaaaagcaagatatactatttcctttttatattatgtgtatatattcatatatattatattatagcacaactaaattaaggtggagtttggttataaaataaaaatggaataggaatgggaatagtaataagaatagaaatagatggaacgaaatttctattcttttgtttggtaaagactatgaaattaataattgaataagaattgtgatgtttggtatattatgaaatgaaatgaaaattttattattttgaccaaaatattttgcactcttttaaaataatttttgttttataaaattactataaatatttaagtatcaatataaatgttattcatataatttaatcatcacacattgtctatttatatagttataataatagtgttgttttgctataattttgtacaaaaagatatatatattattgtaatattaaatattgtagatatatgttttaaaataacaaagttatccatataattataactttaatcatttatataagagaagggtagatagggcaaaataatttttagttggcatgaaatgagttttcgagtcattttatttaggaaaagtaattccctaatttacatgaattataattcctattggaatgagttttccaataacaaaccaaacacttgaatgattgtgggaaaattactgctagtggtacaaaatcaaaacaatgaaattctatattgggttgtctgccctaaataaaatctatttcaatatatataatcagatttactaattaatatagaattagaaattgcttttatgttacatggctcacatgtttatgcttaatgtataaattctattaagtttagaacatatatatatatttgttcatgnnnatagtgtcgtcagcacagtgaaatat

SEQ ID NO: 18010 - DNA, 17524 bp, Cannabis sativa
  modified_base (7164)..(7165): a, c, t, g, unknown or other
  modified_base (11672)..(11675): a, c, t, g, unknown or other
  modified_base (13411)..(13426): a, c, t, g, unknown or other
  modified_base (14556)..(14556): a, c, t, g, unknown or other
caaaaagctgttttttgactgtttaccaaacacacttttatcacagctttttcaaaaagcaacttttagcttttccaaaagctgtgccaaacgggccctaaaactatgtgtatatatataatcatattttattatacatatcaaactatatacataacaattagttaaaaagattagatgtacatatatattatggatttattttcttaaaactttaagggagggccagggccattccaccctataaagtgtctctgcccttgtatgcccagcgtccaagttgacatctggagctagggttatagttttctgctccgtcttagtgtagatagctcaaaatttgtacttatacatgaataagacctatcatttgcatgatagaggcatcagaatcactttcggaacacttcacgtttgaagcacctgggcacccaaagcccaggttgacctggtggcgcacccagcgcccaggctggaacacttcaagtcactttcctagagatgtttctcaaaaaaattctccttcttcatccaaaatgaagataaaagtccatcaaaaaataagatacgagtgctttcgggagataaatagattcgtttggtggccaagaagtcgacccagcacccatgttgacctagggctgggctctagcgcctaggttgacactttgtcaacctaggccatttccaaggatttttcccgggaagtctcctagaaattttctttgttttcattaataacgaagatacaagtgttctcggagagcaaacgagagcatttgggggccaaaagatctgaccaatgcctaggttgacactgggattggtcttagcatctaggttgatattcaacctggtgcgcatggttctgctactctaactcaaacttcgctacaagctttcttagtccaaaatgggggaggagccctcgtttgctaattcaagtatcatgggagtaccaaaacaacatcccagagacctggaaacagaacccgagtgccatggttgacatatgggcctagtgcgttgggttctcttatctgattcttgatctatttcaagcatcgagctattttctgtagtgaacaagacatacgacgtgacaattaagattcacactttgatatttcacctattcaaaaaagtgaaatattagtcaactagtcgcaaattaggaagttccgagtctccaaattttgcaaaaatacaaaacacccaagagctagtgaacgacttcaccagaaccaagaaattagataagtggtgtcaatatatcacctagacttcaaaaaatatggttcttgcatgatttcccaattgtctagcacccaagttgacattagacaacttctcaatcacaagatttccaacctgggtgctgggtaggagtgtttgtagtgcgagtggtgcaagttgtaacatttttttaaactatcttctcttattttaattccatgcaatttgatttaattttgtaattattgactgataattattatctatgaattcgaattaaaatttagaaatgtgaaatttgaatatgctttaatttttatggatgcaaattgatttatgacgaaagtatctagattatttgtatgattttatgagttgctttgtttaatattttctttgtgattaaactttaccaaatgaatataggaagttttcacatagattgggtttgtaagtcttaactagattatgaactacttaattcaacttgtcaattgaatagaaagaagaaaaattgggtaaatacattaagaagtaaaataaaggatagttagggatcataataatccttatttttctcattgtttatttctctaatttttaattatttgctttgctttatttacttttctccaatatttttattaatcaaatagaaataaagaattaattgcttggtaattaataagaagtccttgtaggaatgatactctactttgtcattatattacttgattcgattgcgtatacttacgtactaaatttatcaaacatcatctgaagttaaatttgagcatctcagacattagatcacaatcaatgattaagatcaccttagatgaaatatttcagtgtttttaatattttattatgattttaatggacctctttgcctataaaaggagagcttcacaagctcatttttcatattttgctgtgtctccataaagtgaaagcatctctctctagtttctttatctagaatctgagatctgttgcttagctaatttttttgtaattctcgtgagaaaaaaattctcaaaatagacgtagctctattatcatcgcgatatagagaatgaactactataaactcttgtgtctctctatttatatttacttaactcattacttatcttgccaatctagcaagacaatattagccaattttctaagtcaatagtttgtttagtttgaaactataaagtaataaatatatactaattttaatttctcaataatattttgtgttctaaatgttagagatttattatatcattgaagaaaattaagataattacaactcaattataaaataatacaaagattcaaaaaaaaattaataccataagtgttacaatatttttacacaatatatatgtatatacgtaaaagctagaaagttagattacacatatgttatatagcacatataatataataagagaagaatgtgactcacaaccttaagtataaaatagtgagaattaccatgacttgaacaaagtttatacctttgtccaaaaatttatttccctatctttaaacactaaaggatttttccaaaaaataactttaagaattatcaaaccttatattttctatcaagtaccaagtgcttgttgacagaaaatttcatgtccaaaatgagcactttagattcttttatatagtgtttaggtgatcacactaaggattcacacactcaacacatcatatttgtttaatgagttgaaacgagcaatgaatgccaaggttatgtgagaatgtaaatcttctttgttattgaatcttagttcaaaagaaacttcttagtagtggatcttgttttatatctttatgtttttccatatttcctaatgagtatttattggtgaaaaatcacgattattgtcctccaccctattaagaaactttactaaagatagacttcattactctttatgaaatttatttattcattcatgatatattgtaccataatttcaattctttgcattctgcattttaatttatatcttaagttaatattgtaattgaactctcattatacataatgtaattactagaaactattgatcttattattctaataagtcatcttaaggatggactaacatactcataaaagatcaaatagttcaacatgtatgttgtttagcaattgtaagcaattactaaataacatgacttattagaattttatcaatggcttatggattattaatgattaattatgtattctcaataaccatttaaacctgagggttgttgaaaatcacaaataatctaatacttaaagtggaagtttaagaaaatgaatgatcatttttagaaattagtttcctatatcgatcgctctcaccggtcaagtcaattcttaattttacaattccagtgttgtgggatggataataaaatatgtaacccttagaccttataacatttttgatgaaaggctcatttatggtatttgggctcatttctttgctttgacaattgtactttaacggtatacgagtttttctaaaatatataaatatcataaagtcagtttccaacctcatcacagctcaaatatgtttgagaaataaatttgattagaatacgatttgatatgtacactactgtagaaaagcatcaaccgacaaagatttaggaaagtttaaagtttgctattcagactccacctcaagttcaataatacttagattcgtaatattgtcacacactattatttcggtgtaccaaacataacatattgggcatcgatcccatgttttttaagaaactttgcaaatggacttggagtttatccatcctcatgaaattaatatagtattctctatgtatatttgatctcactatatttatatgtaaaatgacattatttttctacttaagatttaaatgtctttgaaacatataaatctttacttttgtagagatataatttatgtgagtaatcattaataaatgagataaaacttttagtgaaatacgagtctagatctacatgtgttaattgacttgtatgatttcaaatatgatagaattttaatgtgcaccatttcagcttgttggtatacttttccttaatacaatccaaataagctctaataaatttagtacaattaagtgtaatgagtattctcactatttactaatatttattatatttatggaggtatgttctataatttttggtatcataatgtagaagaattcttattaataacacacttcttattgctagattgaacttgcatatctttatgagtgatatcatttttcaaattaatgtagtaaagacctttaaatatgtatctaaataaagtttgtaaggaaacttggagcatttcaggataaaattttaataagtttttctttactcttacactcgttattgttgtcttaaaatctcaccttacacatctcgaaaaatcgtgaaatttcatagggaggaagtcaagattgttgtccatcattttttatttggacccgtggagtggaaacatagttttcaagcactaataatcatttttatcgaaatagtgaaaatctcactttttagatagtggtacacctctgtgaaatgtggtccagacccatctcagaatatttttacacggtaggcacaatgaatttgtactactaaatgtagataggtttcgcattaaatttatttaaaatggcccctaattaaaaaatcgaaaatgttcttcttttcagggtaaattgtaacaagctttttacttacttttacacttgttagtgttctcttaaatttacacctacacatctcgaaaaatcgtaaaatttcacagaaaggaagccaagaccattttctatcacttttttatttgacacatatagagaaaacgtagttttcaagcactaataaatatttttatcgaaatagttaaaattttacttttctaatagtggtacccctttgtgaaatatggtttggaccaatctagaaatatttatatccactaggcacaatgaattcatactactaagacatgaatatgtagataggtttagcattaaattttccccttacactagtttgttttatcttaaatcgcaccatatacatcttgaaaaatcgtgaaacttcacaggaatgaagtcaagatcgttgtccatatcttttctattgcacacatggagaggaaatatagttttcaagcactaacaaccatatttattgaaatagtgaaaatctaacttttctaacagtggtactcatttatgaaatgtggttcggaccaatctcgaaatatgtttcccagctaggcacaatgaatttgtactactaaaatgtaaatatttagatagtttatgcattaaattttattaaaatggctcctaatttaataattgaaaataatcttctttattagggtaaattttaataatttttttccttactcttatactcattagtttcctcttaatatctcgctatatacatcttgaaaaatcgtgaaatttgatagaggaagtccagaccgttgtctatcacttttctattggacatgtggagagacaacgtacttttcaagcaccaataattatttttatcgaaatagtaaaaatctcacattttttatagtggtactcctttatgaaatgtggcccggaatcatcttggaatatttttccttggtagacagaatgaattcatactactaataagatgtgaatatatagataggtttcatgttatatttgtttaaaatagcaacctaattaaaaatttaaaaatattattatttttcaggataaattttaataagttttttccttactcttacactcatttgttttatcttaaaatcttagcctacacatctcgaataattgtaaaattttacaggaatgaagtcaagactgttgtctacatcttttttatttgcacacgtggacagaaaacgtagttttcaagcattaataatcatatttatcgaatagtgaaaaatcttacttttcttacagtggtaccccctttgtgaaatgtggcccggactcatctcgaaatatttttctcagctacgcacaataaacttgtactactaagacgtgaatatgtacatagtttttgcattgattttttttttaaaaaatgaacttctaatttaaaaatagaaaatgttcttctttttcatgataaattttaacaagtttttttcatactcttacactcgttagtgttctcttaaaatctcaccctacagatctcaaaaaatattaaaaattcaatagggagaaaaccaaaactgttgccaattacttttctattggacacgtggagagaaaacatacttttcaagatcagaatagtaaaaatctcacatttctaatagtggtactcttttatgaaatgtggtgtggacccatctcgaaatattttttcccactaggcacaataaattcgtactactatacatgaagatgtagataagttttgcaataaatttggttaaaagggccccctaattcaaaaactgaaaatattcttcttttaagggtaaattttgacggttttttccttactcttacactcgttaattttctctaaaaatctcaccctacacatctcgaaaaatcatgaaattctacaaggaggaatccaagaccgtcgcttttctatgacatgtggagaggaaacttatttttcaagcactaataatcacttttatagaaatagtaaaaatctcacttttttaatagtggaacccatttgtgaaataagatacggaccaatctagaaatatttttacccactataggcacaatgaattcatactgctaagatatgaatatgttgataggtttagcattaaatctgtcttaaatagcctctcaaaaattaattttttttcttttcattgtaaattttaacaagtttttttcttnntcttacactcgttagttttctcttaaaatctcaccctacacatttcgaattatcatgaaatttcacagggaggaagccatgactgtcatccatcacttttttattagacgcattaagacaaaacatagttttcaagcactaatattcatttttatcgagatagtgaaaatctcactcttctaatggtggtacccctttatgaaatgtggctcagacccatctcagaatatttttcccgcaaggcacaatgaattcgtactactaagatatgaatatgtagatagattttactttaaatttgtttaaaatgacccctaattcaaaaattaaaaatattcttcttttcatggtaaatattaacaagttttttccttactcttacactcgttagtattctcttaaactctcaccctacacatcttaaaaaatcatgaaatttaacagggaggaagtcaagattattgaatgtcaattttctattggacacgtggagaagcaacgtacttttcaagcactaataattatttttatcgaaatagtaaaaatctcacttttctgatagtggtactcctttataaaatatggtgtggactaatcttggaatatatttccccgctagacgcaatgaatgcgtactactaagacatgaagatgtggatacgttttatgttaaatttggttaaaatggccccctgattcaaaaattgaaaatattcttcttttcaatgtaaattttgacaagttttttctttaatcttacactcgttagtatccttttaaaatctcaccctacacatattgaaaaatcgtaaaatttaacaggaaggaagtcaagactgttgtatatcaattttccattagacacatggggatgaaacatacttttcaagcacttatattcatttttatcgaaataacaaaaatctcacttttctgatagtggtatcccattatgaaatatggtgtggacccatctcggaatatttttccccgctaggtgcaataaattcatattactaagacatgaagatgtatataggtttcgggctaaatttggttaaaatggccccctaattcaaaaattgaaaatgttcttccgtttagggtaaattttgacaagttttttccttactatttcactcactgattttctcttaaaatctcactctacacatcttgaaaaatcataaaatttcacatggtggaatccaagaccgtcatctatcacgtggagaggaaacgtacttttcaagcactaataaccatttttatcgaaatagttaaatctcacttttctgatcatggaacccttttgtgatatatgatctggaccaatctaggaatatttttagccacaaggaacaatgaattcatactactaagatatggatatgtagataggtttagcattaaatttgtctaaaatggcaaattgaaaaatattcttctttttagtgtaaatttttaacaagtttttttttactcttacactcgttagttttctcttaaaatctcaccctacacatctcgaattaatgtgaaatttcactgggaggaagccaagaccattgtcaatcacttttttataggaaatgtttagagaaaacgtagttttcaagcactgataatcatttctatcgaaatagtaaaaatctcacttttttgatagtggtacccctttgtgaaatatggtccgaaccaatctagaaatatttttatccacaaggcaaaatgaattcatacaactaagacgtgcatatgtagatacgttttgcattaaatttgtctaaaatggctccctaattgaaaaattgaaaatgttcttcctttcagtgtaaattttaacaagtttttttcttactcttacactcgttagtattatcttataatctcaccctacacatctcgaaaaatctcaaaattttacacggagaaagccaagaccgttgtccatcattttctattggacacgtggtgagaaaaagtagttttgaagcactaataatcatttttatcaaaaaagtaaaaagctcacttttctgatagtggtacccctttgtgaaatgtggcccagagccatcttgaaatatttttccctgctaggtgaaatgaattcgtactactaagacgtgaagatgtagataaattttgcattaaatttggttaaaatggccccgtaattcaaaaattaaaaatgttcttcttttcagggtaaattttaacaagtgttttctttactcttacactctatagtttcctcttaaaatctcatcctacacctttcgaaaaatcgtaaaatttcacagcgagaaagccaagactattgtctattacttttttattttgacacgtggagaggaaacgtagttttcaagcactaataatcattttcatagaaatagttaaaatctcactttctaatagtggatcactttacgaaatttggcccggagtcatcttggaatattttttcttcgtaggcacaatgaatttgtactactaagacgtgaacatgtagataagttccgtgttatatttgtttaaaatggccccctaattcaaaaattgaaaataatattctttttagggtaaattttaacaattttttccttactcttacacttgttagtgttctcttaaaatctcaccctacacatctcgaaaaatttagaaatttcacagggagaaatccaagactgttgtccatcactttctattagacaagtggagaggaaatgtagttttcaaataatcattttattagaaaagtaaaagtctcactttactagttagtggtacctctttatgaactatagcccggacccatctcgaaatattttgtcccgctaagcacaatgaattcgtactactaagacctgaagatggagataagttttgcgttaaatttggttaaaatagccccctaattcaaaaattaaaaatgttcttctttttagggtaaatttttacaagtttttttcatactcttacactaattagtttcctcttaaaatctcaccgtacacaactcggaaaaaacgtgaaatttcacaaggagggagccaagaccgttgtctatcacttttttattttggacaagtagagaggaaacgtagatttaaagcactaataatcatttttatcaaaatagtgaaaatctcccttttctgataatggtaccccttagtgaaatgtggcccgaagccatctcgaaatatttcttctttataggcacaataacttcgtactactaagacgtgaatatgtaaataggtttctcattctatttgtttaaaatggcccccttattaaaaattaaaaatatcattctttttagggtaaatttaacaaatttttttcttactcttacagttgttagtgttctctgataagctcaccctacacatctcgaaaaatcttgaaattacacagggaggaaaccgagaccattgtccatcacttttcttttggagacgaggagagaaaatgtagttttcaagcactaataatcgtttttatcgaaatagtaaaaattttacttttctgatagtggtacccttttgtgaaatgtggcccaaacctatcccgaaataattctcctcgataggcacaatgaattttactactaaaacgtgaatatgtagataggtttcgcattatatttgtataaaatggccagccaaattcaaaaattgaaaatgttattcttttcatggtaaattttaataagttttttccttactcttacactcattacacatctcgaaaaatcttgaaatttaaccgggaggaaggcgagattgttgcatatcacttttctattggacacgtggagagcaaacgtatttttcaagcactaataatcatttttatcgaaatagttaaaatcacacttttcttatagtggtaaccctttgtgaaatgtgacccgaagccatctcggaatatttttcttcgctaggcacaacaaattcatactactaagatgtgactatgtaactaggtttctcattcaatttgtttaaaatggccaccttattcaaaaattaaaagtgttattcttttcaggataaattttaacaagttttttttactcttacacttgttagtgctctttgataatctcaccctacatatctcaaaaaattcatgaaataacatagggaggaagccaagaccgttgtccatcacttttcctttggagacgtggatagaaaatgtagtttttaagcactaataattattttatcgaaatagtaaaaatttcacttttctgatagtggtacccttttgttaaatgtggtcaaaactcatctcgaaatatttctcctcaataggcacaatgaattttactactaaaacgtgaatatgtagataggtttcgcattatatttttttaaaatggcccacccaattcaaaaattgaaaatgttactctttcatggtaaattttaataagttttttccttactcttacactctttagtgttctcttaaaatctcaccnnnnacatctcgaaaaatcatgaaatttaatcgggaggaaggcaagattgttgcatatcacttttctattggacacgtggagagcaaatgtagttttcaagcactaataatcttttttatcgaaatagttaaaatctcactttttttatagtggtaaccctttgtgaaatgtggcccagagccatctcggaatatttttcttctctaggcacaataaattcttcctacgaagatgtgtatatgtggataggtttcgcgttatattttttaaattgcccccttattcaaaaataaaaaatgttattctttttagggtaaattttaataagtttttcccttactcttacactcgttacagttctcttaaaatctcaccctacacatctcaaaaaatcacaaatttcaccgagaggaagccaagactgttatccatcacttttctattggacacgtggagagaaaacgtattttcaaacacaaataatcatttttatcaaaaaagtaaaaatctcaattttttgatagtggtactcctttgtgaaatgaaacccgctagacacaataaattcttactactaagacatgaagatgtagataagtttcacgttaaatttggttaaaatagccccctaattcaaaaattgaaaatgttcttctttttaaggtaaatttggacaagttttttccatactcttacacgtgttagtttactcttaaaatctcaccctacacatctcaaaaaatcttaaaattaaacacgtaggaagtcaagaccaatgtctatcacttttttattttggacacgtggagaggaaacgtagttttcaaccacaaataatcatttttatcaaaatagtgaaaaccttacttttcttatagtggtacatctttgtcaaatgtggcctaaagccatcgcgaaatatttttcatcgataggaaaaatgaatttgtcctactaagacgtgtatatgtagataggttttgcgttatatttgtttaaaattcccatcttattcaaaaattgaaaatattatcattttcagggtaaattttaacaagcattttccttactcttacacttgttactgttctcttaaaatctcaccctacacatctcgaaaatcttgaaatttcacttggaggaagccaagaccgttttccatcacttttctattagacacgtggagagaaaacgtagttttcaagcactaataatcatttttaccgaaaaagtaaaaatctcaattttttgatagtggtactcctttttcagaatattttttctcactaggcacaatgaattcgtactactaaaacatgaagatgtagataagttttacgttaaatttggttaaaatagcctcctaattcaaaaatttaaaaggctcttcttttcaaggtaaattttgacaagtttttttccatattcttacactcattagcttactctttaaatctcaccatatacatcttaagaaattgtgaaatttcatagagaggaagccaagaccgttgtatatcacttttatattggacacatggagagaaaacttacctttctggtagtggtacccctttgtgaaatgtatctcgatatatttttcctcgataggcacaataaattcatactactaaaacgtaaatatgtatataggtttcacgttatatttgtttaaaatggtcacttaatacaaaaattaaaaatattattcttttcaaggtaaattttaacaagttttnnnnnnnnnnnnnnnntcgttagtgttctcttaaaatctcaccttacacatcttgaaaaatcatgaaatttaataaggaggaagccaagactattgtatatcacttttctatcaaacgcgtggagatgaaatatagttttcaagcattaataatcattttttatcaaaatagtaaaaatctcacttttctgatcgtggtacgtctttgtgaaatgtgatgtggacccatctcagaatttttttcctgataggcacaatgaattcgtactgctaagacatgaagatgtagataagtttcgcattaaatttggttaaaaattgggccccctaattcaaaaattaaaatgttctacttttctgtgtaacttttgacaagttttttccttactcttacactcgttattttcctttcaaaatctcaccctacacatctcaaaaaatcgtgaaatttcacagggaggaagacaagatcgttgtctatcacttttctatttggacacatggagaggatatgtagttttcaagcactaataattatttttatcaaaatagttaaaatctcgcctttctgatagtggtacccctttgtgaaatgtggtgcggacacatcttagaatattttttctcgctaggaacaataaatttatactactaaaacgtgaatatgtaaataggtttcgtgttatatttgtttaaaatagctccctaattcaaaaattgaaaatgttattcttttcagggtaaattttaataatttttttccttactcttacactcattggtgttctcttaaaatatcaccctacacatctcgaaaaatctagaaatttcacagagtgaagtccaagactgtccatcacttttttattggacacatggagagaaaacatagttttcaagcactaataatcatttttatcaaaaaagtaaaaatctcacttttctaatagtggtacccctaaaatatggtccagaccaatctaggaagatttttacctactaggcacaatgaattcataatactaagacgtgaataaatagataggcttacaattaaatttgtttaaaattgcccactatttcaaaaattgaaaatattattcttttcaaggtacgttttgacaacttttttccttactcttacantcgttagtgttctcttaaaatctcaccctacatatcttgaaaaatcatgaaatttcacaagaagaaagccaagactgttttccatcacttttttttttggacacgttgtgagaaaatatagtttttaagcactaataattatttttatcgaaatagtaaaaatcttacttttctgatagtggtacccctttgttaaatatggtttgtaccaatcttgaaatattttttcacactaggcgcaacgaatttatacaactaagacgtgaagatgtagaaaggtttaacattaaatttgtctaaaaggtccccctaatttgaaattttaaaatgttcttcttttcagtgtaaattttaataagtgtttttcttactcttacacttgttagttctcttaaaatcttatcctacacatctcgaattatcgtgaaatttcaaaatgagaaagccaagaccatcgtctatcacttttctattggacacattgagagaaaacgtagttttcaagcactaataattatttttatcaaaatagtgaaaatcacacttttttaatagtggtatcccattatgaaatgtggcccgaacccatcttggagtatttttctgcgctaggcataatgaattcgtactactaagaagtgtcacgttatatttgtttaaagtggcccctaattttaaaattttaaatgttattcttttcaggataaattttaataatatttttccttactcttacactcgttagtgttctcttagaatctcaccctacacatctctaaaaatattgaaatttcatagggaggcaggaaagaccgttttccatcatttttttatgggacacgtggagagaaaacgtagtattcaagcactaataaatatttttatcgaaatagtgaaattttcacttttctgattatggtatccctttgtgaaatgtggcttggacccatctcgaaatattttcctgctaggtacattgaatttgtactatacgtgaatatgtagatatgtttcgtgttaaatttgtttaaaatggccccttagttcaaaaattgaaaatgtcctttttcaagggtaaattttaataagttctttccttactcttacactcgttagtgttgtcttataatctcaccctacacatctcgaaaaatcgttaaatttcatagggaggaatctaagaccattgtctattacttttctattggacacatggagagaaaatatacttttcaagtactaataattaattttatcgaagtaataaaaatctcacttttctaatagtgatacccctttgtgaaatgtggtcctgacccatctcagaatatttttcctctactcacaatgaattcgtattactaagacgtgaatatgtagataagtttagcgttaaaattgtttaaaatgaccccctaattaaaaaattaaaaatgttctttttttagtgtaaattttaacaagttttttccttacactcacaccattattgttctcttaaaatctcaccctacatatctcgaaaaatcgtgaaattttccaagagagaagccaagatcgttgtctgtcacttttctatttgacacgtggagagaaaacataattttcaagcactaataataatattatcgaaatagtgaaaatctcacttttcagatagtggtacccccttgtgaaatgtgacgtggacccatctcgaaatattttttcttgttaggcacaataaatttgtactactaagacgtgaatatgtagataagtttcgcattaaatttggttaaaataaccccctaatttaaaaactgaaaatatataaccattttaggtttttagttttaaaaactgaaaacaaacgtgtgttctataaattttattttctttttcaatattttattttatttaagtcgggtctggatttgggtcggggtcggggttcgggtctggatctcgttctggggctgcttctaaggtaagagtttgggtccaggtccgggttggggtctgggtcagtggccgaaatcgggatactggtctgggtctagggtcgaggcaagaatttgggtttggatctaagtccacgcccaagatccaggttagggtcctagtccaaaatattgattaagaaaaaaaaatgttgaaaagaattttaaaagtgactttttgtttgttttcaaaatttcattctcaattaaaaaattaaaaagtgcaaacaatcttatagaacatgtttttagaaaatatttctacttttttaattaaaaaataaataaataaataaataaaaattattaccaatgcaccataaaatatatataaatatcttttgtatatgtacatacataatttaattattctttattattaaaactttaattaaatatgttatttttgtttaaacaaataaaatatttaattggttagacaattatatattagagtttgttcaaaattataagtaattttatgtagtaaaatgtatgcgagatcttgattgacaccacttgaataaataatattttttgtaaatattttatgtttatttttatttttaaatatatgaaaaaataatttttttttaattttatgtatgtataattattgcttttacttattttaaaaacttaaagagaaaatataattttatctatacatacaaatatttggttatctaaaatatattcaaaattttgagttatttttcatttgttaaaaacctagtgtagaattttaaatgtaataaaataaaaattgataccaaaattttagcttcccatttatgataactctaattttatatttattttcttagttcttatattttcttctttttttttttttttttggtttgtcatgttcggagtatgtgttttgttcttttcctttttattttttttaattttactattttttagggaaattaccccatatactatttttttttttaacttttttttcaaatttacggttt

SEQ ID NO: 18011 - DNA, 3091 bp, Cannabis sativa
gtgtgaaagttcttaacattactcaattaaattttagctatcttgatcaatctctaatggagtggatggtgataattttgtgccaaatttgactttatatgagttggtccatttttttacaattgtgtttatacaattgtgcaaattaactcgaaaaatcaataaaagtcatttttttattgaaagtatataaaatgagtattaaatagataataaaaaatttaatagctttgaaattgatagacaacatttgtgttaaaaagctattttggaaagttaattttctcaaattcattccaaccatactctctatgttagcacatatttgtaataatttttcttttttataaacttgggtttctattttttattaaatcatacatatttaatgattaatttgattaataataatgataaatttgattgccttacccaaaaaaatgataaatttgattaaaaaaaactattaaaatgacatgatttttttaagagctctctacatttaactagccctttcatgactattttggagagaaataaagaatggttggaatgttactatttatatttcactccctattattctccaaaagctttctaatctctataatagctttttagctataatagggaatgaaataagcactctaaccccaccttgtatttactctccaaaatagagttataaaggagttagctaaacaagctcattaagtatttctcaaatttttttaatagatttttaatcaaacttatccttttgcataatagaagtttaaatagataatatacattagctgaaatagatagcatggttggaatgaagttaaaaaaaatctctaaaatctaaacaatttttggtttctcttgttaaatctagagtctaaatacttgaaagtcgttggagatgcatctaaattaaccccactccctattttagctttagctaattaaaaagtaggtagatagtcgaattgagatgctcagacaagacaaccctcgcaaccaaatttcacaagaaaatgatacaaagcagaaaacttcctcatgtaatttggaaagttgatatttcactaaaaactttctcatgtaatttgcaaagtttatatttcattaacccagaaaacgcgaaagtttagaaagaggtaacaaagtaaatcagtacctgggatagtaggtggagaaccctgcggcccataaccaagtttagctggtattctcaactttcgcttttcaccaacacacattcccaacagtccttggtcccatcctacaaagaagaaaagcatgaatacattgattcattcatttaatgctcattcatgacagatcaaaaaacaagttaacattaatacgttattactgcagcacacacctttgatcacttggccagagccaagttcaaattgaattggatcatttctgtcgaaacttgaatcaaaaacagttccatcagtgagtgtcccctacaaatgcaataataatataatcataatgaataacacttgttcataatgggattcgaaacaagtttgaaaacggcgaaaactactggtatcaatatctgcatctaagcaaaagagctatttcacttaccttgtagtgtactctgatttgatcacctttgtgagcttgaatttcgcaagattctggcttatactgcacaaagaaagcaaaattaagtatggtggtaaaatgggaagacactatactctcttctaaaaaaattactacatttttaaagacaatgtagtaaaaactgaatggagacattttattacacaatcaagccaaatgtacccaaaacataattaacaaaaaaaacttaacttgttaatccgaacgtcactcaataaaaaccacaaattgcagcaaattaagaatcaccaaagtaattacgtacatatctaagaaaaatcaaacaaaaccataattttccctatcacactttaatctcgctaaactgagatcggaagtgttccaaaagaatcgcctatactacatccgaataccgcaacaagaaatgagcaaaaataaatataataaacaaattaacgatattttaccttcactccaatctgcaactcggtgacatcgcgagaagtttttcctgaaactgagaaaagaaaaaaaatgtaatcagattaacgaaattaaacctacagaaggaaaggatcatcgaaccgaaaatcatcattgcaggcctggtttcagatctaaatatgaaaatacaaagataaaataagaaatcattgaaaagaaagttgtggatcttagaagagagatgatacctaatgtagagagaaggaagaagaagaagagaacaggcgtgagcttgagtgcagtgatggaggtcatcttcttcttggccaatttctctgtaactgcttcagtgtgggtttcgctcaaaggcaggagaatggagtatttatattgggtgtgtgtgaatagtattattaactattgacttgttctcatgctatgctctcattggttctccaacgtcacatttaagcttacgtggcacttaccctatattttaacagcattcctaataattttttttaacaatgaagaaactttcattaaaaaaaatggaaaatcatttatctatactagtttccactttaagtacatgcatagttaattcataaataattttattatcaagaatagctcaaaaaaattgaacagaaaataccatctaaaagagaatcaaaatcattacaaagagaatatctcttagcaaagacagaaatcacagctaaacaatcagatttaataaaaatcgatacttaattgtatatgacaataaaaaaaaaatattaagcaccattaatttctattagcatttctcgtgttttagctcttttcagtgctgttgaagctattttgttcttctgttggacttgattggggtcttacagtacatgtgaaatcttagtacaaatattttaatagttctattgtccaaatttatggttagttttgattcatctatctcaaatcacaagatcttgagctagacaatgaattatgtcagttcaaaagaggaggtttttgcgcgcacaagtagtgtcatccctcatag

SEQ ID NO: 18012 - DNA, 4075 bp, Cannabis sativa
tagggcacaaaacccaacaagaggatcattggctccttggttttcagatcaaatcctactcatcctcttcccctcctgacctgtctttatcttatttcatttctccatatggtgattgggagaggggtaagttacaaaattattttgatagcacgcttattgttgaaatccttcatctcccaatctctggccaaaatcgtaatgatacgctgatttggggccctgatcccactaggcttttcaatgttaaaactgcttaccatctagccctcaaatctagagatatgcctacctcctcttttgtttctagcaagtctttctggtcaaaaatatggtcttttactgcaccccctaagagatctggcgtgctctttctcattccatcccttttgcctcctctttattttttagacacatcattccttcctcagtttgcccaatttgccacttgaaaacggagactgtggaacattctatcctaggctgtcatcatgcaaaaaaagcctggaaacattcaaaaaatttcagttgttataatacacataagggcagtaatttctacttgtttattgctagtgatttagatttacataataaatttgatttggctctactattttgtttcatttgatcaatctgaaatcaacgcaatattatttttcataataaaaagggtttctctccacagcaactatttgggactatgtcaatgcccatgatgaacagctgaagtcgtctactcatgagaaaagcaaaaaccagcaagggccttgacttccccctggacaatgaatagttcatactgatgcagccatagattttggcctcaagaaacacagctatggagttgtatctacagatgttgatggtcataccagagcaggttttgcgactccttgttcaggtgttattccccctgaggtggcagaagggaaagcaatcctagcaatcctcaaatggattcaagcaatcaagcttcctgtgtcaatcattgcctcgaaagtgtagtagataaactacacaactgttaatgtaataattatgttcttagtgatgtggttaattgtattaaaaataacttgcttatagtttatgtaccatgagacagcaataagatggcacatcatcatgcgaaggcatgaatagaattagacaatgaatgtacttttttttataagtgacaatgaatgtacttaaaatggttctctaccttcctcattgacctcattactttgtactaaatttctatttatcaatgaaagttctcaggttttatcaaaaaaaaaaataaaagaattagttcacaatatgctcagttcatgaacaccatttaatttgaattcaacacctgtgactaacaatgccactgcaatattagaaaatgaacacgtgatataagtaatgaggaattatggacgaatgaataattttgaatctatcttccaaacatatactattcaagaataatttatttattttggtgttccaaatgatgatactcatccatgtcatcttactcatccaagcatcatctttcaaaaaagaaagtagtgtgaacttttctactctagcaaaaataactactcgcatttcaagttaaaacggtccaaattgaacataaattaacaatccaaacaacaatctatgaaaaggagaaaagatcgaccataggcaggggaaaatagtgaaagaagatgcaaaattgtttatgtaataatgtaaaatgtcgtttgaccaactacactaagaaatctagaatactgaggttcataactgatagataataaaaactcttgttgaagggggaataagagaaagagaaggggattacagacaacaagtcagaactcccagtctcccttctcacacttgaaatgtccaaaaagaaaaacaaaactaacaccaaaacaaaacaaagtctcaaggtattcaaacgcacaaatattgaatcactgtgacacgccgagccatttggtgaacacttcaaactcggtgtagtcagaatctgagatcatagtttggtaccaagcctttcctgcggacttgatggcggcagcttcctcctgatttattgacaagaaagtaattaacaactagtcatttgaagagaggtcattacactatcacaatgaaaagctttttaactaaaattcaataaattgaatcattataatcgtgaatataagagaacaaacaaaagacaaaccatttataaaaaaagccactcgaatgtaaaaacataagtaataaaaatattgcggcgtaaaaactatatatcagactgtcgtgacaaaattaagtatacacatttggcaattgttatgattgtcaatgaacataaagcacaacaaaatgcattgttagaaagtctcgctaatacaaccaatcaatcaatcgtattaaaatttaaccaatagataatactttgactgcagcattcaatctcgataaaatcacatcatgtaaagaatcccatttggctctacttataatctaacaaggcaataacagcacagcaaagcatcaaatacaattcaatttaagaaatcaaacatattagaccaatcaatgataattttagcttaaatgaagaaaagtattagtattaccttagaaatgggctttctcttctgctcgagcttctctgccttagacttcacacgttgagcctcagccaacaaggacatcctctttgcagtcttggcatatgggttaagcttcaacatggcgttgaggtttttcagagggttcttcttcaatggtgccctcttggactccttcttaatcggccttacaacagattgaacctcatcagagttgataattctagccaaatcagcattcaccatcttagacctaggcagcacgtatgatttcttcttcaaggaaagcttatcaaatgaaccatagatcgagtcaagcttctcaaaagcagacttggtccagattacaaaccttccaaggtgacccccaggggcaagcttaagcaaattaagcctctcaacattaacgatatcgacaccaggaatgttcctgaatgccttgacaagcttcgcaccctcagttccataaacaataagaggtcccttacggttaatgtaacgacgattcctcatcttacccttaccaggacgaatcgaatggctgtccttagccttctcagcatcttcataagcgccgatctgcttcaagaccttaatggccgcagatgtcttctcgacaccctcagctgcgtcacttatgaccaaaggaagttcaggaacagactccactctgtgaccacgagccataaccaaagagggaacagcggaagcggcaatagctgaaacgacggcgtaccgcttctgattcacattgatctttctatgccatcggcgccagatcttggtaggagcgaacatgcgtccaccacgacacatgttaccgaaggctccctgtccagcacggtgagtaccaccaccagggacacgggggatacgagaaacagcacgaccggttccccatgactcggcggaggtctggtgaccagctttcttgctcacagcgtaaggctgccttttgttttttgagatattggagtggacgaagttaacgatatcaggacggatcgaggccttcatgacgtccggtagtgggacggttggtgcagagtcggtggccatatcgccatcaagggcctgaaccgtgactagaggtcgagcagcggctgtggcggccattgataggatcttcagggggacaaggggaagggggaaggtttctagggttttttatctgtgaaaatggtagggtttggagaaaaaacgatcattatataggtagtggcagaaactagggctgtttgggtatggatttctcggcctcttagtaagctgtttaaggctttgggcttgtgtgtacttcattttgggccatcaaaacaaggtatatcaatttgccactttaacattcaattacagatatttacctgtagtcacttgtatttctttattcctttataaaaaaaaaaaaaaatataggaaattagactctataccctttttatattgtcttcttttatttttaccttcttttt

SEQ ID NO: 18013 - DNA, 5174 bp, Cannabis sativa
taaatttgtacttgttaagagtttcatacacagcattactaaaagaactcactaataagcaaaactatacaagaataagatgtatattttaaatcgtataactataaatctctaaaaccaagagaataaattgcatgcatattatttacatattcaaagttataatagacaaaaaaaaaatagcacataatatgaacaattttatgttttaagttgtaaaagcaaaaatagttgaaattctaataataatcatgttatacttttgatgtttagttgcctttgtgctgttgattatcagagacagagtcatcctcttatgtatacagtatagggtaactatggccaccaataagaatatcttttttgtttttaaattctcttttcattgtatttctttttctaattttcttcaaggtttatagtttgtcccttttaattttaatttcttccttctactccattgctccgtccttttatctggtgtcgttggcacaactccacattaggaggtgttgtcgtaccatttttgtaattagttatctcacaccaccacaaaaatacatgaatttatttatgcggaataggaactcgaagcaaaggtttattcttttttacttcactttcccagttgatgtgaacatgcctataaagatattccacaatccataatgttaaaatggtactctctgcctatggacactggacacttcacaaaccatagtagacaatggactcctttctctgtgacttttgtgcgtttgtcattggatgcctataacatgataaagcttgccaaattcgtactcgtgaagatacgtgtacatacgattccactatcaatcttagtagcacaccaacataattttcctttcagagatggagggacagaaaaagaaaaaaaatgaaacaacaccaactttctaatattctttttttattaatggaataaaaagattccaacataaattagaaagtacaacaagaaaaagaaatcaagccaacttcaacatccccaactctatacatgcgcgaggcagtaaaaagttaatagaaacagacatcatctccaccattactttttgtacaacattcaaccatattgagtatttgagcttgaaaacatcttaaagcgcttcagcatctactcaaatccttctatctgcaaggaatgaaagttctgttttttcttaaaaaagaaaaaaagaaaaatcacataagcatggaaaactttatgaactctaatataccaaagtcctattttacttggtacctaaatggtttcacaaaacaatgccttgaagcagagatagcaaaaattattatgaaactatggccatcaaacgctacactgcattgaagaaaatagtcaatacgttcggttgaatgtttcaacctttaacaacctcaattctagaatgatctttctaactatgacttacttagtagtgcctaaacatacttggtatgctgatccttttctatccaacaaaagagaaacaataccccaaaaaacttatttgcagaggagacctgttgatctgcttaggtacaacctcaaaccttgcaaaaatattattgcctttcaaaatcactccactcagttcttgtttaatcttcaaattccactcacccaactcatattaaaaatctatcccacttagttttatttcattcagtataaagattagtaaattatgaagacagctttaaatgtagtattgtaagttataacaatccttaagtccctgaatcataccctatttatgttttttagttgcagcattcagatagtaaaacatttgaagataatatcaccctttactagagtatcatttcttgaatgaaacacataagggatttattacaattaagaggcagcgtcatctggtttcctagaattgttttagtaattaattatgcaatgaacatgatatgcaagtgcaatatatgtttatttataagaaaccaccaataagaatgttcattgagaataaacggtgtcaaccaagatggtgagccaaacaattcaggatgcttttttctctctctcaataatatatctttagacaagcatacgacttaccccaatttactttccattcaaaagtacaatagtctacaactaaaccaactgcttacctcctttcaaaaaaaaaaaaccaactgcttaccattgaaaaatacgaacacatgtatgacctctctgtccttatgcttccattaagaaacaaaatgactaactttttcataaaaggtctataaaaaacagagcacaatataatttctgttacaaccgagacacctaatttcaaaatttatatccgtgcttggccaaacaaagttcaagtgtggaacaattttgacataaagccttgacatcaaaattgttgaggggaaagctagtaaaaacaattaatttttatggatatcaggcctactaaacaaaagaggaaagggccacttcggtgataatagccacaatcatttgaaacagaccaacaaacccaatactcactgtctggtctggcattatcacttctgaaatcagatgtttctgcatgaaatataacgtttcatactttacgaatttctttctgcttcgaagtataggcgcaaagcttaagcaaataaagtatttgttttggctacattaactagccgaaacaaatgcccaatcagctaaaaataactacatttaaccaacaaacccagaacatgtaatgtaatttgtcattgaactaactaaacacaatgcaattcaataattttactaaaaaatgtagatttcaaaagctaggaaagaatattagattagagatgaacctgtttagttttccaaagcatcgtgaaactcttggtcgtcctccgatttacgagacttaagatcagaagcaccattcccatccttgtcttgggcagacctaaccacaataacgggacaaacacagtgatgaacacagtaatcactaacgctaccgagcttagcatcggtctcacgcttggaggcgccgaagccacgactgcccgtgatgagggcactgagaccaaggcgctccacctccaagcaaagccgctccttcatatcgtgatccttcacaacatggatcttataaggaatcaacgccttctccagtggccgagcgacgtcgttggctttagacgtcgtaaacgcatcgaagtcgttagcgagcttccgcttcgactcctcgtcgtcgtcgtcgttggccaccgtcgcatcgacggagccccaatccgcaccgtataggacgtcagtggggctgacgtggacaaggacgacggcatcaccggggcgaaggtagttctgaacagcccatttaacggcgaaggcgctctcatcgctaaggtcaacggctatgccgatcttgcgctgggctcccgcggtgggggtcccactagccgggaatctcggggaagatggttgaacgagtattgcagtggccgtgaggtctgattcggcagtgcttctgggggatgtcatggcttaaatttagtatttggattaaatttttaaaaataataatgtaatggattttcggattgggggtttgtagttgtacttgtttgttcttctttgaaggggtttgtttgggtgtcggtttttggtttgggttttgggtttaggaaaatataataatactaatattaataataataatgttattattattatttatttttatattttattttataagagagagattgtgtttaggatatgataaggaccggaggaagggaaggaggaggggcctacttcattcaatgctgctgcaaagcctattctttattgttttatttattggtgctgctaaaacatattcatttgaaagtttattaacacatcaaaagaagaagaatttgagtcaatttaaagccctattattagcctttaggtaaagcaaaaaaaaaaaatcaaaccattaaaatgtcaaccaaaatgttaatgctgatttttaatggtttatcagtttgtctaatgttgtgaattctatgagataatcttaagtgtttggctggatgaaaacgtccttgccttgcgtaatttttgaaaattaaagtgccttcatttctgggcggcttctccatgacaactctattattggttttgaatatatataccttcatgtgctatgaagaaatatcagtttggcaatggggacaaaatgatcttaaagcttatgatgtatcgtttgggctttaaggagggatgcatccaaaagattatgcactcggttcgcttggtttcattttctttccttatcaatggaggttagaattagaattattctgaaaatatatttttgggttggattgtaaatgagtctttttaggacccttgttaattgtataaaataaagttatttttcatcattaatattttagatttgtgtaagtttagagtttttaaagtttactttgttttgtttgttttattcattttgtttaattttaatattaatttgttattttagtgtttttaataggaaaactttataagaaaaataaagctaaaattttaaacttgaattgaccatgaatagattttagaaaaaattaaaacataataattttagattctttctcagcaggccctcaaatatgggccctagaaaagataatttttttttgagtcttttttataacaataaatgatatttttaaaaaattattaaaaaatacatatatttattgatttttttttttatttggactcttaatatgagtggccccgcatgcctagcccgccttagtctaggatcggctctactgagagaggtcaaagtaaaaaaatatatagacagcaagtaatctgcgagcacaagtcttttacatgcaaatgcaggtctatgggggttgggccttttaattacggaattagagttaattagatcgaattttaagggctttttaggcaataaatgatagaagacattggagaacaaaaaacaagaacaaggaaatgattggagatgaagattggagcaagacaactctaatctaattttttttttctttctctcatcttttaatttttgatttttatatgtcttctagaaatattattaaggatattttattgtgataatgaactaaattctatttagggtttctaattgaatctcttgaagctttattatgaattaatggaattt

SEQ ID NO: 18014 - DNA, 3320 bp, Cannabis sativa
agagagagagagagagagataagtagtagtgcaccacttgtaaggtgattaatttagcttacatgttttcctgtttcacgcaaagcaaagtcattttgacttgattctttcttacccaccatttacttccccactttttctcttctatattacacttatgtcccaaccctccggtttcctcattcaaatatataccactctctagagtcatttcctactcacatttgctctcaaacaaaactcaaagagagagagagagaaagacagaaaaacccactaactagtactacttctactctactcctacgatggccaaagagtttcagaagaacccaatgttcatagaacaaaatcatccacaacctcaccacaattctgccgttatagaaaacggtgactttcgtaagaacgttgatgaagatggccgccccaaaagaagtggtatctactcaatactcaaattccccatttaccttttaattttattagtttcagggcttattatgtatatatatttatgatttaattttgttacataataataatgaagggacatgggtaacggcgagcgcacatatcatcacggcggtgattggatcgggagtactgtcgttggcgtgggccaatgctcagttgggttgggctgcaggcccagctgttttgatggccttttctttcatcacctatttcacttctactcttctagccgactgctacagggccccagaccccgttaccgggaagagaaattatacctacatggccgccgtgaaagcctacttaggtataaataaataaataaaataacattggatattgtccataaaaatgaaacctcgttcaaaacgagaatacacaatgttttttaaaaataattaaaaaaaaatgtatatcatatttaatgtgttgtgattcccaatagtattataattcatttccctatgcggcaaaagtaaatattatcactcttttttaaagaaagtagaaagaaattttagaaggattcttagataggttcaaaaatattaatggggttgtgatttttatttgggcaggtgggagaaaagtacagctttgtgggttggctcagtatggtaatttggttggaataacagtcggttacactattactgcctctatcagcatggtgtaagtcaactttgtgttactcaatacatattttacgttacatattaattaattactagagtggtagttatagtaattttggtttgttatgattaatttattgaaatgaaaaaaccaataatatttcagggctgtaaaaaggtcgaattgctttcacaaagagggtcactcggctaaatgttcaatctcaaattacccgtttatgataatatttgcttgcatccaaattattctgagtcaaataccgaattttcatgatctttcttggctctctatactcgctgctgttatgtccttcgcttactctcttatcggagttggactctccatcgctaaagttgtaggtaagtaatagattattaatctgcagaatattaattaattaatgtgtggttcgaatattaatacaaatatattcacttttttttttttttgcaaaaataattgaataatgaatgacaaatgaaggggggacgcatgtgaagacaaccttaacgggagtggaagttgggatagacgttacaggatcggagaaagtttggaggactttccaagccattggagatattgcctttgcttatgccttttcaactgttctcattgaaatacaggtaaaactaaaaccttttctagtccctattcaaaagaagcttaagacatacatatttatataaaaattgaagtatatatctatcgttaatattcgtattttttatggaatgaactatggaggtctttttctatttctttccaaactttagtgaaccaaccttttattattatatgtgcctatgtacgctctcttttactataaatgcgatgcatgccttttatattattgcaatttgcatgcaatattgggaaatcgtcctgtcagataaagtaaagcactcaagatgaaaaggaattttacatattcttcttctttacctataacatatatattaatttaaagactttatttttattttttagtgtgttatataatatttattatgcacatatgtgtagaaagatgtaaccttttttttaaaaaaaaaaaataaatacttattataagaacttcacatggccaaacaccaccgtgtgtctctgggcagcaaagtcagtttttatgtttgtgcataatatacctctcaaaagacaactaaaagaagtaagaacaactgttacaaacacgtggcttgtattcttgtaggagaaaaacatacttaaatatgcatattattacggataacacttatcaatacaacagtgtattaattccacctcgtaagcatccgtagctggtgcacatgcacatatatataggtagatattgggtcaatccttttttgtctgcaccctctaaagaagtagaaaaataatttataagacatatcaataatgtagagcaacaataaatatattattttgactaagacattcattttaatatacatatattggaatgtgtgccatgctgagcagttagtgtcggcatagcaatgcatgctggtttttggaggatatataacattatttgctaggtgtcacaaaaccaatagttgcttgtttagataggtatttacatgtatgtataatatgcaacaattatacaagtacaaccccattagtattgataacaattgtttgtttgtataaaatttatgtggtttagcacaatataatagttgtgtgttgtggggtcgaagctactcttgtcctgtgactgttctagagcaagttgccaattgggggtagtgaggggtttgattgaaacctgtccatgtcctcaataaatctgattgagcttaaccaaaataatgtaatgtaattaaaaatacctgtggggcccacttgtcagttttgtaattgttaggcatgcaatattttggaacgagatacagccgatgaagacagatagaagaaactagaatgcaaacaaaagactatcacatgataaaatcgtttgatgttactgttttttttttaataattttgaaaagagattattatattgtttcattgagattgggagtcatcttgtgtgatggggctttggtaacttctggttcgtgaatgcgaaagaagtgaaaatcacttaattataaagattttgttttcctagcctgttcaatacacacaaaagaaacaaacaaaaactttcattacattattattattattat

SEQ ID NO: 18015 - DNA, 3055 bp, Cannabis sativa
gataagattggtgggaatctccctaatcagccttcaatgtctttttttgccaatttccttattgaatatgctatatttcctcttccttatgttgataatatgtacacttggactaataaaactattagtgaaaggttagattaggtggttgttttagagtcttggtgtgatctctatcgtgataatactcttcaccatttaggttatatggttcagatcatcgtggcttaaagcttgttttagctaatactagctctaatcctattaattttgtgaataagagatctaagtttgaaaataactggcttgatcatcccaatttttataagcttgttgacactgcccgaaatgtttgtcctgctctgagtcagcctaagaaccacttccatagtttcatttccaagcaaagccactgtattttttctcttaaaacttggaataaaaataaaaatcacctttttaagactaggattcagcaccttactcatgatataaacaatattcagaataaggtggttcttagtgatactaataaaaattgcctcactcagctacaatatatgttagatgtgatgttgtataaggaggaattttattggaaacaaagggctagaattgaatggcttaaggttggggataaaaatactaaattttcccatagatatgcttcctttcataagaaaaccaatagtatcaagtacctcaagattgaggatgggaatgtggtcaatactcaggatggtattgttggtttgataacctcttactttgctaatctattttcttcttaggggagtgatatttaagttgttgcttcaatttttgcttcttagggacctggtcttgaggaacaggatatagggatcttagcccaggattttactgctgatgaggtgcggaaagctatcttttagctttctagggacaaggctatagatttagatggtcttaatgcatacttttaccaaaaaaaactagtctgttttgggtagggattttactaatgcaattctagattgtcttaataagagagttgatttcactaatgttaattctacccatattgttataattcctaaaaaatagcatgctaatatgttgaaggatttttgacctatcggcctttgtactacgttttacaaagtcatctaaaaaaacccttgcaaataggctcaaactgattctcgataagattatatctctcccttttagagtacgtttgtcttgggtcgtgtcatttatgataatattatcattgctaatgagcttgttcatgctattactaataggagagttggtacgagaggatgagctgcactaaagcttgacatagctaaagcttttgatcgagttgagtgggactttctaacgaatctcatgtttcattttaacttcgttgttcactttgtctctctcatcttcaaatttatttctacagcatccatctctttttccattaatggccatgttcaaggaactgtcaaacccacttgaggtcttagacatggagatcatttatctccctatttgttcattctttgttcagaaggccttttcacaattcttaggaattatcaaggtaggggtctccttcgaggcattgtcatttctagaaatacccctcccataactcatctcctttttgttgatgataacatcttgttctgttctgctgatcaaagttcctgtgatgctttaaatcatgcacttgctatttactctaaagttcctgggcagagtatcaactttgctaagtcctctattttgttttcacctaacactagcactgatatcaaggaccttttctttcacacttttcaattagaaaattggccttttatcactaaatatcttggtctgtcgcagtgtctctctcgttcaaaatatcctgctttcacctttctcatggataaaatatcctcaatcattcactcctggcgtcataaatggttctctaaagtaggcaaagaaacccttatcaaggttgttcttcaagttatcccctcttacgatatagcttgctttcgtatacccacaaacatatgtaaggaaattgaatctcttgtctccaaattctagtgggggtcctcggttgaaactcgtaaagtccactggaaaaattggagggttgtttgccaatccaagtttgtgggagatctagggtttagctctttaattcatttcaatcaggccatgcttgctaaacaagcttggagaatccttaagtgtcctgattctttgcttagtttaaccttcaaagctcgatattttactaatacctcaattcttaaggctgctcttggccatagtccctcgctctcctggcgaagcattctttggtgtcatgactaaatgaaacagggcttatttagaaggtgagtgatggtaagggcattaaaactataaaggatcattggctccctaatgttacattcaaatcatactcctttctttcacccgagcccaacttgtcttattgggatttcgctaagctccatcaatattttgatgatccaattgtagataatatcctcagtgtttcaatttcaggcaataattgcaaggatgatttaatttgagaccaggatcttttaggtatttttgatgtcaaaacaacttaccacctggctctcaaatctagggatttgccttcttcttcctcaatcgaaggacgtaaacaattctagtcaaaaatttggtcgtccattgctccacctaaagttaagcatttgatgtggtgtgtgcttgctcactccatcccaatcgccttttccttattctctcaacatatcattccctcccctatgtgccccctttgccaactgaaatcggagacaatgaaagacgctatcttggaatgtcataatgcaaaaaaaaaaaaaaaaaaacgcttggaaatactttactttttatactaaacataaggattatgatattgatatgaacattactaaagcatttgaattgtatgataagcatactttggctgtgttgttttgtctaatttggatgctatggaattaacgaaataatctttttataataaaagaggtct

SEQ ID NO: 18016 - DNA, 6365 bp, Cannabis sativa
ctatttagttataacctcccaattagaatataatttacttggtcccaagtgtattcttgaatagaggttctactgtactagcatacttttggttgtgttgttgtgtgttaattaaagattacttaattgatattagcaaaaatacttttttttttttaatggagaatcttcatcaaacaccaaaaccctagcaaaaatacttagcacaaatcttacaaaaaatgatcaaacaacgaaagtaaaggaaaaatcttctaaaagaatagaaaaagactatccaaataagaaaaagattgatcatgcccctaaatacaaaccaaaccgaagtaaatcgccttttgaagttttttacacataagcgacgaagctacaaattgcttcaccaaaaatacaatgccttccgtgtttggtagcggaagttatggattaataaagcggattttccattaaaaaaaaattatacatattctaattaaaaaaaatattaaaaactactcatttgaagtgtaacatttttattattgcaattaaatattaaattttatataatttaatataatagtttttatgaagtatagttaattaatcataaactattacctataaataacaatatctaataacaatactcttttacaaaattaccaacaatggtaaaagccacatgctttactagtactttatttttaaccttgatacaactttggttgtattgtatgaatgtatgtagtagtactgtagtactaaatactaaaactattatagtcatttccctttttattttttattaaattgtaattgtcagtcaacctttctccaccaattagatcaaactcaaccttcattctgaacaactgtatatggctcttgcttcttttcatagattctctaaaaaaaaaaacaaaaaaaaccccattattcttctctcaagtttaatctattttcttattttcttggaccgaatcgccttcaacccctaaacatctcaaactcaaagactgattttttcttaagtcaactctgaggtttgtcatcatagtatctgatcctctgtattgctgcagattttctttttttttttttttttgtttttttctgggtctcaagctgtgttcttcatatgtaatctttgttcttcaatcatttgaatcttttttctgatataatgaatcttctagcttttcagcctcaaagggtttttaaatccttattcatattttattgaatcattcctcaaaacggcagatcctttgtcttgctatagaaaaataaagattggatttttagctttttctttaagttttaacaactgggtttttcctattaataccaaaatctgaacttgttttgttttttagggagtttattatgtaatatggtttagctaagtggttttttgtttttgtttttgggggtctttaatgtatggaaattttcattgactcaatcaaataggatgatgacttcattattgggttgagtagagatatattctaatattgaagctatggagaacatgaatgaactaacatcatccttgagctttgcctcttcttcctatatttccaatggttcaagtacttgtcacaataatgtattagtcaatactgaacctgtgcaaagtcttgagaatctgagtttgagcaaactcagtagcagtcttgagaagcttttgattgataaagaatttgttgagtatactgatgctgaaattgtggtggagggtgttccggttagtgttcatcggtgtatattggcttctaggagtcagttttttcatgagcttttcaagaaaaagaatcctgattcagtcaaggaaggaaaatcaagatatctcatgtctgatttagttccatatggaaaggttggagttgaggcctttgatgtgttcttgaactatttgtatactggaactggaaagcttaaggcttcaccagaagaaatttcaacttgtgtggatgaaaactgtgctcatgatgcttgtccccctgctataaattatgctgtggaattaatgtatgcttctgctactttccaaatgaaagagcttgttttgcttgttcaggtactaatttcatacttcatacaacattttttactaaagatttctctagttttgtctgttctcggattttctctgtttcccaattttcattttctacttacttgtcaaatattttaacttattaactgtggcaagagactctaatggaaagtcccacctgtgtataatacatatagggtaccggtccttaagctcgctgctcaattttctatcttaaagtaactcaatctaaaagagttagtgagagtttggaagttcgaatactcattatgatgttcaatctatgcatttcatatgcctataatacatttcaatttaatagagcttttcatgaaattcatgtagcgtcgacttttgaactttgtcgagaaagcttatgtagaagatgtaatcccaattcttgtggctgctcaccactgccagctgaagcagctgctcttacattccattgagagagtggcaaagtcatctctagatgatgttgttttagagaaagagcttcctcttgaagtctctagtgaaatcaaattattgcgacgaaaagctcaaaaagagggtggtgatgatgatgatgatgaagaacaacaagatactgcaatggagaatgcggttcaattacaagacaagagagttgggagaatcctcaaagctttggactctgatgatgttgaattagttgagcttcttcttaaggaatctgatattacacttgatgatgcatatgctctccactatgctgttgcatactgtgatcctaaggttgtgaaggaggttcttggtctaaatttggctgatgtcaatctccgaaatcccagaggacttacagtgcttcatgtggctgcaaggcgcaaggaaccatcagtgattgtagcgcttttggatcgaggagcctctcccaaagatactactcctgatgatcaaactgctgttacaatctgcagaaggttaactaggccaaaggattatcatgaaaacacatgtaatggacgtacaaaaaggggagaggaatctaacaaagaccgaatatgcatcgatgttctagagagggagatgagacgaagctctatagcagcaaacatgtcaatggaaactgagcctgttggtgatgatttggttgcaaggcttgtctactttgaaaatagaggtgatttcctgacattggttgttggcctaaagatcagccgatcaggcctcagtagttgatattaattgtatatggtaattaataacagagaagagtgttttattatatgttgcagtggcatttgcaagactgctgttcccagctgaagccaggctagccatggagatggcagatgctcactcaacttcaatgtacacaacaagcctttcaggatcaggaggctcaaatggaaacttaaaggaagttgatttaaatgaaagacctgctgaaaggacaagacgactcagagcaagattgcaggccctcattaaaacaggtaccacctaactaacctaccttctcttcttctctttgttaatatctttgtcttttatacttttgtcatactcttgacatttaatttctcaccaaaaacaggataagttgatgtaaatttgtttcagtgttccatagttgtgatcataaatcataatgtgttggtatgtttttgcagtggaaaagggtcgacgattcttcccacactgctcggaagttcttgataactttttagactacgaaatagacatgcctgatgtctatgttctagaaaaaggcacacccgaggagcaggctaagaagaagacgcgcttcattgagctgaaagaggatctgcagaaagctttttcgaaagacatggaaaacagccggtctggcttgtcgtcttcatcctcttcttcctcttctcagaaggaggctgcaaacaatagggtccgaaaaaggaatagttagttgattgtgatttgatattatatattttttttggtcctttagaaagaattcattagagagtttgctcattttttttgttgttgagttttcgtttcttcttcttgaataaccttttgttgttgtagcttttttctgtataatataaaatatagcaagagatgataaagcttaggccttagagtgccttgcaaacacatgagctgtatatttggtctcataaaattgatacaaagcattcaaagtcttagcctgaaaatacacatgagttgttgctttgtgtgaaatgtaatcagatttagcataaacaagtctctcaagcaaaaactcaaacacaacaagtacaacttagttcaatttcaacagtgaaatcccaagtcttactattcttttcaacagaacaatttgatgtataaatcaaagtccaaacaaaataacagattacacaatttggacctgtaaaattggtacaagtaaattaagtgatgaaatcaataaaagaatttacacatggttaaataacatgtgtaagtgtaaatgtgctgtatatggtctaacaatcaactgatttgttaggtaagtttctatctttgggtaacctaaatttggagatttaactttcattttctacatttagaaaacatgaggtttcttggtgttatgaatatatgttaaacacaatcttaaaaaaaaaaagggttaagaaaagcaagtaagatggacatttcgaataaatgtaatgtattatgtagattgcaaagaagaatatcacacgaaatacaaatttgcatcattttttctaataaaaaaaaaaaaacttcaaattttgtcttcattaagtactgtattataattgtcccctttaaggaaaaaaaagtgttataattataaaaattaaaaatacactgatacaccacaatgagagaacataaaaaaaaagtgagaatagaatagatctccccctccatttaaaaagaaaaatcaaaaataaaaaaaaaaacaaaaacaaaaaaaaaaatacaaaaatacagttatacgaacttttaaatatttttacgatttttatgattttatttataaaaaataagatcttttgtattttttgttgtactagtttattgttgattttttgttattgttttttatgttaattttatgttacctttatatagttttcttgttattttaaggtatcgtaaaaatataaaaaaaatctttaaatataaaaatataaaaatatttataaaaaatagtgcattatataattataaaaaaaattctctcccaatctgtaatgtatttttgttcataataatatttacacacatataattcacgtacaaattgacagacattatgtggcaagtaacttcaaccaattatttttatttaaaatgagtattacttattatgtttacaggtaaattatatcattattctatttaataaaataattaatcctttgataacatttgtcacaaaataattaatttatgttttatttaatcaaacaagataattaatcagtccaaacaattttgataaggaaaataaacaaaagtaaaatagcaaatgatatggagcatattaatatctcaaatataaaattgagacttgacttgagagtgggaatattattatagagatttaggagggtttattagtgaaattgatagtattattattaatttattaattaatgtgttttcaacgctcaatttctccatccactccacacccacctttcctgcgttttttgtatcaccttcgattttgattgattccattattcttcacttctctctctctctcctctgtttcaggtcaaacccaacaaaaaaaatctgattttgagaagaagaagaaggagaaacaaacatgtcaatggcaacagagcctgtaatagcaatagatggtgatgatttggttgcaagactcctctactttgaaaacagaggtgtttttcttcttctttgttgggtttgtggatttaggcttgttaataatacagatgaatagaaaaagattatactttttgttttcatatgtttttgtagtggcatttgcaaggctgcttcttccagttgaagccaaagaagcaatggagattgtagatatggaagattgtgattcaggatctaaagggtcaagtggggatttaaagggtgctgatttgaatgaaacacctgttgaaagaacccaaagactccaatcaaggttgcacctcctcattacagcaggtacttatcccaattaatcccaaatcttatgtagtggaaagttagatacatataaaatttgtatattgattggaactgaactgaaagtaagtttaatctgtcaatcaaaagtagtgttgaatcaatcttttctggttttaaccaatttagg

SEQ ID NO: 18017 - DNA, 7852 bp, Cannabis sativa
taatttttcttctttcctaaatgtgttttaaaataaggataatgttgtactgaattgttgcagataataatgggaccaaccaaaggaattctttgttttctttttagtttcttaattgtttttttttaaaaaaaaaaaaattgctaccaaaaatatacattttagattcttattctctatgtggtaatttgaattgattgtctctgtgttcagtaatagtactaaagctagatagtgttgcatgtagtaagttcttggtcttttgtagaatgattggaattttgaattttctccttgcaaattttaatttgtatcaatagacaacacaaatcgtccctttctagtgaactaaccttatactaaaataattcatccatgaattacaatctctttagtttcttccttttctattatgattgattttccttcttatcctgattgaattttatagatgctgatttaaattatgataatttggcttcgggtctgaaggaagctctactgaatgacaagtcagcttttgatgcagatcgcttgcagagttacactggtacatagccttattatttgaattttgaagtccatctttttaataatcatacatgcatacggtctcacatacttgcactttgctgttatgatcaccaaaatgcatggatatgatgtagatacatgtatatatttctctatcttgagctattttcttttgacattatataaatgtatggtcttaaataaactcaaccagggacaaactagattaggtggtaattgtttctggttgtagattacttacttaaagactgtaatctgtgacaacttactactgaatcactcttttttttttctgcagcagcatagttagatttttcattcaattacttaactaattctacagcttggtttgttaagcacaataggaaaaatggaatctttgtggcagatttacagatgtaaccctatcttgtttttaaaacctacaccaactttgacatattttagattaaatgtctatagagtatgagtttttttcttatctcagcctatgtcgttctcaatacaattcctcttaaggtcttgtagaaatttaaatttgattcacaaacaaggagttaagtttgcaaaaacattcaagcacatgttaggccatggtctttcttaggtattgtaagctgatgagacatctttgctttgcaaggtcctcaattacgagcgctgttaaaatggcctaggccactccccttggaggatgaacgcattcgtttgctgcatgaggtgacttccaaaacataataattagatattcttttggcttacgtttctaattgtctgtattctattatttttggatcttaactaatggggtgaaatttttaaggttggatttgaactggagagaagctttggtggcaaagcatctaaccttgtggagtctagtgaaaaatcagctgttaaacttgtaactcttgttgcgagtcactttcctggtatcctttttaattgcttaaaaagttcctattaggttgtgtttcacataagctggtattttgacatttctgttttgtacaggctttcgtgaccactcactctacaaaggacaccaggtattcttgtataaaagagcccagatatttgctgctgatctatggggtgcattccagggccaaggatatggagaattcaatgacattggctctatcactataatggcggattatattgttccagctgttctacggcagattggtgtgctcaaatatagctcaatcctagctagcaaaattgaggctgatagtgaaatagttccaggtagtgaggaggaagttgaactgagagcttgctccattcatgcggttgaaaaaatgagggagttaatcagtaacaaatcaggaaatcaggtataaccaaaatctcctgtaactaacagagagattttctcaatgctgattctgttgtgaatttgtgaagcttcttatctttttctgacacgagagcttaatctaataagtgatgacatgaacccgatagtagtatagtacaacgctcttaccatcgtaatatttcaaacagggtgtatgtgattattatcagtaggtttgcacacattgatatgctttttgttattggaaatttgggtatctcaagcatgatatactactttctcggttttttcaggtactcagcgtggagctagatctgtggctttggtcttttggagttcaggttccaaccctgaaacaccaccgaacactttcgatatattactaaatgcacaatatgttcttcattgttgctgcaattatatcctagttatgattagtgaaaacagttataatttatgatgaaataggaggcggtctcagattttgctatagtcattaactactagtcacggtgtctttcatttgaactatgctagtggttgagaaagaaatctttatttacataataactgtaaaaacattgtcattcaactggggtactcagttattatttagcattcataaacgcaaataggacttttccatgtatgagatttatgggcaaagctccatcataactacttttcagaacttctggtgcccttactacttggggccctacatgccgtcttttggacgaatagcctgcaaagacataatgaaaattttagaatgttatgatcaacggttgcaattattgactttatgggaaaagatacatgattcatgtttctattatcatcctaagaaagggagaaacggacccccttttattaggctactataaattggcaaatttgaataattaatgcaatttagagatgatcagaactgtactaaataataaagtgaaacaataagctgatcgaaaatagctgttggaattgccaaggttgcaacggcatcaagggcatctacactattccagaaatccttcccctcacatgggcaccaagataggaggaggtacacctgattatccccagttagtccgtgttagtgtagtagtactattgttttatgtcttttatcaatttcttataactggattttattgaaacctttctttggagtgaaaactctcttataatcttagatgtaactgatcattgtatcattttgttgatgaggatgtgtgaacctggttaattagcattctttttcggaaaagaaaaaagatctaaatgccgtggatgcgaaccattttcctatttaactaaatcgccaccacctttagtggaatgatttcattatgtaaaatgaagaacatttcccaccaaaagatcaatacaatataccaatcactcactggtaaataatatggaacatcttaacatgtcaatggccactagtatatattataaaactcaaactatccttcttcagatttggtatgctgcagctgaggcttgataaagaaattggtccatgcagtgggaaaaaacaacagagcttagctacaagcttgttttgtagtgaaagttatctcattactgattcttatgccagtttcttactaatcttatataagattaggatattacatttattcctattcgtttacaatttcaaacagggccatatttgattatcatcaaccacattattatgtgtactttgtcattgcattatttacatttttctcccaaaggaaagattatttcaacaacaacaacaacaagttctaccatacattattatagcatcattaaagagaaagataaagtttcattaccactatctttctttattcatatcattaccctttccctgaagagatttaagaggtagagctagaagaaagattggttgttgtgggcaaatttccatcataactacatttcagtacatctggtttcctcactacccggggccctatgggtactttacttgcttttggacgaatatcctacaagagacaacaacataatcaacatgagcttcaaatgtagtgaccaactgttcttataagcctttgtaatatttgtcagaaaagataatatctattgcaatatggttggttttccagcaagaagtgatcaactaaagtttcaacatgagcttcttgtgcattttagagaatgatcaatgacattatcaacaggtaaccaaaaaaaaaaagaagtgtgaaataattacctgatcaaatatagctgttggaattgccaaggtagccatagcatttggggcatctactattccagaaattctcccttcacatgggcaacaagacaagagaaggtaggcctgaattatatccagttattctgtggtcagttaggcttattaaacatggtatggtatggtattggcacatacataagatgaattatatgaaacctgttctttgctgtatccaaatttggagaggtagtcaatagcattgagaactgcacgcttgtaagccacagttgcgtcgagataatgctgtctcccactctcatcaacacttataccctcaaagacaagccattctgagaatcttggttcaacagggcctatctcaaatattgggtttacatgaagaggagttggccccattggtgtcaaatactctttcattccaccccttataatttcacacctgataaagaaattaaacccaagtgagaaatggaagatgtatctagttttgttcattgtttactacaaatggtaagagattaaagtattgaactagtacttaagatcaagaaagccactcatctcaattgccccacaaaatgagacttcaccatctccctgagaaaaatgcatgtcaccagtacttagattggctccttctacgaatacaggtaggtagatctttgatcctctacttaggttttttatgtcacagttcccaccattttctcttcctggtattgtccttgcagcctctctagctattttctcccactctggggtaccttcttgaatctttatatgcaagaaagctgtgttagatttttagattgtagaagctacatagttgctacttggtgttaaaattgagagtatgatagaaatagtagcttcacaaggtcatacctttcctagaacacaaccttttggtgttggtaagctagccattggccgttgatgcacaacttcacaaagtttcaaagactcaactccattctcaacaagctgtctttccctttcattccaaatattaagaagttccattgatggagctgttccaactattcccgggtgagtcaaaccaggaaatcttactcctatcaatgacaccattataataaatggttgtgttctgagtcaaatttattaattaagagccaaaaaagagaagatgaaacatgttgagaatgtcacctggtatgtgaggagagtaagcataaattccttcaaaataccaaatagctttggttgcagcaggaaaatgatcagtaagaaaaccacctccattttctctatcaaaggtagctgtgaacccccattcatctcctgggagtggacccaagttgcatatttcaaccactagaagatcccctggcttggccggtatcccatctttgtccactattctgattggcccactaagataatgaacctgcaagagtcaaagtttctcaaaaacttgatcctttcaactcatcaaagattggatttttttaatcttttctacttacacttgagaggtctatgaatttaacatctaaagcagagtggtcatctttaatagcaccacctgtccaatcaaccatttctactctaaagacctcaccagttttaacctcggccacagccggaatcagagggtgccaacggttatgaagcggcagcttctgctgccatgacttgtttttcaagtccacagacactactagttttggggtcaagggggccatcataaattcaataatgagtatagactggtttatgtttttgggttaaatttcaaaatggtcccatgtgacatcctttcagtttcagtgtaggacaatcaaaggaatatgtgtcacaattagtctttagtgatagtatggagaagagtaagaacaaaatatgtgttttctttggatattaaaaaatcttctttgcagggctagagtagatagagctgctatttaaagttagctgtctcaaaagtcctgatataaagaagattttcaagagtggcaaagagacttgatgatatttatctaaagaggtggaccactaatttaatttagtttgaattgaagatttggtgtcgtatgattcttaaaaagaaattatttatgtataattattaaattatttttctttttgttattgttggaactcacatcatcactaatatttatagttgtcaaaatacatatattattttaaaatatatatatatttgttctcttatccatataagatttatcatatttttttaagaaaaatactctaattatcatctcacatcacattaaattaataatattttaggtaaaaaaattaaaaaaaatatcaatgtgaccattgtttatattaagcaacacttcacataaaattaatcttgaaaattaaattgcaatgtagtaaaaccatttcaatgaacaatctcatttaagatgctcataagattattctacatggtagttagcaaaaagaacaagaaagaaagattacactttttataaggggagattatgttatgatcatactcagctatatattgtaggattattttttaaaaaaaaagtaattaacctatttctgattattatctttattattattaagtaagagagaacttatgagacacctattttgggtacaaaagaaaagagtaagaatatataatagagacaattgagatagtgtaattaagtggaaccttttaagccacgggatcgatgcatgcatacaaaacaaaggccctccctccttattaaaagctgtcttggacttacgaaactccaaaagtgttgtgctagtggttgagtaaccaataaattttagttttagttctaattaaaaaatatttttaagaaagcaaacatgtttggtaaagcttttgcttctactttagatagtataagaacaagtagaatttttttgttgagaaatttacacaagatatttttttttttaattatgtcaattgttgtttgatattaatctagtttaatagtgcttttaaaattataaaaatatttttaaatagaaataattttatttattttatttgaattaggttaaatagaaaatttacaattaaaagtagacaaaatagtcatttttttaatttttatttcaacttaaaaatatttttcttatttttcacatgaacttttattttactaaaaatatatatgtatattgagtgatttgatgtataaatacttaactttaacttccagttgcaaataaatacttaaattttattttggcaataataatatctaagtttcaattttaaaacttctgtaggagcctgactgttaagtgttaaataaattgtcacgtgataattcttgattgattcaggtcattaaatttttatttttgtaaaaaaattaatttaaatatatcaataagaaaataacacgtggataatgacatgatatttaatagtcagatacttacagagttatagaaatataacttaagtaatattattgccaaaaattaaacttaagtatttatttacaattgaaagttaaacttaaatatttataccacaaattacttatatattttttttaatttacaacacttcctaaagctgatatttcttagcaaaaaacaaaaacacttccaaaacttttttagatttggttggcggacttaaaaattatttttgggtttatgaagctcaaaaagtattttgatggttagataatcaataaatttaggaattatttcacaaatacacaaaaacaacaaaa

SEQ ID NO: 18018 - DNA, 2752 bp, Cannabis sativa
ttcatgctatattttggtttcattttcatgttttgatagccatttcatttcatgttatgctcatagctgatattgatctctatgttgttctttatgtaattctttggtttcagatattctctatgctgtagttatgctttaacactctttttttgttcccttcatatatctgcataagtttatattcctttgtccttggtagtgaatttttactttgtgtttaggtggtgtcaccattggcatggtttttgttaatggtcttgttttgtcatttttatcctaacaagtaatgctaaggaagaaggtttatgattcacagattataacttttggtcaagtaatgataaggactcagcaattctggtctattacactggaatatgtagtatagataaagataaaatgtattagttggattctaagagtaaagaattaggttacaagttgaataattgagaagtatggaagtacttgcccataataattggctaataattggcttgcagggcttgtcgtcgctctccagttataagtactaacgtaggtgtgtacttgtttcaatttgcttggaacaatagccatcacaagcatttaaagaataattgtttagattcggtgttttagtcaattccaaaagttttaaacctttgttgttttagtaatttggtaaatacttagttgtacacttgccatagtagcacacgtggtgacgctgatctagatagaaacactaagctttaattttttcttcaaatgtgcaaaacaacgtgtgcgttacacttttttttctcgatatttctaccaactagaatttattgttattgctgaatgtttttatgatttgctattaaaaacctttggtataaacaagtatattctgttttcatgaaatcttggctaatcattgatccactaatatagaaaatttgtatgcaacagcctgttttgcacatttgcaaagtcaattaaagctgagttttttactggactgatgcgagtgtatgatgaagttaccaaatgaggaatgctctgatcacatgcatacttaggctttagtacattaaagtcttactcttgtgttcattacatggaaataaacctaccaaagggttgttttgcatggcttcccatgcagttaccttaaatgacaatgatgtaatgttgtccttttatatgatcccttgatgaattgaatagaactgttttcaatactaagtaacggatcgacaagtacttataatggacacgtgccctgttgtgtttcatagcaggaaatagtttgattctttatacgttacatgctatgcgttatgtgtaaatgtagatgagccataattcatttagggcttaggtgtttgtttctggcattgatgatgttaattgtgttcatgtccaaatcagcggaaagtaaatctacaaatgacaccagcaaagaccaaccagttgttccagtagtttcatcgtcaacaactactagctttgctgaaagtactccatcaactcccaaggtagctgaggaactgaaaatctcttctcagcttcgaaaattcaactttaatgagctgaaatctgcaacaagaggttttagatctgagagtcttttgggggaaggtggatttggctgcgtctacaaaggttggataagcgaaagtggaactgctccagtgaaagctggcacggggattccagttgcagtaaagactctgaatcacgatggacttcagggtcacagagaatggctggtcagttaccttactatgacttaatttcagctagaacagttgaattactttttctttactctacaataaattaagcatagttgtgtgtgtttcgtttgttgcaggctgaagttaattatcttggtgatcttctgcacatgaatttagttaagttaattggctgttgcattgaggatgatcaaaggctacttgtttatgaattcatgccccgcggaagcctggaaaatcacctttttagaagtatgtgacagtaaatagactttatgaaagttggtttagtttccatggcatcaagttcatgcttgcttatcagctaatcataatagttcttcttgcctttctgttaataccgtggttttgttatgtctaatttttttctctttctgcttttatcggttggagaagcttgaaccatttcttttttacaatgcttaacataacatatgacaagttttttagtatgataacataaatagactaaggcaatggttgtgattatatattattgtggctttcaagaggtcttgtgttgaatgtacttgttttacattaggaatgtttggtatgcaaaagtgataaaacaagattaggacaagttatgtttctatcattttgagtttaatatggctcatgtaatggtggtataaaaggtagctgtcttctttgcttttaagtttgcttataaggggagtgaaaaattattagtgacattgatgttttgattgaatgagcatttaaagtaatgatatacttgtacaattggcaattcaaggaattttgtatactataatagtatttttgaaggcctaatcaatgatttggttttatacatgtaggcaattcattttaaaggattttcttctccgttttcctattttcttttctgtcaaagaatattgcagaattctaaccatatttattttgatttgactcatagggtctctgcctctttcttggtcaatcagaatgaaaatagctcttggtgctgcaaaaggtcttgcctttcttca

SEQ ID NO: 18019 - DNA, 3671 bp, Cannabis sativa
ctttgatgtaattgagcaagaaatgcattaataaaatcatcatctttatatttatatatatatatataatgagaaactcaagcctaatataacccaataatatttaaaattataatcaaacaaaaatataaaaaactagaataaattcacttcccatttaggtttctgccatcaaaaatagaaaaagaaaagaaaaaaaacttcattagtagattattttgttctagtaaactttccttatattaggttgattccatttttctttttgctcctttaatatcttaataaatttcatatttatctataagtttcaaacattacaaatacacattacttgttaattatcattttaccatgattcatttctacaaacaataatcttctcactcaaaaaatcaaaagataatcttttcattggtttataagttactttcacaattacaaatcatccaccaacaacaacataaatatataatatatgtatatataaattacatttaacacattttcactaatatttcaatttttttagataaaataatctaaaattacaataagacaaccaatgatcgatactctcgctatctcgattgtaatatttcaatttcttttacacagtgatctgaaatctcaatatgacaatcaatgatcggaaatctcgctgccttgattgtaatatttcaattttaaatgtgtattaaaacatttttcttaaaaaaaaagatggtttagctaaacttatttaagtttgagctaataataaactcaataccctttcctcttttctttcttttctttaattattagctcaacttaattaatcataattattatttaattaattaattataactaacagccacgtgtcccaaacccaattctccctccacctatatcataaaccacttgcaaagtcttctgttgaacattcccaaatattgccacgtcaccatcgtctccgttgccggcgaacgccaaacacacctgagaaatcttcgaagcgtaaagaatccccgtcgcatcaagatccaccgtcgttcctccgccgaagaagaatccaatctttggaatcgtcacactcttatacttactcagatcgtaacacgtgtccaaaatcgatagagccggagccgtcggataacccaagctactcatctgtttcttgaactcggagctcatagcgccgtaagccgtcggcggaagccgagtaatgactgtgccggaatcgatgatcgttccggctgtctggaaaagggaagctgaaatcggaagcttctttccgcctacgcttatggccagaacttggagagcgtagaacgacgcaccgccggatatggtggagagtggcgtgtacttgactgagtttgaagccgagccgccgtttcctagggttaggtagccggttttgctggctgtactgggtaagcaatatgagaagtagcgattgtatttttgggccgtttgttcgattattgaaagtttgtttcggcccaggcccaataggcccgcggacccaccaaaaaggccttggttgttttggccacaaccgaaaaggacgttatctataacggcggaagatgacagagttagtgtttctttgccgaagtagccaacggagaaggattggtcgccgtattggatgccgtaaatacacgtggacgtaccagaagagcaagctggactattacctgaattttatttgtgtaatgttatattatttagaaaggtttttacaacaaaaaaaatattaaaagttaaacttttactctgacatgaattttttttataaaaatattattttttttatgaaatatccgcaaaataataaaacagaacaactgaaaagtaattgtagagtaacagtaaaaacttaatatattatttacacgtattttttttaaatattctacccacaataaaaaaataaaaaaattaaaaatttcagtgtaaaaaccctacttaaaatctcatttttaatttattaaaggttagagccactatttcttttttgaaattatcacatatttgtaaaagatagtatttataccatttttatgtgtttgtggggaaaaaaattaagtgaaaagattggaaccatgttaaacataacttttttttttaaaaaaaaaaaaaaatcttattctaattattaatttttttaaacctacattattgtacatacaaaaataaaaaattcttctcaaagaataaatataatttttattatattcttgttgctatgcataatatttatttatattaagatgtagttatacctaatcttaacttgttggggaaaagaaagaattatacatattttaatgtataataatatttatgttcaatagcaaaataaaataattattttatacaaatatacagtgtgtttggtaataattttttaattaaaaaaataaaaatatttttaaaaaacatattctataaaattattttcactttttaattttttttattgagaatcaaaatttcataaattttaaaaataagaaaaagttactttaatttttttttttaaaataatatatatttttaatttatgagtctaagtaattattacctgtagcagatttgagtagagtacactgggcagaggtacaagaaacattagagtaagtagaagatttggagggatcatatatagtctccttttggtcatagcacgacttggcacaaggttgacattgtgtccaagttatgtcactacccgtgtcgaaaatcaaagataggtcatttttcggtgtacctagccccacggtcactatatagttacccgagcccaccactgcccctgacttagccgggagggtggtggcatccttcttagctcttgtgttgccattgcggttaccacgagaggtggtggcgtctgcagttttatcagaaagacgagatcgaatggagttgactcggtattcgtcttgttggaggatttgagtatggttggttttggcttggtgtggggagcatggtccatgcttgtgtaccactttcaatgtagcatcattgttgtcccctattgaataaaataaataaattaataaatttcatatatttaaatttagcataaaatgagagtatattaattttcatttttaattaaaatgaggcatcatataataaaatcataataagaacataagggacctcaaaatttagaaaaatacaaattttcaaaaatataaaaaaaaatctcaaaatttagaaatttatcatttatgtttaatttgaataatttacgtacatatattcatgaaaagtaaaatgaataatttgatagtggaaagagggaaaaatacaattttttttttttttttgagaaaaggaaaaaagacaattgttattacggattattaatttattataccaatttacttatttaattccatttatccaaaatattaatctttatatgcaaataagaaaagaactgttatttatattttaattacgaaagctactttaggcagaaaaattaatatgagaaagaagcttattattttcttcctcttaatattgcataaaaattgaaaaaaaaattaataaaacaaattaaaatccaaacaaaaaaataaattataattatatatttccttattctaaagcatgcacccaagatatttgacattaataattcatttttcccgtgacac

SEQ ID NO: 18020 - DNA, 3220 bp, Cannabis sativa
ttaaatataaataaaaagtcacccatgaatttctcataaaccaagaaatttagttatagatcatgttaatctctctatcgttatatatggaatatagttatttatatatatatatatatatatgttgtatgacaatccaactatatatagagacatcttgaacaatattctttaactgtaaaaaaatatgctttgcttttgagaggtattgcttactccatttccccttaattattattttatataaaagtaatattttttttcataaataattaataatattcacattaaaatacttaaaatgacgtaaagtacatgcaccgactcttttagttgttcacacattataatcttaattctaaattatccatttcgatcaatctcttttatataatatacatagtagaaataatagtacacaccacaaatattaaattatattattatgacgatttactttctttgttttttttcgttataatcatgttaataaaagatcaatctcaccatgcaccatcccctatatccattccatatgtatgaatataaaataatgaataaaaaattccaaaatttatttaaacaataatatatatataaaaactaaattagaattttatgtctgaattttaatttatatcatgttttttaaattttttatgtcgtttaaaatttttcctgaactattaagattattagatttgatgacttttatttaattttatttaattttgctaaaatgtgattgttcatatactaaatcgtgctctcgaactttgatacttacaaaatcatgccctttaaaatttaacatatactgaattatgcctcttaaattttcattcacgatagatttttttaataaaatcggataaaagttcttaaatctaataatctcaataatttgagaaaaaaatttaaagactcaaaaaaaattcaacaatataatttaatatatgtaggaacataaatgtaaattagcataatattattattattattattataatgaagaccaaatgttaagtcagcagtcaaacaataggaatctaatccaagattttatggtcatatcataactttgtagtttgttataagaagcatagagtggcggttaagtttatccacaactagctattatatgctgcggccacctctatttttgttcccgtgcacctttccgaaaatccggcccattcgaagcccaagaccaagtccaacgccgacacaaaacacagccccaaaagtccatacataggtaactacgcattattatttatataaatatttattgaaaaaataaagtaaaaatctttttaatatttaattcagtggttgaactaatttatgaaaattttatctaaaaggtgtttgaaaatttagattaatttgattcttttgacttaaaaggaacattagtgattctgtgattttctatgattttccttttcttttcttttttttgaaaaatctagaaacaatgaaaaattagaaattaaaataacatatcaaccactagtttccatacaaaatttatgtgcattttgtggttaaccgttaagctttatacgtagtatttatagagacgtatttatagagaaatacagtagaacttttatttaagaatactctattcaagaataatctttaatttattataaaaaaatcaagtctcaatttgggccaattataaataagaataacctctctaatgtaattagttatacattttttaagtctagtattaataaaatatacctccatataagaataattatatcttaaaaaaatatatacatatattttataaatttaattatgtagaattaataattttattttaaattatagtacatgtataaatattatatgtactcgaaaataattctaatataatatagtattaagaattatttattgatatttttgttacattgatatattttgatattttaattttttttcaagtgtaactctatttagttataacttctcaattagaatattattttcttggttccaagtgtattcttgggtagaggttctactgtattaagaaatagtagtgttgtctagtactcttatatgtgttagtattgttattggtctaattaagcatgaagttctatatagttttatataagagaaatactaaaaggcaccagtgctgccaagtaccctcttacatgtcaatatcgctattggtctaattaagtatcgggtccaatatagtttaatataatagattttaaggagtatcgctagtcaatcgcaagacgacacgtcttaagggtactaggcaccattggtgcccaatagcaatgctctatatttaagaagtatcgctagccaatcacaagacgatatatttaaaagtattaagcactaagtactactagtacccaataataatagaaattgatgtttatttgtgtcaaacactacaattttatacttatgcacacattgacaaatttattgaaaaattgttagctcacatatttttcagttttaaataacacaactttttttaaaggaaaaattataggcccatttctctgtttctaaagaaggaaaaagaatctttcgtatcgaaaaaaatgaggataatataaaaaatctttttcttaaacaatatatggaacatgttataggaatagacggttcattgaccaccgtcttataatttggtcaacgaccaactaactagtttgcctttttttctcccaacttttaaggtcaaaactcaaatccatattgttctagtttataaataaatccataatgttctatgttttttttttgagaaaatattgttctatgtttatcatcactatttctaaaaataatagtttatttaacaagaaattaccatcaatactcttttggagcactcctaatatatgctctaacttagtttttctctaaaatagataataaaatatataaatttatcaaaaatataaaaatataacattctgatctacatgtggagcaactttctaaacttactttattagttttaaattatttattgtgtaagtatgtttgtatatattaataggggaattgccttatatactttttttttaactttttttttaaatttacggtttgagtttctatagtagttacaataggagttcctatacgattttttgttgcaattaaggttgcaacgctagttgaaataggggtttctatataaaattccgtaaaa

SEQ ID NO: 18021 - DNA, 2584 bp, Cannabis sativa
gtgctcctagtcttctacgaactatatattataatcaataaatatatattcatagaataaactgaaatgtgagaattgagagagagagagagagagggacatacatatatatgcaccaagaaaatattattccatttgaatggtggaccccaaaatttcaggatcactacgaatgttcaaataagggatattggggtggagaattattaatatcagctgattataatctcaggtagctaattaatcattttgcatgtataccaacttggatctcaatcaatttttttttcttctggccctataaataccttccacaccctcttactttctttctcaggcctctctctcttattactaataatactcttaactctctcttgcttttattattattttcatctttttccgatcttacaatatatttatatattggagtaaacgtacaattattcatcttcaattaatattatatactattcaactaaaccattatggagaatcatgcagaaactctgaggtagtgcatatatatgtagtattttctagttttctctctaacacatatacgtaatttcatgagtcatctttattaatttattgctaagttgattaatatatacatatatatatatttaattaaacaggaacaggtgtgcagcatgctatagacagtttaacagaatggatcatctagtggagcacatgagaatatcatatcactctgttcatgaacccacttgtggaatctgcaagaaacactgcagatcattcgagtctttaagggaacatcttattggtactcacgcgcctcttgtactgtgatcaattcttaaataagaatatttgaagttataaattaattatttattcagggccactgccaaagcaagaatgtagaaacatattcagcacgagaggatgcagattctgcttatccatctttgacagctcttactctgtcagagttcatcaagagaggtgtcaactctctggtctcaatgctgtaataaatcttctctctctctctctctctctctctctccccaaaatgaattttgttatcatttgatgattattatttattactaattttgtagggagtacttggtcgattggcaaatttaggaataagggacaatctggatgggataaacagtagaggtagcagaggaacacaggtggtggcaatggcttgtaaaatggttgggggtggcatggatggtaccctcgatgtctgcgcaagggtctgtctcattgaccaaaatgaaaacattatattccatacttatgtaaaacccaccattcctgtcactaactacaggtactactatatatataattacctttaatttgttatatttatgttgaaatatgaaaaggatgaaaattaattaatatatgattctgcaggtatgaaactacaggcattcgagctgagtatttaagggatgcaatgccagtgagacaagtgcaggctaagattcatgagttcctttgtaatggggaacccatgtggaggatccgacccaccagaggtggtagagctaagattcttgttggtcacggtttggatcatgaccttgaccgtctccagattgactacccatcacttatgatcaggtaataatttgtatcactacatatataccaaatagcccatgcatatatatataaaacaactaactaataattaatatttacgtacttagggatactgcgaaatatcctccgctgatgaaaactagcaagctcagcaactcactcaagtatctaactcaagcatatcttgggcaagtatcttatatatatacatatcctccttttattaatttcctatgcatatatatatatatagttacattatgtttatatacatatatatgtacgtaatacagttatgatatccaaactggaatccaagacccttatgaggattgtgttgcgacaatgaggctttacagtagaatgagatcacagaatcatagagcggaggactatccattggcttcagaccctcaaaatcgaaacaactttgcttcgtggagacaatctgagcttgagagaatgagccctgaacaaatgttggctctctctaggtctgattattactgttggtgcttggactccaattaattaattatacattctacacttatatatgattaatatagattaatatagctgcgctattgatctataattctatcatcatagatcagttatgaaaagtcagcctattatttatatataataactaataataaacggtgatttatatagacatatatgtattatatatgtttcatttagtttaatattattatatatatttcaagctgaagcgatcgattcataatgtactatattcaagagcaatttatagtatatgaattattgcttgctatgatcaatatatattatcttaattaaatcccatctatgaatagttttgctcttaatatttatacgtaactttaaaactgtttgattttttttttgagtgtaataatattttaaaaatgtttgacgaactatacattgcagattttattacaataaaagataatcaaaataattataactt

SEQ ID NO: 18022 - DNA, 6166 bp, Cannabis sativa
  modified_base (5959)..(5965): a, c, t, g, unknown or other
tctctctctttctttctctctttctctatgtctgccgcattgtcttgttctatatagaatctaatctcacttccacgcattaaagtattgtctctctttctctttctttctagtcatcgttggcttcatattttccggttttgggtctgttaggccaacactttagctcattattaaccgaagctatagctaagctacctatagagaacactccacaaaccaaacccaaataccagagcaaccaaaccccatttcttatttgctcttctttcagagtttggagccatgtttttgagtcataacaacagctaaaagtagaaaaaggttgtgcttagaagtgagagttgttctcattctgaagaagctcttttcaaagtggtaagagggtgaaccaagaaattggagaagggttggaattctttggaggattttgaagtagaacccagttgcccaaatactgcaaataatacttggtcttgagctgtatgaagtaaaagagaaacaatgagagatgggagttccaagaaaagcaaggtttataattatcattattattaagatttaaaatttaaaatttttcccaatttctttgcatgattcccttagatttgggaaattcatgattgattctttgtttgttgtttggtttagctctcatggtcaaagaaaatggtcagaaagtggttcaacatcaagagcaagaatgaggagtttcaggctgatgatgtttatggaggtggttcttttagctcttattactcttttccctcttctttgtcatcaattaattaaacatgaaagtaaaaatttgttttctgagcttcccattttaatgggggaggttatttttatggtagtctttgttcttcttctttaattccaagtatgtgaaatgccaaattctgaactttagctgttcttgtatcccaaaattctcagctactaacaaaagattgaacatttaaatttccccttttctctaatttagcaaaaatctcctcactaatcaaccaaattaaggcatttttctatttcatgtttattgacctatattaggagatagaattggtggattaatgattttttgtttttgttttcctttcaggaggtaatgttgaatacaggactagcttcactgagagggaggcccgcacaatcaagaagagcaagacaggttagcattacccttttcttacaactcaatgaaataatgtagatgcccaaaaagtaaatatcatctcaaaatcataggttgaacctattcattcttttggcaatgcacagaaaagtttaccaagggcactgagccggtccggcgaactagaatgaatctagatcatcctcgaatttttgatgtgcaaaaccataggtatgtgtccactttctcttcatgtttagaagaatccttggaaagaattcactgtgaactgatttttcttttacttcttttcaattttgagagcagcatttttgttgctacttggaatgtggctggaagatctcccccgaataacttaaatctagatgagtggcttcatgctgcacctcctgctgacatttatgttcttgggtatgtgactagattgtctgcatagagtcttatttctaattttaagacagtgttctaaacatgtcacagagattaatgtttgctgctctatctttcagatttcaggagatagttccactaaatgctggtaatgttcttggtgcggaagacaacggtcctgccaagaaatggcttgctcttatccggaaaactcttaacaatcttcctgggaccagtggggggagtggctgctatacaccttctccaattccacagcctgttgtagaacaaaatgctgatttcgagggatcagcaaggcagaaaaactcatctttctttcatcgccgttcattccaaacaactaatagttggagaatggatggtgattcctcgatcccacaaccgcgacttgatcggcggttcagtgtttgtgatagggtgatctttggtaacaggtctagtgattatagccacaggccaagtgattacagccacagaccgagtgattacagccacaggcccagcgattgcagtcataggccaagtgattacaggccaagtgattacagccacaggccaagtgattatagccacagaccaagtgattacagtcacaggccaagtgattatagtcatagaccaagtgattacagtcacaggccaagtgactttgaatctagttacagatggggtcatcggccaagtgactattccaggcccagtgactattccagatggggttcatctgatgatgacaatggagctggtgattcaccaagtactgtgttacattctccaatgtcctatggctatggtggatctgcatctaatgaggagggatataggaaaagagggcattcaagatactgcttagttgcaagcaaacaaatggttggaatttttctcactgtttgggtcaggagtgaattgagggatcatgttcgaaacatgaaagtatcttgtgttggaagaggattaatgggttacctcggaaacaaggtattaattgactaataatgcctcttttcttcaagtttttactgattgtattttgcccttgaaaacctttgatgactaaatagtcatgattttttgcagggatccatttcaatcagcatgtcactgcaccaaacaaccttttgctttgtttgtagtcatttaacctctggagagaaagagggtgatgaactaagaaggaattctgatgtcatggaaattcttagaaagacaaggtttcctcgggtccacagctcaggcgatgagaagtctcccgagactatccttgaccatgagtaagttccttgctcatcaatgatcaatgaaatagtactcatggagtacaaatttaaatgaattgtaagagagatattatggagactaagcatggatttaaaataactttgcatcttctaagtagtaacttaattccattttgtactttatatttcctccattttctaattccacattccttttctttcttttgcagtcgagtcatttggcttggagatttgaactatcgaatcgcactctcttatcgctctgcaaaggccctagttgagatgcagaattggagggcattgttagaaagagaccaggcataattctaaatcctcaaaacatacttccctgcccttctcgccattattttttgctttctaacttgatgcttctatgtgcagttaagaatagagcaaagacggggccgtgtttttgcaggatggagtgaagggaagatttactttcccccaacatacaagtattctactaattcagacagatatgctggggatgatatgcatccaaaagagaaacggcgaacacctgcttggtaagatcttctcacgtatcacatatctcaaattggaaaactgtgaagtattgaatgtggcttaacacattatgcacaatgctgatcaaacttttgttctttgtttatgaaaggtgtgatcgtattttgtggcatggagaagggctacatcagttatcatatgtccgcggagaatcacgattctcagatcacagaccagtttatggcatgttttgggctgaggttgtatccagccataaccgtttgaagaaaagcatgagctgctctggttccagaattgaggtggaggagctgcttccatattcacatggatatactgaacttagctttttctaaaagatgacattcagaattttgtcccacattgaatatacatccaagtatgctttctctctctttctctctttctcttaaagacacaaaaataacaaaagctcacacatatatacagtgctactcacatgcacaagtttgtgatctttcaagtccaattttccaattcaagttcatatgcatcttcaatcaatatggccaattaggacctttttaagcattttaggcaatatcttttcacaatatacaaatgggagatggatgttgttagaatctgtaaaaacccacctctaagatagaatatgtggctgcctggcataatcctatatataaaaaaaaagtgtcttgtattgtatattcactttatgtataaagaaagtaggaaagaaaaaactccataagcaacaaagatgtcttgcttgttccactactctttctaaccattgattttggtccacatgagcaggctggaatcactttgttgaattattaaattatttttattattattcatctcaagggcgattgagacattccgttgcccacataccgaaaaaggtatataagctcatctctttttctctttttctagtttttttttacctttctcggttctgctgttgttggtggccttcctttgttttgttttaactgcttccttattatcacttttgcaggtgttaatttggtctcctcttctaactataatgtcacattgtacatttaatcatcctaactctatgacctcctatatcccagagaagaaaaaaaaaagaaaagaaatattaatcagtacggagaataattaggtaacccatttgacatacacacagcctttctgacatatctcaaagttacttacaagtgttttttggctcatgtcctactcaaatgattaggtactttctttatttaagtgttctgattacttttaatgtatatgattaaagccccatataatataaatgagcttatgattaagaggtttttgattattttgcaggatatgaaactaatgcaattatgaacacttcatgcctagtggagaggaagaagattttgtttgattcactattctttctttatttgtttggaaatatatatatgtatttatatatctagctaagtcgaaaagtttggtcacaataattatttgtatacttgttaattttttctgttttcaaatgcataggaaatatttgaagagagtacccagttaacaaaagtaattagtgacaatgaaaaaaaaaatataaagaagatgaagttcatgatagaagaaatctgaacaccctcttactcagtcttgttggtttcaaatgattaatgtactggcaaaagttggtttttattcctttattattgttattcatttcaactgttccccacttctggtttttcacttctttttttgggttgttgattatggttgctgtaaaataaagaagaagcaaaagcatgagatgggacagttttacagttttggcaggtaattaataaataataaaaaggaaaggaaaaaaataatgaacatggaagggaagacaagattttgagagggactggtcttttggttagtggtggtggtgtggtgtactggtgaacatatataaatatatatatatgtataaatgcataactgaattgtcttttgctgtttgcttagtatatcattatgacctttattttggaccacccaggaggataaggaaggtgaacactatgcaacataaattcataatatttataccaaacaatgactggttttatgtacctttcaaacactttaatatgcatgcctttctttctacttcctctgctcttttgtttaataataattcttacaaaagaaaaattggtaatggtaagtacatagccttaattataggttagaataattagtatttttgtctcttgaattttcattacaacttgattttgtcctctaaaaagtttgttaaaaatttcccttaaaatataacgattatgtaatgatgccccttctgttaggctatatttcttttaccgtaaaaaattagtatttttatctcctaaatattgactaatacaaaattttgtcccttttattaaaaaaaaataattaaaaactataatattttattaattctaaaaaaatttataaaaataattaaaaatttgataaaaatattaaacttattacaaaatattaattttacttaaaaaaaaaaatcaattattgctaaaaaaatattttcaaactttannnnnnntataaacacgtatcttaaaaaatcaaacaaaaataaaaatctaataaataatttaaataaactaaaattttattttttaatcaaaactatggaaatgacttttgaaagtgaggtaactaaattttattttctatttttttaatttaaaatcaaaatttgaaacataattttgatcattttaaaatttttaaaaacactttt

SEQ ID NO: 18023 - DNA, 4264 bp, Cannabis sativa
  modified_base (2041)..(2047): a, c, t, g, unknown or other
  modified_base (3633)..(3637): a, c, t, g, unknown or other
tttttttatcaatttttttatatattttaaattttattctattccattcttattttaattctcatttccattcttatttttatatttttatctttcccaaccaaacgtcaccctgattcatggaaaatatgtgaaatttcatttgtactagtgcaaaatccattatggccagcagcttcatgcaatgctacgtgtggtgcccacacggtctttaatcttaattattatttctctatacccttacttatataatttgctctctttctgcatatacatattattaatatttatttgattttgttttatttacctatgtgatttaatttccagttgtcacatacaacattacaaataggaaacatctcgcgtggtatcccatgattagtgggaccattctcttttaatctaaacttgtttaatattctaatatatgctaatctctaccaaattttgggagaagatatcaaataaaaataaacttatattcctttgattaaggcactaataataagtttatataatcaaaatgcaccttattacttaaagtgtattcagtccagccattttctactcataagtccaatattattactcaatatatattatataatatatcactcttgatccttctaacaagtactactacttaattaattaattacttttatatttctgtattctattaataaatctctgttaatttctctgtttatatatacttaattggttgaccaacagttttatatattttctttaatgatatatatgctcaatgattataattccaaaaaaacctaaatgggatatattggtagctgtgtactgaaagcactatatatatatatgtttatatttaaaaaatataactctctctttctcatgaataatattattattaatcgaaagttgataccttatgttaggttggtaggcctcttaatcaaaattttgggtattatttgattcgtccaccgactaattactcaattatctctttgttttgggtatttacagaaaagtcaaaaacatatgtacatgaagtttgactacaacaacaagttgttatccttataaactgagccatgcatatttattagctggagtcaagtaacaatgggtctggttttttatgtagtggacataaaaatggtgtcaattatatatatatgcatgcaaatgcaatgaatacccaataaagagaaaataaagttgacccttttctttattttcaaataataatcacgtaaaattggtatgggataagtttcaggcacatggatgacacaagtggtctctgatttttcactcctttttttttgtttgcttctgtttctgtttataattttctataatataataaagtgttatctgaactgaaatagtacacagttttcaccatttgccattttcccaagcacaaagataatgcaaataaaataataataatttaataataaactaataatagttaatcaatttatttgttcacaagaaaatttgttcggaatataagatttttattttgaaattatatttacggttttacggttttagtttatataattatctattgttaaaggaacttaatatctgcgtctgtgggcttttttatttaattgaagtccagttcaatttagggttatattattaggttcttaactctataaatacaatttatgttattattagtgatttaaagagaaaaagactttctaaagttagcattcttccatttttttcaattattatttcaagatcaatcaggtatgtaatttatattatttcgttacaatagtattctaaattttatgtaatttaatatgttaggtggcgtttaattagaggtaatgaaatagaatggaatgaaaataatttttattctattttttgtttagttgtatattgaagtattggaatattattctaatggaataatctttctaccattttagtagaataattattttattttgaaatagatagaaagactatttcgatacatgataagaaaaaatttaataattttttttatgtattttannnnnnnttctattcctatttttattactatgttttaatttctcccaatcaaacatcatcttaatgttttatgaatttgtaacatagatcatactaaatacatattatatatttttactagtcagtgtaatttggtttaatgataggtttgtcatgtttgtttaattaagtaagtacacaataattatattattagaggtaattgaaatgtttcaaattttttaatttttataaacaatcatgaaaattgaatataattatacagtataatgatataatattatcgtttttaaataatcaatattattaattactaactcctttgccaggaaaataaatttcatatataattactacttaaaatccaaacacacaatctattttaaaatagagggtacatgggtaaattgtaattaataccctattagtttcattacagttgcttccaaataaacgaaaagatccaacttttcaatgtgaaatggaaaatgagaaaagagaaagtaattagtatgagaaataagaagagaatgaaagcaaggtccaatcactggcgaaattaagggaattaatgggcatttttgtttggtgaaaagtttatatttttgttgtgtgtggggtgtagccattccagattattattacctttattacaaatatgaacaacaatcaatcaatgaatgagttaaatgcctttcctttcatttcaagcaaatgacaactattacaacgcggtttcatttcattttcttcttaaataaagtttcggtttttaatattaagctctactattattttacactgtatattatgtctactgtatagactctggtcccaaccaaagttctactctttttcaaccacaccaaaagaaaagaaaataaagtaataagaaaaggaaaaaaagagaacactatctggagaacctctgtctctctctttcccgcgttaccttatttaaggctctgcctctgaccaatttatcttgaaaaggataggcctttcaccctcaaatcaggtagcgttcccatacttcttcatataaatatatataaaacagaagttgatagcttattttggagttgtacataacaaagttcttatctttggtctctctctgacctgtgtggcaacattttgattttgatttcttttttcaggtggagagaaacttgacattgacaatggagaagaaagttttggtccatttaatatgtgggcttcttctttctgttgttttgagtagtgtttgtgtggtgaaaggagatgacccttataagttttacacttggactgtgacttatgggactatttctccactgggtgttcctcaacaggttggttgctcacttttgctctttttctacttcagatctattttttttattattttattttcaataccataaatattaagtaaaaatattctgaaaattttgtgtctgtttcttaggttatccttatcaatggtcaatttcctggtccaagtctagaactggtgaccaatgacaacataatcctcaatctcattaacaagcttgaccaaccttttctattaacctggtgagtctctactctctctctctctctctnnnnntctctctctctctctctcttgtaattgtcccacattagatctgcaaatgattttagtcctttttactgccattgttttttgggattatggatttttacactcaaatgctgctatgggttgcctcataagatgtttggtgtgtagctgatgattatgctgaagctttgatgtctaatgtagtattcatatttgatttgttatggttttaaggaatggtgttaaacagaggaagaactcatggcaagatggggtttttggaaccaactgccccattccaccaaacacaaactttacctataagtttcaatctaaagatcaaataggttccttcacatatttcccatcacttcaatttcacaaagctgctggagggtttggagctttgaacatataccaaagacctaggattccaatcccttatccttacccagatggtgatttcactttgcttattggtgattggtacaagactaaccacaaggtaggaatttcaattgtctagactcatcatcacttaaaaaaagattgcatttttaatttctgtgttcacaaacaatacatcattgtgttttaattgatattatatgcaggcattacaagctactttggactcaggaaaaactcttc

SEQ ID NO: 18024 - DNA, 6245 bp, Cannabis sativa
  modified_base (1114)..(1124): a, c, t, g, unknown or other
tttttttttttttttggctcttcttttttgttggtgctgttgttgtcgttgagctagtgcttgagttgtacgggattttgccgtacacgattcgtcttcttcgtttcgtttggtgcgtttgtctttgctggttgtcttcttcattcgagcttgtgattttccttttttttcttctcatttatatatatatgtatattttgactgttttatttcttcactcgttcaattctcctttgctgggttttttattttaatgttgcgtggagatgaaggctttgaaatgagaatggggaatttggaattcttgttaccatttttgagcaagcaagtgggttttgctttttttgggattattgttattagtataacatacttaatctagggtttttacatctagtaatgttttactcatctctgtaatgtggttgatcaatgtttgaataaatatatatttcctttttttattttttattttttaaaaaagagagaaaactgatttttagttttgtgatcttgtgggttttctgggaacatcccaaataaacaaggttttggtagtttaaagcacttgtagtaatagaatgagtgagtgttttgattattattttataaataattttttatgtggtctttgggtataaatttgctacctaaacatttgactgatgatgtatttagaaacgaactatactataaacgttataaatttcctgttgttttgacttgatatgatccttgttatagaagtttactagtattttaagaagcctaatttcctaagatagtcaaatgggtagtgttttgttttgtggttgactgcttagatatccgtagatatatataattacatgtatgttgttgtgtggaatagttaatcaatatgatcttaagtggagtgttcccattaaccaacatcccattttttcatatgcagatttgtttgagtcaaagatttcttcatgcaaaactgagactatttcatggttaagggactatggagtttataccagatccaaatatgattcctgggaaacctcctattcttaatgaggtatcaaattcacacccacattcacatccacatcaacatccacacccacacccacacccacannnnnnnnnnnacccacacccacacccacacccatacccacattcacattcacatacacataatgcctctggaagagaagtgggccaattatcacatttacataaactcccggctatggtcagagaagctgcaccagtaagagaaatgggtgtattgtcaaatggacgcttggcttttctgacagaggagctagcctcaacaagagaaatgactgctcagttatcgagagcacgctcggtttccttgaaagaagttggtaggcctgatgtgcgagatgctcaagattttgacttacctgttccactgcctgtaagaacatggaaaggaaaggcctctctaccggaactggaggatcttatgtttgatgctgttacgtttaaggacactggcgatcaaattgatgacattggtcctagttctttctctggggttagtcatccccctgaacctgttgatactgatctaatgagaacagtttatgttccaattggtcgaaataaatctgaggctggatgcctgatgaagagcatatctatgaagggtccttttctagaagatctttcaattcgggttcctcctaagaagcctagttcagctgctctttcccctgctgaaagtttggttgaggaacctgctgatatgggtggattgtctccacaattttcagtccctcgggcatcacagaacactgatacttcactccctccagattctgaggagaaagaatgtgtgtgggatgcttctttgcctccaagtggcaatgtgagtccactcagtagcattgacagtactggtgttgtcactgcaatgagtatcgttaatagctgtgctagtacctatcgaagtgatgctgtcactagtgatggtatgcttagtatagagaggaattgtgagagcaacaagtgcagtgttagaggggattcgcttgaaagcgctaaaactagtgttagtcgagcaagtgatagtagtggcctcagtgatgatagtaattggagtaacattactggaagtgcaaataagccacacaaaggaaatgatccaagatggaaggctattcttgccataagagctcgtgatggaattttgggcatgagtcattttagattactgaaacgacttggttgtggtgacattggcagtgtgtatctctcagaacttagcggcacacgctgttattttgcaatgaaagtaatggacaaggcatcccttgctgctaggaagaagttgactagagctcagacagaaagagaaatattacaactgcttgaccatccattccttcctactttgtatactcatttcgagactgatcgattctcctgtttggtaatggaatattgtcctggtggtgatcttcatactttgaggcaacgacaacccgggaaacatttctctgagtatgctgcacggtatgatttatattcttcaaagatgttttcatagatgtctaaatcttttgtgtttgcctttagcatggcttagattagtttgttataatattttgctttctgggtcttgtttttgcaagaagtttctactataatggtaaaaatcagaacgtactaaattgcttgtaatgttatgagtaataattttgttattaagaaaagtgaatgcattatgtcatggtcaactctcaattaagtaacggtctagatttttcagaagagtattttgcattctggcatataagaaaacgatgtaacattgtatcttaagcaagtatttggtttaagactaatatggttactttgtatttcctttctgcagattctatgctgcagaggttctcttggcccttgagtatcttcacatgctcggagttgtctacagagacttgaaacctgaaaatgtgcttgtccgtgacgatggccacataatgctttccgactttgatctttcccttcgatgtgctgtttcgccaacattaataaaaacctcatttgattctgacccttcaaagagaggagcgggtggagcattctgtgttcagcctgcctgtatcgagccctcatcagcatgtatccagcctgcttgttttattcccaagatcttccctcagaagaacaaaaagaaaacccgaaaaactcgaactgattttggctttccttcaagtgcacttccagagcttgttgcagaacctacaacggctcgttccatgtccttcgttggcacccacgaataccttgccccagaaattatcaagggggaaggccatggcagtgcagttgattggtggacatttggcatattcttgcacgaattgctttatggtaaaacacctttcaaaggttcaggaaaccgcgccacgttgttcaatgtggttggacaacaactcagatttcctgattcaccagcaactagttatgccagtcgggatctgatccgaggtttgctggtaaaggaaccccaacaccggcttggggtgaaaaggggcgccactgagatcaagcagcacccattctttgaaggggtaaattgggctctaatacgatgtagtactccgccagaagtgccaagacccatggaggccgagcttcctgggaaatatggtgcggttgaaccaattggtgtaggtagcacaagtaagaggatggctggcggtggaggggtaggaggaggtccgggaggggacatgaaatccgggggtaaatttctcgacttcgaattcttctagttttttggattggagaatttttgtgccatgttctattagtactatcaaagtttaccttgcaaaagaatatgcctcattactactgtgttctgctaatgaagtttatctcaccttaccttctaaaacaaaattccattcaattggaacagtagcaacactcttaaaatcattttggacaataccaacaattatattgcactaagtagaaaaattcatcatcttaaaaaaaaaaacccaaattgcaatttaatgaacagttttttcttccctccataaggaaaaaagtgaatcaagtatagaggttatccatgaatattgagagtttgttgaggttatgattgaccacttttggatcatccaaaatcattacttgtgttttaaattaaagtaaaattttaggtccaaaacactaacgctttatcttcttcatgtaaatccaaagtgagaccaaagtagaattttttaagtacacaaaataacatttcttttgtaattaaagttaacaataattttcaatacaatgtccaaactccaaacaatcacatagattgatactagctcttttctatcaacctatgcagcacagcaaggtgcttaatccaatcccaaaataaaattaaaaaaacccacaaagaaagaagatcaaattcttcagaactttaagagaacagtactggtccttgcaactagctggttaatttcttctgagagcacaagcagagagtataaccaagatcactaagagggcaactgaaacaaaggaagacacaacggcgccactaactccttggcagaaatcggtgaactgatcgcataccgccaaccaattcgcgctagcattgccgttgtgagccaagtaaactatggctgtagctgaagccccagaggaagcactcaaagtaagcgccaacttatcgaaacgaagacacaaaatttccatgttaattcacattattatagaaaagaaaaacttagctgatagagaaaaaaaaaattgaacttactgtgtctgtaataattagcaaaagccttggtccaacagcatggggtctaacaatggttacaattgagaaaggaagcgacaagactaggtagcctcctactaatgccattgcaatcacaaaaaacctgcatcgaattttgttaaagattttcagtctagtgaaaggaaaaacaaacgagttatgctcaatgctcatccacttacataaaggcgggcatgtcatcatagcttgcttcgaactggaagaattgagtgaagaagggaagagtttcatcgctcatccccatggtggcggctgcacctagagcagctgctaaggcaccgagccttagaacaaaatcggttatggcaatgcctttcttccatcctttgttctcattctttggatgagctaacattggtactttctctagcttagcagctgcttttgcatcttgaacttcaattgagattgaatcaccatttgccattttagaaaattcacaaaattttcgacacttgaaaaggaagaagaggctaatagattgaattggtagctagtaaagaaggcaaaagacttggatgagaaaagctttgtgttgtgttgtgttgtgttgaaactaagtgaatgaatgagccttatatagagatcagcttaagttgatttggtttaatgattccaaattcataccagctatatgggaagtatatggaagttgttgctgacttttcaattactacaaatttaatatgagacccttttgaacagaaattgaaattgaaattgtaacaggtatatttgctatagaagtggtttgattcaattttaataatcaagtcaaacacttagtttacatagtcaaaaccaaatattttatatgcttgatattgaataagaaacaaatatgaatataatgcgaaacctttggctaatcactaatacataaatagaacctaataaaaatgaagaccctgaaaattatatgatatatgtaaagcttgattatgattatgtattttgaaataaaatatatctttagagtagttctaattattttcttaagtattttaagtagtcaactagaccacttatttgcctaatccagtagtgtttgctggggtcctttaatgccacccagattatgagtattttatcacataccaactttatatttgtggtagtttatagttgaaaaagcaataaatgaggtagcttaatatcattaatgacacaaagaaacactattcatgaattttacttgtttaattagtatcgatcctatcgagcaccactaccatttctttacttgttacttttttaaaagttttatcactaataccaccaccataccattcatgattttttttaagttacattattagtttttctttacagtttctcaacaagtgttctaattattacttgtttgcaagtcgtctcaaccattttttttttttttgggggggggggg

SEQ ID NO: 18025 - DNA, 5070 bp, Cannabis sativa
ggaagaaaccgccaccatcctccctgcataagagagagtacgcatcttccacccctccaatctttgttttagcttgcttcggatgaaatcaaaatccttcttctttcgcctcgagaaaacaaaggggttccccagatatttttcctcatcattgatagtacttatccccaattgagcttcgatgttctcttttaaagaccttacgcaatttgaagagaaaagaatgcccgatttttgtttactacacacttgtccagaccatccctcgaacttctttaggcaatctccaataacacttgcttccatggtattggccctagcaaagagtaaagtgttgtcggcaaacattaagtgagtcaccgccggggcctcccttgatattttgatcccatgaatgttaccccgatcttgggatctttcaagcagccttgagagaacgtcattgcagaggagaaacaaatagggagatatggggtcaccttgcctcagccccctccccggatacatcttcttttgaggtttcccgttaagcaaaactgaataagaaacagtaccaacacattgcataatcaacttcacaacttcagtattgaaaccatggttttccaacactctttgcaaaaaaatccactctgttcgatcataggctttatgcatgtcaatctttatagccataagacctcccctccctttctttttcttgatcgtatgcacaatctcctgagttaggatagaagcctcagctatccaacgccccgggatgaaagcagattggtaaggggacaccaatcgatctatcaccatcttcaaccgttgagagatgatacggcttataattttgtaaacaaaattacatagggcaatcagtctgaatcggtccaccgtcttcggattgtctcctttaggaatcaaacatagaaaggcgtggttcacatttccactcaattcacccgttctaaagaactcttgcacaaatttcgtcacatcggttctcacaatctcccagcaacgtcggaaaaagcatcccaagaacccatccggtcccggcacctttaaagggtgcatttggaaaacttgtatctttatctcctcctcagaagggatttccgatagcatctcattctcctgtgcagaaattgacggagttatcaaaccttctagatcacagggaacatttactccaccagccgtataaagtttcttaaaaaaacccgttcagaatagctcctttagctgtctcactctccttctgcctaccattttcatccagcaaaacaagaatctggtttcttctttttctcaccaccgtggccgcatgaaagaaagacgtgtttcgatcacctttggccaaccaaagctccctagagcgttgtttccaaatgctttctcgacgacgcaatatctccaagatctcattctccactcttctttcctcatccaaaccatgatcatcaacttcacaagactgaatagctagaagattagtctccagaagtttcagttttgtatcacattccccaaaaacctccgttttccacctttgtaactcccctctcgtgcactgcaattttgataccatcgtacggttactagacccgattccagaccccttccaagcagcattgatgatatcgatacttgatttatcattgaaccaggcttcgtaaaacctgaaggggtaagagcctttagaaagtattggcgccgtgtccaacaacagaggaccatgatcagaggccaccataggaagatttcggactctacccgtaggataaagagaaagacactccggattggatagaactctgtcaagcctctcctttaccaatcccccagcttcccgtttattccgccaagtgaacttacaaccagtaaacccaatgtccactccacccacattaaacaagaagtcattcataattcgaccatcacgaggggcgaaattccttccccctgatttatcctccttcttatgaattatattgagatcaccgattatagcccatgccttatcatcatcattaacatatctagccacatcttcccagaactcgctcttacgatcatcatacggtgggccatatatagcatacaaattccatttttcattattagactcatcaaaaaccaaacattcgaaacccgttggccaaaccttcacagacttgaaacccgcagaaggattccaaaataaacagaagccccctgcaaggccatccgaagcagtgaatttgccaaattgaaaatttaaatctctaccaatctttgccatgaaaacacagtccactttagtctccattaggaaaacacaatccaccttaaagttcctcacccaagccccaagagcttggaaagccgcgggtctccccagaccctggcaattccatgaaagggacatcatggggagtggggagcttgataagggccgcctcctcgcccacttgaaaatttttatcgagtttaatttcactaatcatgttccccaaggaagaaatagcattaacatcatcaacaacaataggagaagaagaattacccataatcgctcctttacttttctttttctgtctgtggctactcgacttcttttttgaactggatttcttcccctgtttcgatgaagcaggactatcacagctacccaccacgaatgcagctttgtcgatatgaccatctcccaacaaggggcaaccgacttccttctccttctcaccatcaccaatgatcaccggtgtaacactacctcccgcctttcttttctttccacctgtgatctccactccatgctccgagggaaaccatttagccggagtcaaagctttggtgccaggggggttgagacagatgggttttgtaatataatgggctcaggatggtggtggggggttcgggatttacaaagttcatgttggggtacatctatcatttgggctgcagttgggcccacattgggcataaggctcattatgatattagcatcatttcgatttttacccagatttaccatagggtgagatgggcatgagcaaggggttcttcgtagggctttgttaacaatgttgatacaggggttttgtacagctgtctcattcaaatttttgtgggtccccccaaaattcccctgacaattcttggtagtggccgccacactactcgtaccacccgtaccaagagtgttttccaacgattgcatggccacgtcaattgtatgactaccctgaatattcttctctccctgaatattcaccgcctccacttcaccaggatggcctctgtttgccaacgccgccggtttgggaccaaaattatcatgaagagcagggcgccgcgtatcaaaacaatcccttatcggaacggaagccttcaaccatggtccatagagaggaacagctttccccataggagggtaggcaaaagcttttggccgagagcagttctgttcgttgtggtcgagaaacccacaattgaagcaaatcaccggtaccttgcaatacttgaaccgaatccattctcgacgattccgattaatgctgagatagaaacccgcaggtatttgagcaatcgtccgaatatccacccttagctttaggaagcccctccgagagatgactctgttatcagcaccatcatgctctatgaactctcccaccttggcccctatgacagcagagttttgagccactagatagggagttggtagcccatggatttgaacccacaccgaggctttacacatattcacattctgccagcttccatcctccggccaatctctaatattgaggagttgattagagattaaccatagccttctttttagaatctccttcttatcatcttcatagtcgaaaaagaaaccccacagtcctttctcaagggtctttatcttccaggctcctctcagaaagccccacacccccgtaaggatctgcttgattctgttttcggacatactccgagtccccagcagtttgaccacaatccctattttcactatttcagcatttaactcaaaatcagcttccaattccaaagttgcttcttccaagaactgtagccgaagattttccacctcctccgatgtagtagacataacttcattctcaccagccattgaactttcgaaagaaaacaaaggaaacgagagagaagatacacagcgtatcagttggtattaccacatctcacacagagaaaattccatctcacagtacatgttactgatatttatttttacttaaataaggtataaagcgtcccacattgggaaaactttcccagttgtgcatataaaaggacgctaaagctatagtttaattaaaaaataaacagaagaagaaggagaagttgctatctgttgaatctttgaaagtgagagagaagaagagagaaaggaattctgttattgcttggaaagaggtactacaagaaaaataggtgtcaatgaggacaaatttcgtcagtaaaaaatattttatttgttagtaatggctatcaatggcaacttgtcgtcaataaaaaatcattggtgataattcatcgctaaaagtaagtatcaatgcatttaaactcgtcaataaaataagtatgaataaggacaatattgataatgtgcatgtatatatctttatatattaaaagtgactatctaacagttttttttggtttaacagaatattctaagaatataaaaatattctattaaatttaacagagatgttagcattatttttatctaaatatattaatattagtgttttaaaaattaatattacttttaatcgtataactctaacacgaaatacaagctaagccaaatctaatttctaaatatgaatttatcatcccttaagactccatatgcaataaaagctctagaaatccctagagtattttcaatcgattgaaatcaaccttctatttggctgatccagcactagaaggagaggggactatcggacaaggtaccactgagttgttggcgtcagcaggtggcgacggtgcgaagttggtgcaagcattatcgcctcggagggctctggcagattcgtcgtaggctctggcggcttc

SEQ ID NO: 18026 - DNA, 5169 bp, Cannabis sativa
atatattgtcaaaatttccaaagttatttaaagcaagatccaataacttcaattgggcccaaattaaaaggcccataacaggtacatatgggccagcaatacaagaatgaactataaagaagcacaaacctcaacaactagcttttgtactataaagccattatttttatctttaatttggaccataacaactcatttgctttcagcttttacatattgtccctctcttttttcatatgctctgtatacacttttttcaccattattcactaaattttatttccctatttaaaaccactcaattataactttcgtacaacaaaacccatgaaaccattttttgaagaaataataataataataataatactcaaaacataattattgatgatccctaagaaaacatcaaatgttttatttccatctccactaccactttccacacgcttgtgtctcagttttatacttttttttatatatgtaatttaaagagttatctaaagtgggcaaaaaaaagtttgagaaattattgatatatatatccctaatatgtatgtataggacatagtgttagcttttttaaagattgacatcatcctataattttcaaagggttttttttttttttcttctacataagaactagagattatttttggtgattgagaattgtctagtacaattgaccattgaattaaaaaaaaaaaaaaatacagttgaagaccagtgaaagaagtccatccaaaggtttaaaaagaattatgtattgtcatatgtctttaccataaaacaagaagatccacctaacgaggctgcaaagcactctctcctagtccttaccaacttttctcttttactaattcatttaaaaacttaaataaataaataaataaaatgagtgtttgtagtacgtagtccaagctaggcaaagctctagtaattgaagttcatacaggctgtaacctatcctttaagaacacgtggcatgcatagaacaaggtttgatccttttggaccactagctcccacgtggcctgggccatcccttgccggctgtgccacgtggaccctcagctcaaccatgaaggaccacctattctcccttcttcttcttcttcttctacctcttatcgatatttatgtataataataatatatttatagcctcccaaaatgatgagtaaggccattttgtgttatttcacaaagtgttatgtatgctttcaataataatttcaggtcgttttctacacatgggtccatatatatgcattgccctaaaaggcctcccaaaaccccaatggccatctacactaacaccacaccacccataataaataattttaatgctttttcactttttctttttggtaccttctcatgccaatattgtttttattttattttttatcttggcttacatataaaaatatttactcatcttattttgtcatttttattcctaataacataaataattaataagtatatacaaaacaagaaataattaatacatagtgtagtaaaattatatggaaaaggttgcgaacaaaacccatgagaatgttggtcctttagttaatgtcatcatcatcattatatatctcatatgagaaaatgacccactagagaaagacatattgttgtttggttctcgagcctaagacacattattattgttattactttttcaaagaaaattttattaaatttaaaatttgactatttttgtcataaaaaatatcggagataaacatctaatatagctagctagctgtataggctacaccatttgcgaaagggagactcaaagacacaatccaaaaaaaaaaaaaaaaaaatcaactacatattattaattccttataaacttagttttattcccatatatacaagtattgagatgtgtatattctagtcaacatgagtatcatgatagccaccacaaagcttaacatttttggccttttcccactcatgagggtctatatcacaatggttataatatatagccttgaaattttggaggggtcttaaatatttatcaaccaaaaagttattttgggttgatatataatatagctatgtatatatatagagagagtaggggcttaataattatatagtgatcgagatcgatatccatggtaatgtcatcctcaacatctttaacccaattagcctcttacacctttagatcatgatatttttatttgtatatatacactacacactatatattattggattattaattagtttatatatttatagtgacaagagataagtggaaaagaggagcttccgaattcaaagtgtccccatttgcaccatatatatatatattatataatgtattgttttattaatcaatcgttttacttggtccacaatcatattataattaattaatttaatataagtatatatatgtaataataaatataatattatgaaccaatatgttatacaatctaacataaggatatattaagaatctgttgtatatatgctatatatattataatatgaattatctcttggaaaactttggagagagattcgatctagctataatatatataattaaaaaaggttattaatatctctcttactcttgtccccttagtgagtgacgataatatttcttatgttttgccccatttggcttactattatacactaattaatagtatataaattttgtttaatttataaacaaattaaaaatcttgattatgtctatggagtgtgacatgatcatgaatggcacctttgaaatggacaactttttaagattactctaataatttttcctttttcataatataagtcgatgaatttcaactggttggaccaatgagattagaaactgaatcattaaaatattagggtttggtagagcaagtcacacgaggcttaatttgtaagcaagaaaacaaaaaacatattttggttgcttaatgtagttttatatatatgtagaaaacctcatttaagggaaataattggttagaacatatacatcattattaggtatggataactcttatattttcttttgtttttattgtttggttataattgtatataaatacatgattatacattttgacaagatattagcaaataatcatcgctttgataacattaattattagaataaatatggttttccccttaaattataataatttgtagagttttgctcctctaaagttttctccctaagtttttccctgttgcaaaaattcatttctaaactatacaaattgctgcaaatgttatttttcattttattttgctcatcttttaaaataatttgcttatagtagggttggtcttgggcataagcgggctaggctcgtacctagggcccactcatttcaacaacccaaataaaaaattatctttttaaaaaatatacacattttttttataatttttaaaaatactatttatctttacaataatttttaaattatttacctttatattaatataaattatttagaaaaataagtagaatgcaactttaaagcgatatttgcaacgatttttatagtttagggaaaaattttacaatagagagaactttagagagtaaaacgctacaagaatcataaggataaatcctatttattctaattgttaatatgtctatatatacaatataacctctattcaagaatatattttagactaatagcaaaatatattctaattgagaggttataactaaatagagttatactaaaaaaaattaaataccaaaaaatatcaatgtagcaataataacaataaataatcattaatactatatcataatagaattattttaaagtaaatataatatttatacatgtattacaatttgaaataaaattattaattttacgtaaataaatttacaaaatatatgtatatattttattaagatgtagttatttttatataaagatatattttgttgatacgagacttaaaaaatatataaataattacaatttagaggttattattcttatttataactggcttaaattgagacttgatttttttaatattaaatttgaggttattcttgaatagaatactcttaaataaatgttctacgtactgtacacgtacaagcaaggaaataaaattagtttccaatataacttattaatttagatgaatgaactttttatagtgtataaggctctaccattatgttctattacacaggatgttttgtgattattatatatgataattgatattgtattataattataggaaaattatgtagcattgattatttttaatcaaaacctttaggttctaattgtacttatggaaagtttttcaaaaatttacttttatgaaaacaatctaaatatcttttaggaaaagaaaatttaaataataatatgtacatacgtagttttttttttttgttgtaacacaagaaatatatatagtttttaatataataaatttattatttatgagacattttaaaaaggttttcaaaacaaaattatgagggcttagacttaaagtggacaaaattatactaatattggaatcaagttgaggtggcggctcgacaatgtggagaaatagggcccaacaagtggtatcagagccaaaaatttgggagagaatagtgtgctgttgcatgtgaaatgtgtggaagaagccctcaatatgatgacctcacgattgaagatatgtatagtgccttgtgtcgaaagtatacttaatattgtggtagtcaggtggcgtgtcccatagtgattacgacggtacaagatggagacctgtgtttggtgcctagtgttaaaagtattcttggcaatgttgaaggtcagacgacgtgtttcgtgaggcaatagcggtagtgcaagatgatttcactggaggggagggcacgagtatgtagtccttggtttgaggggaggattgttagggtattaacccaagtcccacatcgaaagatgatgcaagagttgtctagaatataagtattccactcactctattagtatgaggccttttggaaggtgtccaaaaataaaaccataaatgaaggtttaagcttattagaacagataatttcatactaatatgagacttaaagtgaggtggcgacccaacaaggtataagaacgggacccaaca

SEQ ID NO: 18027 - DNA, 2752 bp, Cannabis sativa
  modified_base (2269)..(2276): a, c, t, g, unknown or other
gaaaccatggtaaatttcatcttctcttccccaaaaactttctgaagaggcggatcgcaattaaaatatgaagggtcatgtgggttctgcaactttctagccttcacatactgccaaatagcagcaattattcttgggcgagtatcaacttcaacaccgagaacttccactaaaggttgtgatagcttaaacttctcaggaatgtagttcatttccaaccgtatattcgcactaaattctttatccccctttctcttcacctcaaatccttcgtgaggggctggcgctcgagcattttcccatactataatgtgattgtcagggtatagtctctggtcaagcgaaatagttactcttttgaagaaagctgagaacttcgggtacaaagggtttgttttctgaacagcaccaggctgatcaggatctattccatcttccaagatccgcccaactatctttagagaccaagttggaggctctgcattaggcttttttggtatggtacggatctgatttgcaaaagtgttgaacacgtaaatgcgaagggttttttgaatgcaaggcggggttttaagagcctcttggatgtcaactttctttctggtaagagcagcatcaacacgactctcgaactcaagaagctgagtatacagagcagattcgggcagaatggctgctactttatcttgtaactgcttctcgggaagcttctgcttctttctacgagctgcaggcgtgagttccattgttctcataggcgccatcatgtttggaggcgaaaaaccaggagggcgtacaggaggtttttgaggcattcttttcatacctaaactacctggcgtcgaaaggttaggtgaagaagagcccatgttcacaatcccttggttctggttaagggacagaccctgagcttgcaactgggcttggaattgagcatgagctgcttgaacctgagcttgggcatgagcctgagcttttgactgtgcatgggctatagcctgtgcttgtgattgggataactgatattgtccttgaaagccagctgggatttgaggttgaccttgtgattggggaaagttgggattttgtcccatggatgagggaaccataccagcattaccaaagggcgaggaagaggccccaaggttcttaggtgggttattattgttcattgacataactatctttaaccagaaaacaaatctaaaaccaggacgcctttaacatcctacattcaaaacccaaaacccatcataaaacatatcaaaaccaacaaataaagacacattcagttaaatttacgctatctcaaccatgaaatgaaaacacaacaacatcaaaaaaaaaaaaaacaaaaccaataaaattcaaacctttaacagtccatctcacgagtaacacatgataaactaataagaagaccccaaaaccttaaaaatctctaatttagttggctaccatagtatacgagccctaaaacatgaaagaggcactaaccctaattttaacaaaagagtttcagtacaaattgggaatgaaataagcgaaattggggaactttaaagaagacccagatcgtgaactagctcttaacctttttgtatttgtcatatattttttttctttcttcagctaatgaaatgagatttgaagaattgaagaagatacaagagctttcgatgaaagaagaagaatttaaacaaaagggttagcataattcttacaaagtgagaagaaaagcagtgaaaggtctgagcttgatggtgattcctttgttgtgttgtagttgttgaggcagacgagtgtggcacaagactgggggcttcagtcttctgtacatgcatgattgctttagcgctcttaatacggtgaaatttaaaaaacaaaaaatatattaccaacattttatttttttaaatatatatacatttggatcctcatcctctataattctttttaaagaaaaaaaaaatccatatttgccaataatagacgatcatgtagttcataaatttgaaaacaaaaatggataaaggataataatatttcactttttttttaataataataataatattttacttgatccaacatttaattgacttttttctttttataattagaattatcttaaaatgtcaccttttttattttaaattttagggttattttttttaatgttggggttaaatgcaattttattcttaaatttgattactttttataattctaagggggctaaataggttttattattattattattatnnnnnnnnttattattattattattatgggcttttttattaataaagtgtagcgatatataaataaaataaaatttgcgtggggcattcagggatgataacatgtagagtatgggtagagtacgtttattttacgactttattttatgaaaaaagttctacccttaccttattctattactctataattttttgtagttacggtataggcatagagtatctacaagtaaccctacttaataaatttacgaaaattttaaaaaatttaataaacttaagttcaataatataaaaaattaccaatatatttataattacttaaatagtaagttttaattctatgaattgtaaaattaatcaaaaaaatataattgctaacaaccaaaataatacccaaaaaagtattagaataataaatagttatgttagatttttatatttttataatagttaatgtaaaagtattttttaaatatgaataaaat

SEQ ID NO: 18028 - DNA, 4578 bp, Cannabis sativa
tttcctagtttcaagtatcgatctactagtttaaagcgcagaaagaaacaataacaaaaaaaaaaaaacccttttaatatacatgtttttgtgattgtgtgtgtatacatatatatataaattaggttggagcaccggttgaggtggttggaagacttgaagaagcttgctcatcagcagctgcaatgggccaaatgagcagtagtactggctgcctaggtgaagatccggctttggatcagttcatggaggcttactgtgagatgttgaccaagtatgagcaagagctttcaaaaccctttaaggaagccatgctttttcttcaaagggtcgagtgtcaattcaaagctctctccctctctacggattctggtgatcctttatatttatatatataaatatatgaataataataactttggtttgctggtgaattatttttgcattatatttgtgtttggtagatggtttctaactttttgactgatgactttgatgtagaatatatgtttaattaccagcttgcttcatataaaatataatatttttttcattgcttagccagatgtctgtttcccaagaaccacatatatatataaaaatatatgttgaaaagattgttccgcgaagctggttcttgactgctgcttgttctttttcttttttctttttttttttctatttctagtgtttctccttttggttttgcttggtttgttttgttcttgttttcttgtctcttgctttattgtttgcatctgtattttggtgcaagggtagaacttcgaagcaattgtgttgtagctttacgtttagctctctgggatatagatccatatgaagaattccgtgagcttaattgactgaaattaatcactgttattgttctttaactaatttggtacttttagtgtgaaaagagaaaaaaccaagaggttaaacttacaatatttgtctagttatgtttttatggctttaattgccattatttggattgtaataagttgttagttgctatgcttgttataaggctttggtacttagaatctagcttgtacttgtttcaaaatttaatcacaaaataggttgcaatactgttgttcttttggattttatgtatatattggaatgtattcatctattttttcagtatcaacatgaaactaatcttatatgctatacattttgacacagccaagttaggcacatttcttatgcacaatcacaattgtctgattaattttaaataatggggtcctggttataattgaataacatgtgtgaaatctatctttagtattactttattattaaagatgttaaactaaatacaccaaatcttggagactgttatattaatcaattagtatagaacccttatgagatttattttattttattttcattgcttttgctttatgttataacgttttttgttttaatcttggtgtttataaattacaatatatatcctatatgcaaattgcttgttctctcttttttaaagagaaacatgttgaagaggatagacgccttctacaccaaataaatttgttaactgaaccttttttctttcacaataataactaaaatgtggatttgtgtgatgtgtttttttaccatgattatatattattcagattcatatacatatgtaattaatatatataattaaaaagtacattacctccttcacaccaattttaatttttctgcaagtttgtgttcgtgttagctttctctatcatttgattgtcttattttatactctagatattgccctttttttttattactacgactgggttgatcatattttccatttatccctggaatttgtcattgtctttatttatgttacatcaataatttcacttttggattttgactgccttgttcttgccacgtatccatctgcataaatttatgtttcaaacatgtcctatttaatgtactgaaaataatatgcgtttctattatgtgtaaacaaaatatttggatgtataaatttaccatagttcttgaaacttagataatttcatgttctcaaactattgtaattttgatatggagaattccacgtaataatatatgcccaaggtggtgtcgtggtgatcactatatatatattcgttagcgtacttgacttgtgtaagtacataattatagttttaattttattttctgtgaccaaaagtataaacgttttctaattttctcatacattattgaaaaaaaaaatgaaaaaattaaacgcagcgactttaagcagaacatgcatatgatttaactgtggtaaatctcaagtttcaaattaataaagtattactagacataaagatgacagctataaaagttgctttctagttaattaattacttgtgtatgtgccagctgtcatgaaattattatgtaagattctcttaatgatgagtacaaggcaaaattatgtgaaacaacttaataactaactatatgtacatatatatgtcttatgcaaatgaaatgttatttgttcatatatgcatatatgtaaatttgcatgaatgttttgttatatttctagaagctaaaattattattattactatccgtggtatatctttatatattatataaaaacaggttttttgtttatattattaggttgtcgagatggaaatgtggatcagaataatgggtcttcagaagaagagattgatgtgaacaacaacttcatagatccacaagcagaagatcgagagctgaaaggtcaacttttacgcaaatacagtggatatttagggagtctgaaacaagagttcatgaagaaaaggaagaaagggaagttgcctaaagaagccaggcaacaattgcttgattggtggagtaggcattacaaatggccttatccatccgtatgtataattgtacttcaaattacatattattataaataccctttaatttgtttggctcataaatattatatatatatacgtgcaggagtcacagaagcttgccctggcagagtcaacaggtcttgatcagaagcaaataaacaattggttcattaaccaaaggaagaggcactggaaaccttcggaagatatgcagtttgtggttatggatgcagcccatcctcatcacttttacatggacaatgttttggccaacaaccatttccctatggacatttctccctctcttctctaaattataattattaatatttttagtactagtactatagctatatgcattgacttaactaaaactactcttgttatcctagtactgatcatgagttaatcaatccccaacaatatattatatatataatatgcattttgtatgcatgcttataaaacctaccttttggttaatggttttttatttttgtcattataattagttaatgatgattatatataaatgaattgtatgctttgtaagttagcttgcatgtatcatgtacgttgaggaagtcaaaagctaatttttgttatttgtttcatgacatttttagcatggtaatataatcttagtgctgacactttaatgtgtagttctataattgactggtataggtttctttttattttatatatatatatatatttttggagatggactgtttttttgtgattttctgtataatttatatctttttgaaagttattgatcgaaagagaatattttatcctaaagaggatacggatacaactgtctggtaggttggaaattattgattctttataaggccagggttattaatatatattcttagttactgggaacttgttctattcgatcggctttttattgatatgaagatcaaatagaactgtttcatcctttagggtttgaaatattagagtctgttattagtttgaattgtgtttggtgtgttctctattataaccgtgctagatatgttatctaattgatggtgtaaaatattaatttttaacattttctctaacgtaacttcaccatttagattttctttttctaacttggttagggtttgataataatcaatttcgtgattatttaattgtatgatttattcaaaaattattgatcaattttgtgattacctgagcagcctagttttagctagatgtatgagaaatttaactgaggatcaataaattatggatttttaaatatcaccatatcgccgacactaatttaggtgcatgcatctaatatattaatttcttttatattgcattctgaaattaggtgaggtgacatttggtcatattgtgacctattaaaatattgttgacatgatccatgtggtaagagcatctccaatggtatgaaaaatctttagaagatgtttggtgatgtggacatattacgtggtaaaatattgagatgctgtgttattgaaaagaagaggatggtattaattttagaaatttgcatggatgctatgttgtagcattgatgctattcattattttaaataaaaaattgaagctacaaagttattgtagctaaaaattagaatatatatgttaaataataatgtgtgagatcataattataacattttcaaagagttttatacatttgagcgttttt

SEQ ID NO: 18029 - DNA, 4383 bp, Cannabis sativa
aaaaaaaaaaaactaacacatatttgacatcaattccataaggttttcttttcaaaccatcttttctttctttttctttttttcctctctttaaacattagaaagggtgccctatgacaactttgatactgttatcaaacctgaaactactctatgtaattataacaatatgctcaaacacattaattttcttttaataataatagtaataataatgaaagggagctagctcgtataccattctgttgaatgttttgtgcaccatctaattgggggactttgaaagagccctcaaacagaataccaattaactctttgctctttgctgctgctgctgctgctgctgcttctttacacaactttgtttgcctgcaacagaactctccttagctcattcgcaataccttgcagcactactggtttttggatgacaccgttgataccaatctgaatacatctatcccacacagcatcgtcgtcgctcgtggctaaggcgatgattaatggccaactacggcttcgaaacttgcgaattctacttgcaacttcataaccatccaactcaggcatgtggagatctagcactatgatttggactggtgatccagctcggctaatagcgctcaggcattcaaacccagaagcaagagctgttacagtacaccctagcttttcaagcagcttcttggtaacaaccctgtttacatcatcgtcgtcggctaccacaacttgcagcccactgaaaagagagttggaaagcgggtgctctgatgatcctcctggttcagagattgctactgcaatggacggtctcagttgaaacctaagaaccagtgccatgctctgagtaaatccttgagagcttggggctacccaaatgttcccttgcatcatctgcgcaaaaacaaaattgggatttagtaatctccttcaactcaaatctcaaataagtagaagttataagccaaagttgtaaatatactgaaaagaacatcatgtcttgtggtgcattgctttgatttagtggcaagatcttgaaccatccagtaaaagcttttcaaataaaaagaagctttgaaaaagttgaatcaaaccttatgtcgcaaggaaattcacgtgattgaaggcacctttcttaggtactcttcgaaagcaataagtagaacaaggttacggaatgcatattattaagcatgggcgtcaagtgctcccatccacgcatatggaattaagaatttaatgcattttaaaaacacatactcgtgcacttcactacaaatatatcactaaacattctagtgttttgaaataaagtgatgtggaattaatgtaggtggcctaaagaatttgaacagatgctaaagcatgtttattgctttcaatataaacagtcaactactttttatagaaatgaaggatgtaaaaaccttggtcacttccattgaataatgcacatctataaaactataataattcaaaatctagcattgctctaatcaagagtacgaaaaaaaatatacggtagcaaaaaagaaaaaaaagaatatgaaaaatatctctccttcacatttacacacaacaaagacatagtttaaaaatcctacctgcacaagttttttgcaaacgctgaagctcaaacgctcctcaattccatcattcacgtatctcctatcgatgggtggtgctgctgatactgacccgtctaatagaaaaccactatcactgaccctaatctcaaatctgatatgtacatccccatcagtatgcctccaggctgcccatttttggtcactccttccctgacttccactctctggaaaaactctgagtatgaccaaccctccttccttgttcccatttaaaaggcttccaatcatatgcaaaagcacctgaaaaacccttttctcatcgcccattatataatcaggcaaagacttctcaacatcaacagcaaaactgaaacccctgtacaaacataagcatttggcaaggcaagctgtttcttttattagggcatgcaaactaaaggacctcgtttccaataaaaatcttccactatcttttgtagaactatccatgacatcatttatcaaggtcgatagaacattgcttgttctcaccatggcatcaacaatagttcgctgctcattgctcagactctcatcttgcagcatcgagagcaaacctaagacagaatgcattggccttctcatcccattactcattactttctggaacgaatttcttgcctggcttgctaacatagcattcctttttgcctgttgcaatgctcgattctgctcagccaatttctccctcatgagttgagactcctcaagaactgcagcatgagaaagtgccacagccacttgatcagcgactacctttactatctcaagttcctggctgctccaagatctaggctgtccgccaggaagaaccaaaagcaaaattgcatagcaagcctgaatatgctcaggagttccacctttgaagttgcaaacccgaagcattggcatcctgattgcagccaccggccctggctcaccagtctctccactcctcgcagcaacaagagctgagtccggactaagaatattcacaacttcacttcctttgatcctcacaacatcaggttcaccaatgggtattgaaacattatacaaattggaataatttctccctttcagttcatgagttagaaccatttcagtcttattatcattaggcatccaaaccgaacagtactgcaagcccagagtctcagatagctcgaaaagggtagtgtacaaaatggtatgcctatcaagtgacttccgaatctcatgagtaagcatcctcacatgtaaaccagcttctttctgcttcattatcatcccaacctctcggccaaggtcccaagttttcttctttaacatgaattctctcaccttaacttttagaagcaaagggatgagagtgatgagagttatggcagtagcacacgaaaccagagcagtgagaatcttgaagacagtgagagccagcatgagctgaaaagggtgagggccataagtccacccattaagcaaatgtgtcatcccacaaagcacaataaaggaaatgaactgaaagagaacccatttgaatggcacattggagcagctaacaaagtaaagtagctcaatggggatcgaaaaataggcaaccgcgattaagaaatcgctcactctctggcattctaaaatactctcaatgctccataagcttccttcatcgtcacaattacatctgggatactcattatcagctccggaagccgaaactgatatgagaatggaggaaatcaacagcccagatgctaatgttcttattaacattgcatctaattacactacttcaatccatttacacgctcaagatatctgattgaatcgttctgaagaaaattcctctagctaattttgatcgaattgtaactgtataacaacagtctttaaagctcatttcctgcttgtttttttcaaaagaaaaccaataaataaataaaaaatataagacccagaaacaacaataacaacaacaaatgattcaaaatttgaaggattataatgccaaacatataatagagatctagaaggcaccaaatcaataaactttttactctcttttgcgttgcactctaaattacttgtccagagacttaaagctttataataaacagatatattaacagtggtgaagaacactacatttttcaatacgcaagtctatatacatatatatatataaagacaatgctcaaacaaaacagtatcacataaaaatggaaaatacgatagaaacccagatgcaagaaatcctttataaaacagaaaaaacccaccaatccaaacctcttcctcttccacttagaatccaaaacataaatctataatataattctttttgaaataaaataaatgcaggctaaacatcaccaacactgaagaagcaaacagagccaaaatattttattcaaaaaaaagtcccagattccaatcaaagccggcctttcagatcttacccttttcccacatgcagtatggagagtttaactcaaagaccatcttcttcttcttcttcttgcttgagcagccattagtccgaaaaattcatcagaccatttaagaaggaagtacagtcctcctaaactcctcacccacatcttccattggaaaaaacagagaaaacccagaaccaaatccccataaaaatattaattataatttcaaatacgcccccaacaaaagaaaatgatttttttttaataatctatgacaacaactccaaaaacccaccacccataacaaaaaaagaaaaaagaaacagatttttttccccacagaaaaaaaaaaaaaaaaa

SEQ ID NO: 18030 - DNA, 12142 bp, Cannabis sativa
  modified_base (10368)..(10371): a, c, t, g, unknown or other
acattaaataataaaatatttttgtcaattaaatatgccaaaaatagaattaacaacctaaaacctcaggattttagttgataggcaaacctctcatggttatttacatggcagaacgcctgtgactatactgatcgcgtattaagcatttttatattaaaaaatagaactcgtgagttcatgatgagttgtcgcatacattagtcatttagactaggcgttgtaaagatgtggtctttacgtgggacataggggagaaatacttggtcaccgcacaatcgatatatatgcgtgactatgctaacttctctccatgtcatgtttttacgtactatatatgaatagtgtgcgactagacctgtcttggtcacactctctcgcaagtttagatcatgtaaggatagctctactggagttgttattaacatgtcatccttttttaactaggaacagagtccacgtgtcaacaatatttgactgcgttgtatttttagatgaaaaaattcattctataacaatatcaattttagaaatatattgaaccgttagatttggatccaatagccaataataaaagaggcatttaatatatatatatatatatatatatatttacactatatcaaatatatctaactcaaacttcttataatgtaaaaatgagatttttttttttatttagatagaaaaattaagtatagaaatttgaaattttctaatactgcacatccttggacaatacttgattggaaagaatgaaaacataagaatataaatgagaatgaggatgtataagaatatgaatataatagaattaaatttaaaatgcataaaaaaataataagaaaattattaaatttgttctcataatttattagattaatttttatttttttgcaaaatgaaatagtcattctattaaaataataaaaaaattattctaataaaataatattctaatattttaaaatacaatttaataaaaaaaatgaaataaaacttatttagttcctatggactgtaacacttttttcataagttataacatgtttgcctctcacatcacgcaaggcaaattgttcatgggaaacatgtttttcttggatggctacaacaaaacgtgtaatgtgaaatatatgacagtcaattttaattaattactcacacaaatacataataatacctaattgaatatatcaaagcatatgtatgcccaataatacctaattaattttgttttaggttaggtatttacctccatctttatttgcaataacttttaaattcctaccaaactacatacacacaggacggattcacatagaagcaagaaatataatttaaaaaaatcaaggaaaaaattatatattttttagatagttaagatatatatttataatatatgaaaaatatgtatagacataatattaattttagtttaatagttaagttaaattgcatatataatagatgtcaagagtttaaatttcgtctaaaacaatttttttaaaaaaatttacttgtttaaaaaaaaattagtctattctgagtccactactacacctaactatagttttatcgtttaactttctaaatatgtatataatatcattttattacgatgctgaaaatattatcaaattaattacactaaatattatatattaatagtaatttgtattatatatgtagattatgttttggcatagtgaacaccaacaactactaacactactccagtaccaacattaatagctgataacgatatgcattgactaagttcactatatatatatttttgttaataatagaacatggcaggaaaatgcccatgttgggttggccagacaaaatgacgcggtatgaatttgacccctcatatgtgtattacattagtatagcccacaaatgtttacgtacatacaccatagtaaaatgtttaatatatacaaatcacaatttaataaaattcaaattcttcctaaccatattagctaacactagtgtccaacattattgcaaattgttattttagggataattaataattttttacaataattattaaattaaaatatataaaatttattgtaattattattatcaaattttgttaactaaaattcttttctaactcgtacagtccattgctggatgatgttgtataaatagttaacagtagtagcatctctcattgtcatttatatatatatacatacatacgaaagtcctaccctaccctacctgccaccctcgttgctagcctacaattcttgcgtttattactccaataattaaaattattaaataaaacagcttattttaaaagaaattgcaagagtttaaacataattaatatacatatgtttttttattagtatatatttatatatttgtttacaatataaaataaataaataaaaaatattgtgaatagaccgtacatgtgagactagctcaatggttgagtgtgtagagttgtgatgaggagacattagttcaattttttattatatataaacagagtattagtacctaatatttttcacaagtgacatttcaagattaattaacgatatttgttattgggcactagtgatacttagcattttctagacgtgtcatcttgcgattggctaatggtacttcttagaagttattatattaaactatatgtgtctcaatatttaatttgaccaatagtaatattaacacgtaggacggtgataaaaactactggtatcttttaacattttttttcttaaaagttatttttctaagttatatacgacctactatttaattacaccaaccaatagtgatatcacactaagatagatattttttttttgttttgattaataaccctgggaacaggagacaaattgagaacaacaacagcaaaacaaacaaagagacaactgaaatccaactagcaaaggagaaagataactactatttaaataaaaagatcctaaatctacaacaaacagagaattaaggacaatcaacccctgctggcgcagagggcagagcgccaatctcagaagacaaatcaatccaaccaaaacgattgttctgattcgcccatttagccaccgaatgggccacaccattgcagttcctcgggatccaggagacttcccaaagagcaaactgagccattaaacacctgaaggtcgccacctgatcctgaatattatgatgaagagttccaacttcctgcaaattagacttcaaggcagagattgcgttggatgaatcattctgaaagatcatcttcgcatacccatgcttcagcgcttcttcagctcctttacaaagaaccattatctctccgataaggggctcactcacattcagccgaaatgtgaaacagttgatgaatcttccatcttcatttctgaaaaccgcagcccctgccatctggtgattcccgatagaaacgtccgtattacacatcacccattcgggagggggggagccattcaattaatctagcttgctgtgattgcacatcctccgtgatttccagaatccttgtattgatatgatggatgataatgtggagaggtgtaggcgttccctcatgagacaaattatttctttcacgccatatgctttcgaatatgatggcagcccctccaagaaaaggatggagatgaagcccaacggggcaattagtatctaaagcaaaccagtcaagccacccttcccagcagcttatgtgaaatgaatccgttcttatctgccaccggctgccaaaccacactgctctcgcaaagtcgcagtgccaaaacagatggagtgaggattcaacttcgctatggcataaagaacaccttggatctgcgatagagaatatggaattgagcttatccttggtgaggagacaattggccacaattttccaccataacattttgagtctctcatgaatttttgaaccccaaatgatcctccacttgttgtcactgtcagctctaacatccatgttcttgatcaccttgtaagccgatttcacagagaaattaccgttgctctcaggaagccacaaccaagtatcctcccggggtgtacttggaagcgagatgtttaaaattcgttttgcatctgtctctagaaaccacattcggatgagcggtttattccaaccaccttgagtaataaagttgtggaccatgctcattccagcagaggcatcaaacttgggttttggtttaaggctgccccccggtacccaaaggtcgaaccatatggaagtcgagttcccatcaccaattcttcgacataacccctttcccaaattgtctctaacctttagaatggctttccatagagtagaatcagaattcttactttcaacatccaagaaatttcgattctttaaatatttggcctccatgagatgacgccaaagactttccttatctgttaaaattttccaagcccacttcattaggaatgccttattaatggcttcgcttgatttgaatccaagtcccccattaactttaggacggcaaagagtctcccaggcaatcggatgcagttttctcttgtgagttgagtcaccccaccagaaatcccttaggagtttatcgatttggtgtgccgttgaagttggtaggacatcggaggatgcaacatagttagccaaagaagaacccacattcttgataaggcacgccttgcccgcataggataggagcttggatttccaaccttgcactctagccaacactctgtccactagaaattttgtgtcctcggtacgcttgagggacctgaataatggtatacccaaatactttgcctttttggacattctcttcatctccagaagctgagagattgcttgagccgtgcgtgttggaaccattttggaaaagaaaacagaggatttctccacatttacagtttgaccagagtacttacagtattcattcaaactatccatgaattggcttgcttcacgaagtgtagcctgaccaaatagaatgatatcgtcagcaaaaagaaggtgacttacggccagaccatccctcctcattttgaatcctttgattaggcccctctcaaccttttcaataataatttttgatagaacatcagctcccaggataaacagagtcggggagagcggatctccttgtctcaatccacgttgaggttgaaatttgcctgccactgacccattgagaagaagcttgatctgttccaccataatgtaagaattggtccattgaataaaacgacttggaaagcctatacgctgaagcaccgtggcgatgaaatctcattccattttatcatacgccttttccatatcaagttttatcatcataaaacctctcttacccttctttctattcattgagtgcatggactatctctctagcaatcatagagttctctgctatatgtcttcctttaacgaatgacgcttgattgggagaaaaaactttgttgagtatccatctcatcctagaggcaagaactttggagattaccttgtaagatatgttacaaagagctatcggtctgaagtcagtgacaagggccggagattccttcttaggaattagcacgatggatgtgtcgttgatagttttcggtagctcagttgtattaaagaagtgtagtaccatttcaatcaagtcggcttgaacagccttccaatggtgggcgtagaattctaagcacactaagatagatactaagcactaataataatgtctttttaacaattctccatataaatgttgtgaacaaatctaaaagctgtaatgaaagctaaaatatcgttgactaacctaaaattaggagagccaagtgttaatagtaataacttatttgcttgttaaagaaaaaccccttatttgcattacataaattgattacgtagatgggcatgcttaataataatatacaaattatgaataagacaattttaaattgcaaaaggtcacaaaatatatttcaaacttagaagccaaataataattagcataatattattataggtatgatttacgttttcaactacctaaatattataaatataatacacaaccaccatttcactaattattataaatatatatgatttattttaattaccaaatataaagacttatcaaagctgatcatttcacatatatggtgccttatatatgactacgagtctgtgactgggagtcaacagaaagcgatgttccaagaccaacttctcttaataaattaaagtgctacaatagcctaaaaattacaattaattatatattttgtaaaaaaaagagaaagtatatgtctatatattaataataaatgtatatatatatatgtgttacgcatttatttatgtagaatcaagaattttatcttgaatcatacctaatatataggtatatcttatttactcaattataaacagtaaattaatgtgttaaataaccatatataatttgtttttcaaataaaatatgtattaaaaacttttattgttatcaattgttgttatactactggtattgtcttttactaatatagacatcatatactattatgtgatattcgggaaaaaatagaaattcaaacgtatggaacttatattactgagaatcattccaagattttgatttatatagtttttcaatatgattcgcttcgatcatatagtgtcgtaattaactcaaattccaaataaaaattctatttcccttttttaaattactagtttcattcaagatgaccaaggacaaaatttaatacaataattcattgataaaccaaattagcaaatcattttcaaaggggcaattaagtgcaggtaaaatgcaaactaataggttgttattatccaatttttattaggagatctttggccaataatcatcgatttgatttgttaatgtttatttagattagaaatctagcatttttcatgtttttttatgataaatcgctggcggcttattggtcttttagttgaaggtgttactagagtttttgtaatatctcgacaaacttaatggtaaataattaggatttatatatatattataggctaatcaggtaatgagtgggattatgatcctattaatctatcgtagcataaaatttaaatcagttataagtggataaataagtgtaatttattaattacagaaatttatatagtatatatgaatataatatgagctatttgtgaaataaaaatattttcaagtttgacgatcttagagactcgatcgaggaccaaaatatcataacaaggtaaaattaatgattttgatgatttggataggtttcggtggtgtttctgagagtgcgaaactcgagatttttacccatgcagaaaacagttagtcgtttcctgccaaaaacggttagtcactttcccaaaatggtagaccgtttctgatggtgcttttgaagcttgttttttgtattttctcggaaatggaagtacggatactctagtgacctataggagacccttgggaatgaacttttggacccaaaataaggttagattgcttgattaacagttgttttgttgttataacatagggctcgggatcgtcgatcgttctccaagaaattcggtcaacatacttgaattgggacttgaggtaaaaaaaaatataatatactacatggcatgataggtttttgattgttgattgtctgattaggcaatggcaatgtgaatatgatacacaagcttacctgattaggttaagcaatatattggtgtcatgttatggcacaggcttgcctgattagacaatgtgatatatgaattcactttattcggtgatgcgatatatggatgccaaactatggcatgaacttgcctgattaggcaatgcggtatacggatgtcaggctagagcataggcttgcctgattaggcaatgcgacatatggatgctaggttatggcataggctcacctgattaggtgatgcgatatataaatgccaggttatggcatgaatttgcctgggcaatgtgatatgtggacaccggtgttcggattgttcttgtgaggcaaccgtcataaagtcatggctctaaactgaaactattattaggtttcttcctgtcggtgatcctggttaggtagcggtaatgacatatgggtaccaggctatggcacaggctcgcttggttaggtgatgcaatacattggtgttaggttgtggcacaggctcgtctgattaagtgacacgatacattggtgcaaggctgtaacacgggctcatctgattaggtgatgcaatgacattattgtatgatgctaggcttgcctgattagaaaatgcaatatatgatcactttcttttctatgcatatggctagttatattatccactcttgaatgttattgtttaatcattttataatagtgaaatagataattagttatttcatgtattctcctttattacttttcttgttgagtccttgtgacttacaagtgctctgtggttcaggtaagggcaaggaaaagttagagcagccatgaggtggcagtcttcttcaacaatgtacatattgaccttgccgacctgtgtgtctagttgccaggagatattttaggctacatccattgtgtattttgattttgtatttgacttgtcattgtatatagtctttttgtaaaacttttataacagggatccccggaacacagttttagtgtcgttaagatgtctgtttctagtattttgttttagtgaaatttttaatattattatagattttaataattaattaatctattagtactatactaatttataaaattacacatgtggcgtccctatagattaaggcgttacaacttggtatcaaattaaccatgtttcaaatatcttgaagactgatcgaatatgtacatttgctgcaaatacaggtcgactcatggtatagtaagttttgatattatttgctattggattacctgcctagactattataaagtatgttagaaaatgtagcatagtgatggttatgataagaatatgcatatggcatatgcatattgatgttgatatctatttaaattctgaatggttgaaggttctagatcgcaggtgcattagatcatgcagcggcaatctggccgtttgaaccacgagctagggctcagggaagttggtgagggagagcatcctccacctcctcagaattgggaacaaatgtttgctgctatgcaagagacaattagatagcaaggggagcagattcgagacctgagagagcaacatgctcgtcctacacctatattggtacctcaggtagtgccactaaatatggaggatcgtatggaaccaatttatgagcggttcaggaaacgaatcccgcctgtgtttgagggtgttccagaccctctaaaggcagaacaatggatgagtatgattacttctatctttgactttatgctggtcgaggataatgacagggtacgatgtgttatttacatgttacggatgatgcccatatatggagggagattgtttctcaaggtcataatccgaataccatgacttgggtcacattccagacaatattttatgagaagcattataatgattctattcgtgtcgctcaagctgaagagtttgcacggttagttttgggtagcatgactgtgactgaatatgctaccaagtttgataagctagctaagtttgcttttgatgaagtggccactgaagctgcacgaaaggtcaattttattagaggtctaaaagagtatattgccagagatgttgttatggcgaccaaacaatcaggggttgtgaagacctatctttagattgtggatttagctctcactattgagggggctgaaatcttgattcgtaaaaagagtaatcagaggaaggatgtgtggaagacatcatctggtactggaatgagcaagggttctaatcctaatgatcgaaaaaggaaaccaaatgggccacaagttatgggtccaaccaaaaggttttaaggtaatgaggatttctatcgaggcgaaaacaaagcctgacagtcttaacctgaatgtacaaagtgcaagaaatgccacttgggcgaatgtcaatctaaggcctgcttccaatgtggagtagtaggccatttcagaaacacctgtctgtagttacagaagcccaagaccgagaaagagagccacacagttcctgctagggtatttgctttgacccaagcagacacaaaggctggtcattcgactgttacaggtgagatttttattagtggtattatgtttaatattttgatttattcgggtgccacacatttttatatttctagtagaatcattgagaaattgagtaggccatgtgannnnatgtctagtggatttggtaccttgttacctactgaggaaatggtaatctcgaagaggtgagtaagatctcttccagtgttagtaaaatggaaagaattgtcagtggatctgattgaattagatttagaagattttaatgcaatcatgggaatggattggttgactaagtacaatgctaccatagattgtaagaagaagatggtgaattttgaacaaagggtgaaacatcgtttgattttacgagaaagattcagggatcttgaattccaatgatatcgacacttaggaccagggaatttttatgagaaggatgtatgggatacctggctagtgtattagataccacaaaagatacacttgagggaccgagaaggttcgggtagtatgtgaatttttggatgtgtttccagaagaactactgggactaccaccaaagagagagattgactttgagattgaattagcaccaggggttgagccaatttctaaggccctgtatagaatggctccggcagaattaaaggaactaaaagtccaattacagaaacctatttgatttgcggtttacgagatcgagtacctctccttggggtgcactagttttgtttgtcaagaagaaggacggtcactatgtatgtgcattgattatcaagaattgaacaagttgacagtaaagaataaatatcacttgcctaggatagataatttatttgatcagttacagggaaagaccatcttctttaagattgacctttgatcaggttatcaccagttgaggattcgagaagaggatattcctaaaactgatattatttcgtacttgatatgggcactacgagtttctagtaatgtcatttggcttgactaatgcaccagcaacattcatggacttaatgaattaggtgtttaaggactttcttgataactttataattatgtttattgatgacattctagtttattctgaatcggaagaagcttgtgagaaacacctctgtatggtattacagcgtctccgaatggttatcaccagttgaggattcgagaagaggatattcctaaaactgatattatttcgtacttgatatgggcactacgagtttttagtaatgtcatttggcttgactaatgcactagcaacattcatggacttaatgaattaggtgtttaatgactttcttgataactttataactgtgttcattgatgaaattctagtttattctgaatcggaagaagcttgtgagcaacacctctgtatggtattacagcgtctccgagaacataagctttatgtagagttcaagaagtgtgagtttcggttgtctcaagtaagtttcttaggacatatggtaagtaagaatgggattctagtagatccagtaaagattgaacttgtttgggattagtcatgacctaagacaaaaactaaagttagaattttcttaggcttggttgggtgctataggagatttgcggaaggttttgctaagatcgctactcctatgaccgagctaagtcgaaagaattgtaagtttgttgggctgataaatgtgaaaacaacttacaggagctaaagaaaagattgattaccacaccagttctgagcatgccaattagtgatgaaaagtttgcgatataatgtgatgcctcaaggcaaggcttgggttgtgtgttaatgtaatcagggaaggtcattgcctatgcctctaaacagctgaaagattttgaacagcgctattgttgcgtgttaatgtaatcagggaaggtc

SEQ ID NO: 18031 - DNA, 3677 bp, Cannabis sativa
ataagaagaaaatctaataatatatatagaggtagtctagtagggttttgatgtaatatgaaattattaattattacttactcatggccaatagaattccaagcattccaaccttgagggacaacaacctttgataaatatgagttgtaaaagagtactcttgaatagggtctccatggtctccctaagaacactttaccacttccattaacattgcaatttttgaacacaaatccactcccatcattactatttgttctcccttgtgctgtaataaatcccacaaaacctctctcaagtgatcttccttttactaatatgttacatccctatatatatcacaaaataaacttaatataaaaaattaaaaggaagatgaatataagagtagtcaataacatcataaaaactatcgtgatcataaacatattctagtaatattatgtttttcttcactcaatgaaggtactgacaaattcgaatctcacttcttcaaatctaataattagtagcaaaaataagaccaatttgctacatagtactatgtattccgaccaggatccacatctcgagccaagtggtaggatatgattggcctggttaagattatggcttgttaagtaacaacttgagtactctcaaccaatcccatcctactacaagatttgagatgtaggttcaaccggaatgtaatatatgtaaaaataatataatgtgaggtacgtagtttgaaagtagaaaaaaagtgcatggtttaatctatttagtaataatgaagtagtttcatgcttttacactattgaagtgaaattttggatcgatatgattatttttttatcgttaatcttaaatagttcgataacaaatttttagctcactattttcgaattacatttaactctctttcttatactagtattgaatttcgatcaaattagggtttacaataaaaattattcatttcgaaaccatttggtaataaatcgagtatagctagctagcccatattcttataaatgttattaaattttcacacattgtcaatacgagagacattcaaataaatacctggaaaatcgattggccgcccccaaagataaaatcgacagcaccttcaatggtgcaattttcataaaaatgtctaccttgatcatcccacaaagtgtcttgtaatccataaaatccacatttataaaacttattcttgtctcctgaaatcaatgctgccactgctggaattctcttattattccttctatcattgtatgaattctattaaaaaaaacaaaattaattagttgttatattataagatataataatgatcaaatattaaagaaatattataagatatagtattatttcttactctaaaacccatcattctgacaataatattatgagcagaagaagtgaaagtagggctttgagcaagtgattcatgattatccaaaattacttgtgttctactctttccttctccttgcaaaattatcattggtttatcacttggaattacaatcttctccctacaaattaataatataataatattacataaatacatatatgtaaattcaagcaataatatatatgttattgtatatatatcacatgtatttattctcaaaattttatgtatacacaaaagctgttgactttttgtttatatattttatgataaaaaaaactacatttttaaagcaattcaccaagaaatttaccatgagtagacctatttatattatttataaattttgactttagctccataaaacttttacttataactttttctaataaaaaacttgcctaaatggggtttttagattttatgtatattattattaataaaaacctatttagtactattttgaatcattttgaattgtgtgttttaaagttatttattctatcttttattttgtaaaataataatatagaccctatattttttttatatatataaatatatttgaaattttttatatataatttttaatataaccaatttaaagacaatttttagcacgaacaaattctaaaagaatatatatatatatatataacaactctaaatcaaatcagattactattcaattttattttaataaaaaatcagttcatattactatcttaaaaaataatttaatcaaaaatatattacaaatttaaattaatttttttatactaattaataatctctaattgtaaaatcagtaatgataaaaagtagaaattgaagaaaataaatatacctgtaaattccagccttaattgagattaaaacccaatgcttgttataagaaggaacagagttaatggcagattgtattgtgttgaaattgccatgaagatcacctgaattttgatccactctgattgtacggatattattacctttattcttttcttcaataacttcaaataataatctacttcttctttcttcttcttctgaaaatccatcaatttccaaagataataataacaaaaaaaatatgcatattaataataacctcatcttcatatattgccattcccaaaaccacattttttttttaaaaaaaattgccaacttcttcttctatatagaggttttaagaagaagaaaaagaagaagagagaaatttaatgaattttatttgactatatatatatacatgtatgaccttttattcatgttctaattgctattattatataattaataatttagcgtgagacacaacacaacatataaatgtaataaaaagaagaaaagattatatatttttatatatataaatattttgattaatatatgtaggtattataatattatacattttatttaattactaaaatggaagagtttcataaataccattacaaaatttttcaagaatataagaacgcggtttttttttttaagaaaatatatttatttttttaattattagaataaattaagctatatcaaatattgagtttttgaaaataatgaccggttaattagattactcaaaaaataattctatacataatatttaatgtttattatttctcttttgatagtcacatgtaaaaattctttttatatatattaatataatatattttctcaaaaaagaatatatataaaatatttttttatatagattcttataagtgatataatagagttttaataaagattaatgcaataagcaataaaaaggatggaaattcaatcgtcagtattggtatatatacaaagctataataatcatttaaatataaatataaatagtaattttaattaagagtgtgtacgtaattgccgtacaactgttattacgttacctacaataaaaataaataataattaatgattctaaagtaaataaaaaatgctaattaattaattatatatgtgctgggccatttgaaatatgtaaatttatctttcaaaaaaaatatatatgtaaatttataataaaaaaagtaaattaataatatatatatgatattttccactaataattattactttatacattaaacttaattatgtttattttgtataaaattaataatatatattattttcttttggtagatatggtggaatttgttggagccagttagcaaaactcttctgcaaaaatactcaattgccacctaataataataagaacaaataataatagtaatat

SEQ ID NO: 18032 - DNA, 3504 bp, Cannabis sativa
gtgtccataaaagttaataccacatatagttttatataaaaatattacataaaatacaatttagtataatacaatacaatacaatacaatacgatctaatacatcgttctaaacgagcccattatgtgttattttttatttattatattattaattaaattaaaatatataagagactagaatcactagattaaattacaccaacaataatataataccaattaaaataaggtaagttgagaaataccttttttgtatctattaattaaaaatattctcatattatatttctttaaaatgtattcacttttgcgggtgagttgcctaatatactctcaccttccacttaagtctagtacataatttacattaatctaagaaatataatgaagacattatttataaaagtaaatatatcttaaaaaatatgaaaatataagtaaaaattataacataatataaaataaattaagtatataatatattcattaattataaatattctcatattatccacggtgtagcatatataattagaacatcatttataaaaatatatattttatagaatatatgaaaataaaaataaaaattaaaaaaataagtatacaatttggcactttctccgtatctattagctagccattggcctctctctctcttctttcgtggaaaatgagagatggttaaatattcaaaaagcagtgatataccgatttttgtggccaaattactttcttaacaacgcgttagaattgtcaaaatggaaacttctttttctcctttagcttctttgaaaaccaaagctacaatttttataatttattattaataataataatattatttaactagtaatgaaataaaaatatacaacatcttattacaatgaaattatatacctaatttttttttcaatttttttttatgaaggtagttttgtttacagagtttaattatcaaaaacagagttgatatatttttttttcaatttaggatgttcaattttttttaggatgttaaattttaagtcttatttaaaaaaataacaataaaaattaagtcaattttttgaaattttttaaaacattatttgtaataataataaacataataaacaaataaacactgccataaaaaaaataaaaaaaaaataatattttggtaggtattttaaagcacaaaaattgacgtcataataaaatattagagttagctctctctctctctctctttttatttttttttattttgagaaaaagaaaaaagaaaatattttttatgggaagaaagatagaaaatgggagggagaagaaaaatgcaatggaagctttaaatgcgagttggttgatttggtttccttctatcttctcttctcttctctcatccttattaacaaagtaaagggactcaaagggtacctatcccatattaatgtttatatatatataagaacttattttcttttaacttaagagttaaggatcgactcaacaacacccagctacaaaatattcatttttggtttagttcttgacaaaaagccatggattttattggacacccttttcgtttttcttcaccttctctaccctcgtttgggaatttcatcgaaagggttaaggaattttgtacctttgctgtttctgcaatccttggaaacatcttttctgcgatcttcaccttcttttttgctttaggtttgtatttcctatctctgtttggtcgtgcttttcttcttcttcttcttcatgattttttgattgcttcagcttttttgttttatttgcgtgtctttttggtttacatgatttgtgttttcttacgtgactccttgatctgtgttgtgttgtgttgttctgtcttctgctgacttgtgttttgctacccaattggatttttgttcaaattttgcaatgcttttcacccattttgcaatttgattgaaaccccatttaccaaattacaaaatttctgacttttcaacacagaattgagctgtatgaaagagaatgaatccaatttgaaaaaggggttttgaatttacacataagggttttgtaattattgtccttaccagctttagatcttttaatagtttgagattagaaggtcttaacattgttactaatggaaaaaatgggatgtatatatatttgcagttgggaccttattaggagccatgactggggctttaataggacaagagacagagagtggatttgtaagaggggctgctgttggagcaatctctggggctgttttctcaattgaggtgtttgaatcttctcttgttctatggcaatcagatgaatctggaattgggtgtctcttatacttggtgagtaatctaactttgattccccattgttattatatcatatagtttttctccaattcaaagctgacaattgaagaacttttatcttcaagttcatatcacataatagcttcaattaaatgtctattcccttgtgattgtgtagattgatgtcattgcaagccttcttagtggtagactagttcgagaaaggattggtccagccatgttaagtgcagttcaaagccaggtaattctccatgaaaatagtaaaatgttgtgttaaaaacaccaacagagacagagttattacatgtcttgttcttttgtttattttactaacaacttgtttcgtcaaaaaaaaaaaaaataaataaaaaacagatgggtgctgttgaaaccgggttcgatgaggtgaccaacatctttgacaccggaggctccaaaggattgccttgtgattcagttgaaaagatccctaaaatcacaattagtagcaacaacaatgtagatggctctggggaaagagcctgttgttctgtttgccttcaggttcatctcaacagcatcttatatattttgttttctcatctgattttcttgtttccagaacacaattcattagtgttaattaattcttgaggctcatattgatgtatgtatatgtgtatataaatgtattttcttttgttttacaggactttcagattggagagacagttagaagcttgcctcaatgtaatcacatgtttcacctaccttgtatagataagtggctcttaaggcatggttcttgcccattgtgcagaagggatttgtaatttaagttttgtgtaaattaaagaaagagaagaagaagaagaagaagaagaaagaaaatataacttttgtttttaattttctcatacataatcatctttagggctttttttttgttaatctataattttaatggtggttggtacatggctttcccctccttttgtagatctctcatctcatgttctatcatgagtttaatgtataaaagttttgggctatgatagttttaattaattcatcttgtgaatatataatttataaaaacaattatatatatatatatgtgtgtgtaaacttgctattccttttgtgtcaaattttctgttgataaggattgaaaatctaagctagaaaattttcta

SEQ ID NO: 18033 - DNA, 4962 bp, Cannabis sativa
ttgattgggcgtaaagcgtctgtacgtggctttttaattcgagtgtaactacttgaggcggatgaaaggaaactttcacgttcgattttgaaagggggagatcctataggatcctatccgaatttttcttttgctgagcccatagctaaaaaatctatttttttacgattacgaagttccttcgagtatgattaccaattctggaaatatagcattccttttttttactactcatagctttgatgcgtttcgaaattgagaaatttctactagagcaggtgctatcagagaacaactagttgatctggatttgggaattattatcgattatttgttagcagaatagaaagaattagagaaagaagggcccaaggttaataaataaaaatatcgaaaaggtggaagaaaaaatgatttgatgaagattctagttttcataatagaatacatatgatctagtttgtgtttcaaacaaagaaagaaactttaaaatgaaaacattaaatataggatttggaaaaatatttacaatattatggaaaacttaaacccataaaaagctcgaaaaatagacaaaattaaatctgccatattaaagtaaaaagcttttaaaatctcatatcaatttccaatattgtgaaaagattctataaaagtttatataataaaataataaattatataacatcttatacttaattggatcaatgctataataccacaaaatgtgctgggtagctttgttgccttttggcatttctcaacgataactagcaaacttcgcccaacatacaacatggtcaaacaatggcgttgttttatgatactgatcttggtttctatttctttttcaaaaaaaaaaaaaaagattttattaacattgcttttgtgcaaaatagcatttttataagtgaccaaaaaatgacaatttttttttctttttgggaataaataatgacataaaattttcaggtattcgttcttatcaaacctatttgaaaaaaagggtcagatcgaaataatcaactcatactcactgggttattttgagctcctacatcatattcaaccaagtttttgtagccaaacatatccataaatattctactaatatcagtcgctgttttaatcacgcatatcacagattcaaagccaaatacagggacgatctcgtcttgccctgcaatatttgcgttgagatggatttgactgaaaaggtaggtcagtccttttgagaagggtgattccatccttcggtaaacgaaaaaactattgcctctcttcatgcccaaaaatgccagtgcaaactaccttgtatctggactaagatctccatatgaaaccaatcccctttgtcctggtggagagcttgatcttgacttgctggaagatgccggtgttctattacgacgccttggcggtgagggatttggagacctggaaacagatggttctttgctcccagacctggacctggaccttgacctcctgctactcttaattggggagcgttgatgatcaatccggggacccagacgagatttaagtctctcactaacaaggggtcgcttgtctgagggactaggactacggataggactacggctacgatccctgtaacgcctatgactgcgccctggactacgagaaatgctcctacttcgacttctgcgacctcgatgcctatagggaacatatgagaacaataaacaaatgaaaatatgcagaagtataacaattcatattaaatgccaaaacatcaagaagcagcatcattggactatcaaagattcaagtgcaatgaaaaaagcaagtctgatagagtttcattatattctttgagaaagaaagtgaacctgggagggctctcccctctaattggacttcggttacgcctatgtggtggtgatctttcaggataacgtctgtagcttgaataccttccaagatgaggaaagcataaataaaaatattaactgcataaatgttttaataataccattttaattatcaaaacaaaatgctgaagttacctatcatttcttctaggtaaatttagtcctccataacgataaccacgaggcgaacgatctggggaaggagttcgatagcgacgtgcatatgagtagcggtcagtaaacccacggccttttctaacacgctttggattgccattaggagacgggcttcttgttaagccctggacaagatttggagcattatgttcaggggctttgcgaatgggactccttgaagatattctattctccctaccaaaatttctaacagggctatcacgagggtttcttttaggactcgagctaggacttctcacagggctccctcttaaccttcttttgggagatggacttctgcaaatcaaagtaatatccaaactcagcttcaaaactccagatgtacatggttgccactccagtaaagtatccaatatgcagcaaaaaaatttcatgacaaaaacaaataaggcaataagccagtgaaagaaaccttgactgatttgagtcagaatgtcgagtatcaattttagcctccgcattgtttacaagtttcggagataattcaccctcctcttgggatgaagtccccttattagtcttcatctcagaactcctatgccgttctacatcagtgtctctagctcctcgagaaatttccacatctgtgaatccaaatcaaccaagttttaagttgatttgtcaatgtgacaatataaattaatgaaaccaattaaaatgcaagtcttaagttggtttattaccctttttctccaatgagagacggccatttttacgattgtcacggctacttccaccactgatactttcactatctgtgccactggaactatctgatctactggacaagcaaggtcatgatcaacattagttaaaaaaaaaaaaaaccaaggatacaatgaaatttaggaacgtttgcacttaaaataattatgatcacaccgtttggatatgcgccttgatcgtttgtccttccgacctctcttcctctccttttctcttactttccttttcctcccctgctggaatttatcttttctggcagatttcttcttcctatgctttccatcactagagcttgagtcagataatgatgaatctgaatctgaatctgaatccgattcagaatcagaataagaagactcagattcagaatcagagctgtatgaatctgatgatgagtatctttttcttcttcttttctttcgtttgtccttcaatgacttcttttgtcttcctccacccttatcagcactatcatcagaggttggtacttttcctgattttttcttctctggggaaaaataaaacaatatcatcaaatagactgacaaaacaatcaatactattgcatcacagtatgtatgaaccaagcaacaatatccaacagcaccaacatttacttttattacctttctctttctcaactacatcagtaattttacttgcagaagtttcgccacaatctgcaatctttacaggtccggaaggtttaccatcagcggatcccaactgctcaattctctcaagtacatccattcccttcacaacttttccaaagacaacgtgtttcctgcaaaattagattgagatcacacaattattagtaaattcagactaatataaggagaacaagaatccatgaacttgaacatgaaattttagcaacgagcattttaaaaatacccatcaagatgaggctgccgcctgaagagtatgaagaactgtgacccgtttgtgtttggaccgctatttgccatagagagaaaaccaggtccatcatgtgtaagcttaaaattctcatctgcaaagcaaacgaaataacgcatcaccaatgaagaatatttaataagcatgctgtaaagtgcccacacaaataatcacctgcaaactttcctccataaatactttctccaccagtacctacaaaccaaccaagtgttgttaaatataagggcacgaatgtaggagtcaatagaaaaattgcattggtaggaagggattgcagagaaagatgtcataccatttcccttggaaaaatccccaccctgtaggaccaaagataaacaaaatgcaaatgttaattataattaaaacttattgaatagatagctaaaatcacacttgtacagaagcaatttgaatgatgcaaatgttcaaaagagatttaaacaacatacttgggccatgaatcctttgattattcgatgaaaatgtgaacccttgtaatgaaggggtttgtcagtagacttcccgatgcccttctcacctacagccataagcaaagcaattttgatagtgttggcaactgcttttacacccaaaaagaataaaaatgcagatcacacaaataagacaagtttgagcattatttagttttttgctttctttttcaagcttgaactagttaaagcatgcacaaatacttccagaatctaggattcaagataacataatagaatataagaaaaagccaattaggatttatttatttattgatttagtctacttttgttaacaaatcataaataacaagacatgaagatttttgttcctgcaaccactcttaacggaaactaaataatacataatagcaagaaaatcaaatcatcagcagaatacataaaaaaaaataataataaaagagaatggctaaattaccagtgcagagtgctcggaaattttctgctgtcttggggaccacattagcaaaaagctgcacatttcaaaagaacaaatttatatgcaccctaaagataaactgcttggcttaaagtttcttccataaattgaaggaaagccagaagctcaaataaatgaaacaagctgctagtttggtgtttcacctcaataacaattctttccacagaatctccatcaattgaaacatcaagaaaaacatgagggtttttcttcttgctcatag

SEQ ID NO: 18034 - DNA, 10199 bp, Cannabis sativa
  modified_base (2491)..(2496): a, c, t, g, unknown or other
taattacttgatatcaattgttaaattatggtttatatatataaatatttgcttaattttagttaacttatcaacttattaacatgtttataataaatttagtatgtttataacatttttataacacacttgtgaacaatttaatatatttatgtcctatttaactaaaaagatataatttaaatataataaatttaagagtgtatactcttacataggtcattgccatgttatttttggattaggcatgtcaatcattaaacgactcgtttaattgggttagtcgtgtcaacccagaaatgactcaaacctatttaaggcaaacccaaactcatttgtttcgtgtggatattaagtcgtgttatcgtgtttgtcccatattgccaacactaccgatacacgcctgatttctattattttaatatatcatgaaccttttattcttataattttttgccaagttattttcaaaaagagttgctaaaggggttgtgcatatatccgtctttttgaggcgatcagcgaaccacgattgcaatgtgaacctgataaattcaaccaaagtggttattgtatattttctgaactcttttgtcacactattgaagctttcgacagcattgttggtcattatgttgtactgattacctagaaaataagggtaagcccacttctcaaaatctatactctccacatatgcagtaatggcatgatccatctgtctaagcttctcaaattgtctatcacaatcagctttttaccacgagtaagctacattctatatttacttgtgaaaagcatcagtcttgaacttggagttcacgttcataacaatgtggtgatagcatgcacagtggactactttggaaaaaataagttctacaacatagtcaatgctttgatgtctatccgacacaaacactaagttatcaaccaccccaattgcttccctcaacttctgcaagaaataggtccaagagtcgttattctcattgtcacctataccaaaagtagggttgtacataaacttttctaaactgtccaactcgaacaacatgcccaaaccaaactgagataacctaacaaaaaatacaaactaaaaaacttgacgaaaatataactcgcccaatctttatattggacggattaaaaataatatcaaccggaactaaaccgaccaactcaattaagaggtttttatatatatacttattatataaatctatgtataatataaatatttataaaaagtagaaagttcaaactactatatttctttcatgacgattgatttgaactttgaattctgtttatatatttgtctcattatcacaattaactaaaatataacaattgaatatgaaaaaaaaatattagtgtttttttaggcgggttaacccgactaaactgaccaattcattgggcaagttgaaattttattttttcttaattagattggttgcagttaaatttttgtaactcgatctttatgttggattgaattgaatgtaacgtaaactaatcaaaagcaattagaaacaattggttgtttacatcgtatgccacaacaactaacattgtgtcgccatgcttcatcttcaaaaatgtgtcatagatacttacaacatgatgacagaaattaaaccccctcatgcatgcatgcaccaagtgataaaaaaaataatacttgaagtgctcatcctctatatatacaagtcaataatagtacttggaatcttctattacaacatgtacaagtatcgtggtagctttatataggaaaataccgacgtactcctaaaatacgtaagtgccttctccttacacctcacgccttcacataactcatttggataccattggcatcaaacatattcatttgtgtgtctttagccttgtacttagttccatcttgaatctgatacgttctgaagcttgagaaattaaaattttggaaacacgacaatctatcaaaaaaccatcaacatatcatcgacaattaatgcaaaaatttcttgtgtgttgtgtgtgctttattaatttgaggtaaatacatatataatttctttttaattttttataaatactttaaatattctagttaagaacaaaattcttttgaacaacatttgaccctttccaaaatacaaataaacttacaaaaatttagctaaaacatgggtacaccaattatggacaaaatccaaacaaagtatactaaattacaattattaggtgattgtgacattaataataaataattggtaatttttatagtaaactacttaaaaaaattatttatggtataaatacttaagtgtaacttctagttgcaaataaatacttaagtttaatttttagaagtaataatacctaagttaatatctctagaactttgtaagtacatggttgttaaatgttaagtaaattaccacgtgacaatccctgattggtccaggttatgaagttttatttttaaaaaaaaattaannnnnntataccaataaaaaatgacacgtggataatgacttgacatttaacggtcagatacctacagagttctagaattataatttaggtattattaccgccaaaattaaacttaagtatttatttgcaactaagaggtaaacttaagtatttatgtcacaaattactcctctttaaaataatcattttggtacatttttatttatttcgtcattcagaaatttttattattattttttttcctatgatcatgtatattgtacttatttagagttatttgtaaaaaaaaaaattaaatctaaatagtttacattataaaattaaatattttattatatgcctaattttttttatatcaatagtaagtaattatttaaattttttattttgtcaaaggtaaattatttaaaatattctaattatttataaatgatcctaaaaaaataaagataaagaaaaataaactaaatattttttctaaatgtgaaaatgattcatttaagaatgtactgaaactattttttaggactcgtttggtacgttgtattaagtcgtatttcattgtattatattgtttatattaaattggattatatattatatttttatataatattatcttaaactttaatttatagtaaaatattatatatttaagtgctcataaaagtcaataccacgcatagttttacataaaaaatattacataaaatataattctatataatataatatggtataatacggtataccaaacgaaccataaaaggtgttgtacaacatatttttctaataacaataataatgattggtgctttattgggaatgttttgtgtgatgtgaatagaagtatacatatatatagtaagaaagcattaattataagaaaaagaagagaaaagaacagatgaaactgcaagcaaagtcattgtaatgatgattgtttatcatgataataataataataattataagcttataattaaatggtttctttcccctcttttcttaatggtatcaaaagcttataaattaaagttgatgtaaggaagaatccgaagagttcatgtgaataaaaatctgctactctggaaaaaagaaagaaaaagaaaagaataacaataaagccaaaagaaagaaataaagatcatatttttatattgaattatatatatataaagtttatatttttattatttgatataatgaggtagccgttactactaatataatatgaatataatttgtatgtttgtttgtttgcttagtaaaatgtaatatataaaaatatatatatttatttataagtaggagcaatgtcaacatagctggctggtggggatagcaaccccacaaaaggtcacacctttgaatctctaatggcttcttcttcttattactttgtccatattctaaccttctttcataaattatattccttttatttgtatatacatatatataacactggtatatactctctcttcctctctctctctctctatatatgtatttatacatatataaaaattggcaagaaaataaatgaataagtaggcaaggcaaggcaagctggacacaggttgttggtggtgttatagtgctaatatgaatctgtaacagcaaagatgccaatgtaagttgctccactctctctctctctaatattcattattcaagttgcaatagaaggcaaccaagtatactgctttacagcccaagcccacacaaaacagaagcttgaaccaaaccaaaacctactctttctttctttgtgtatttattgttatatagacacatacacatatatatatataaatataaaaattcatcatcatctttctcttcttctgcaatattcaatctgtttttctttaccttttctcatttttttttttaatgttgattggtctgcatcaaaaagaataaaaaagggttctttgtttctgtatgtatgtgtgtgtgtgtatatatagagagagggagagagagaaaaaggaaagaaattgaattgaattgagatttggtgattaggtaaagagttgcagttgcattagtaataaaaccctgaaaaaaaagctttgtcggcgcaagtttactttctgtcggcattgtcttaaagaagaccagccatgacaggcagacagtttctctctctctatttcattattttccccttaatttaatcataaaaattgattctttcttcaattaatcatcaaagaattggtcttttcaatcatttcatttctgggtttcatttattttttcttcctttcccatttgggcaaatgaagctgaggatctttttgaggaatacaggtttgtttggagaccctttttcacttctttaatttaactttattcagagacacttagaagagcttaaataaaagaaagatagctcttttttcactgttcactgtacaatacataggccttatctatacaacaacaataacaataacaactaggtatatatattctacctttttcttatcttatcttatgcttttttttgggaggggtcaacccctttatatgtatatgtatatatattttcaggtttaatgtatgataataccatttgggttagttgaaaggggttcccataccaaatgtcagggactcttgcagcaatattaggaggtgctgcaggagctttggtattggttgggataattgttctattcatttggttctatctatctcgccatagaagtgtttcaagaacatcagagacaggttcttctgatccatcaatacaaggtaactcaagtttcatcaaaccccaccaccctaaaatgatttcattgcaaaataaaccacaagtattttttgtggggtttctcctttctttctttctttctttctttctttctgtttttgttacttatgatgatgatggattatataatgatgatgaattaggatatgatttgcagttggaaggcatgttggggttgagttatcctcagttagagaaaccaggcgttttcaaatggatgaattgtctcttgctactaagaatttcagtgacaataatttgattggacaaggcaaatttggggaggtatacaagggtttgcttcatgatgggatgcttgttgctattaaaaagagacttggagctcccacacaagaatttattgaagaggtaaattaataatcaacaagttgtaatctttgttttatttttctctataactattgaaatacatgaaaatgggagattgagattgggtagtataaaattatctcaaagtactctccaatcctatccagttctctatacaggaccttgctgtatttgttagaatgccctctattcataacttgtttaaaccaatggagttttcaggtgcattatctctcacctatacagcatagaaatcttgttactcttctggggtattgccaagaaaataatctacagtttcttatatatgattacattcctaatggaagtgtttctgctcatttatatggtaacactctctaatgagctcaaagttttctggtattgaacttttccccttattgttattctcatcccaaggcttatttgaaaacctcaggcactgctcaacatccacgtgagaagctagaattcaagcatagactttcaatagctctaggggcagctaaaggtgatcctctggaaaatcagtgagcatttgtggctttcctggtatcagtttttttttttgtcccttttcttctgtttagttaaaaaactccaaatgtcaaaaatggcaccacaaaattgtttttgtaagatacttttcagttgttgtgtaaactgtcattggcatatgaaaggtgttgaaagtgttgtttggttctcatttttgcgcttagctcattcgtattgcttgtgtgtaggtttggcctatcttcattctctaagtccccgtttggtacataaggattttaaaacagcaaatgttcttgtagatgaaaatttcatagctaaagtagctgatgctggattaaggaatttcctaggaagatttaataacaacaatgcagggtcatcttctcaagctgcagccgccgatgaaatatttcttgcaccagagtactgtctttttttttttctttgtttaacatcctttttgggcctttttttttttttgctttttcattcacaaggctggttttgttacattgcagggtgaaggaattcggacgattttcggagaaaagtgatgtctacagttatggcgtttttcttctcgagttagtgagtggaagagaggcaacagatgttccatcgtccgagtcaagtcagaacctggttgaatgggtatgtatgtgttaagtttatgccaatatatagttttgcagatctttttcggttttgtttatgttgtttgatttggttggagttaaaaggttcaaaatttccaagaaaatagcaatgtggggagcatgattgatggaagaatggggaataggttcacagcagaagggatggaagagttgatagagttaattattcaattggttcaagtctcaagtgataggcgtccattgatgaattatgtggttatgcaacttgataagatactggagaaagagatgagcttaaccacagtcatgggtgaaggaacaccaaatgtcatacttggaagccagttgtttaaggcctccaaatgaaaattatatatatttctatatatataatatatttaaattgcctataaaaaaaaaaagcaaagaaaatcaaaataaaaaagcaatcatgagtgaccatatttgtgttttttttcttccttcattatttttacatgtagagaacacatcagatcagagggtgcagatattagctgttagattaagtgtataaacaacagcttctgcattatttttttggttttttgttttaaatgtccaaaaatttatttataaaacttgttgtaaaattaaaccattatttatttgttaatattaaagcataagtaaggtgtgattttgctcttataatttactttccaatgctcttttctttttttctttctttatttgggtagggctctgcaaattagcataacaaaatccatacaaaatttaccaaaagtgtattgtatttgtattgattggattgtcagtacagtttacagacaaatgtgtctcttcatgtattattattacatacaatcaaatttatcaaaacctgtagtaagttttattctttattcaactatcaaagaattggttaactcgtttgtacaaatcagtatcaaaacttttcaggacaagtgaattgacaagactaagacatgttgtttccttgttcttgctcctattcacttttggatcaatgaacttccattgttggtgataatcctgtgtaacacaaatcaaaaaaaacattttagtctcgacaaaagataaaaccgacgaagaaagcttacttttcttggcagtatctatctaaggaaaatcaacaaaataattggtagggagacccatcaaagccttctctttaagctatgatcatgaataagtgcaaaagataaaaaagtgaataaaggttaccttgtacctaaagataagcccttactgtcaccaaccgatactggcagtatctatctatatatctatggaaaatcaaaacattttctttgtttgctgtttaaatatgaaatctacacttggagcactatttccatacttatgtggaagaagagaacaaaagtgaataaagggcagctaataacaatgagatttgtgcaacaaaataattggtatggttcaaggccagggtgacccatcaaagccttatcttaaagctatgatcatgaataaatgcaaaagataacaaagcgaataaaggatggtatcttacaacaaaagataacccttactatcgccatatattaatcgttcttagcagtatatatcaacaattattaagtttgctgtttaaataagaaatccacatagaagaaaagaacaaagtgaataaagggtaccttataacaatgagatttccacaacaaaattttcggtatggttcacaaccttctctttaagctatgatcatgaataacagtaatcaaattcaagtcctgtaaatgaaacatttggtgatcaaaaattgagtggccaccagccaagtcaagtcttttccgtttgtatggtatctcctagcaatgctgaaaacatagcaacagagaataacacaaacagaaaggtgtaaatatacacaattataccaatcaagacaatgtatgaggagagttagagatttacaagtttgatgaagataaatctgttgtaagagccgagttctagctttattaacagtgttgaaacaaaggtatatatgagtctctaaatcatcaagctgatgaataaattttgattggttctgtctaagctgtttaaccacttcttgtatgagatacctttctccaccacaattcaaacccatctgaacagaaatcttatcttcctcaatagtcgtttgcatacgatccacaaggctcttcaaagtaatcaaatcctcattaagagcaaaagtacctttagctgcagcatccaattgagcaaagcgagaagcccttttcctcataggcaatgcattagtacagaccacaagggaagtaagagctctggtagtgagagccacaggtctagaacagaaagcagtctcaaagagaagactaatcaaagatcgagactttcggaggcgacgatcgagacgttgtctgagattcgagaaacaaccgcggatgtgatcgaagctgtggtggtgggaatcgtcggaaaacgaaaaggggttttgaaaagaatcgaacttaacgaagatttcgtaggcccaattgcattgggattgagatagagagtccgaatcttctggaaggatttggaggagttcgtgtagaggcgagtaaagttcgcgagcacggaacacggcgtgatggagattgagacagagttgggatgtgtactcgctgtgatcgaagtaatcggagacgagtcttgttagggtattgggcttagcataacggagagcctcttcgatgcaatcgcggttagggttaaggactcgttctaaaacgacggcgttttgatcttggtaatggatttcgactgtggaacgaatctcttggtaggaattggattgaattgcgatggaatactcgcgagatagattgggagagggttgagtgctgggcaagctagctgtatctcctcctccacagtcgccattggcggcggcggaatcagctgtgggttttgaatttgtaaaaattgttcctttatgatgataatattgatgaaattatcgaaaccagaagagaaaggagaagcttaccttggatttgagattgagagtaataatgggaattgggaagcgacgacggcgacggagacggcgaagggtttagggtgagacaatggtgaagcatctgcttcgtagtcagttttactgttgtttttgttttgtctcagtatcgaatcattagatactaaagacaagacagagagagacagagagacaagtttgtttgactttgacttgaaaaaagtacccctatttgaatgcccatttaggcctcacattactattcgtaaggccaattaactggcccaaagataacattatgggtgattttacactgcatttagcggtcttcataaaatagtcgatccaatctaatccgtacgatctaattggatgttgattgacatgt

SEQ ID NO: 18035 - DNA, 9084 bp, Cannabis sativa
  modified_base (2355)..(2362): a, c, t, g, unknown or other
gctacatctctgtcaagctcatctcagagatcgaagcttgatatccactatcaacaatgtcgatttacaagttttggagcttcctgtcacataagatcgaccaggtaagctcgattctttctcttttacactttttgttttgttcttcacttgatttgttctcgatctaaccctctttttgtttccttgtgcatgtacttcctccttctacctcctcaccatgagaacttggtttctcatctctggatcttggagcagaatccttcaactagggtttacaccttctctctttctctatcttttctgatctgtgtaatctgcactgtttgttttaattttctgcttatatatatgtgtcatagtcggttgatcacagatctaggagttagttacaataacagttgtaactaactcctatttcttgatccagtagaggcgaagccacctagggttgagtccaacttgttttgtttctgttgtaagtgctgatgtggatatttgttgtaaaaagaactggttataagtggaatttacccaacaatttctatattttctaaaaatatatataataataaaaagtaacaaaaaaaaaactacgtagttgtgttgtgatcacaaatttcaactagctaggtcaattagctttaggtacctagagaagttgagttcaagaacaatgtacattacgcatcaatactcaagaaaataaagataaattttacagaacatgcataactcgactctgataaaattaaaacataataataataattacaaactgggctgtaagtgtcgctatcaattattcatcgaaggtgtcaagtcatatgtctaaacatggttcatacattcaattagcctacaataattttgccaatacaatcctactaaatctagaattatcatattataacagaaaactatgcgagttttcattttggaaaaccctaattagacactaacataacttgtctataaatacaagatgttagacttagaaacagagccatcctatacacaagagcgaccatggccccccaaaattctaaaaaaataaaaattaattctttattattgtattaatttttattttcttcaaaatttacaatttgtcatcctaattttaatttcttttctttttgtcgtcctaaagttgaattctaactctgttcctagttggacatattttgaagctatatttttaatgtatttgaactccaaaaacttaatgatattaaaactcaaaatatatatatgtataaactttttgtgttcatcatctttatacgatgtatttgtgttcatctttaaaatataatatttaaatataaattgtcattaattttgtttattgtaactaaaaatattttttctagtcacaataaattataatttttgtactgactaatatctttaatcatgaatttttataattaattacaacttatttattttttatttttaaaagtaaaatttttataatatttattaacacgacattaattgtctctatttgttaaataagaaagtgaaaattctaaattttactaaaatcaacataattgtctcattttattttttgtacgttacaagataaatatatatataaacattaagatgatataatgaaaataataaagacaaaatttagtggaaaaagctttcactttaattagcttttgtttcagatctttggttggaatttgaaacttataaaggtgtctatatatatagctttataattgtaacgtatatagtaaagtaacttaataacaagtgttcttttgattcaatgcaaagactcgtaactgcagtcttaatagttatttttttatatatataatatatttgaaaaaactaggaaggtaagaaggtaaggtatataatttgatagataagatttgttttgtcatatatgtaacacgtgtcatccaattaatctttgtgtgtgatccagttcaactcactacttgataagcataataaaaccctaataaacctagccacgtaccctaaaattagatgatcatcatatatatatatatacttaccttgtcaacaactcaaagttttctatttttggatattatattatggctagttagtatttttgccttttgaattttaacgtataccaaatcatgccttatgaacttttaagatcattaaaaatacttcttgaattattaagattgttagatttaaggacttttatcgagttttcattcagttttactgtttcaaagattgtttatgtattaaattatgctcccaaactttaatatctaccaaatcatgtcccttgaattttgacatgtactaaattatgtcttctaaactttcatccatgttagnnnnnnnnactaaaattggaaaaaaaaaatccttaaatccaacaatctcaatagtttaggaagcataagcgttatattaaatcctaattagccttatattatattggcataagcgttgtttagtatctcatgtggctcgcgataaaaattctgcaactcagtgtcatatcgtaaatattaaatttcatataatttaaaaaaataattttagaaaatatcattaattaaatatataatactacttataaaagatattatgaagtggtgtctaataataatactctcctcattatattaagtgtataatatgattgtttaaataattgtgtttggttatatataaatatatttagttaaattactattaattattaaattatattattatttagttgaacacacaaatataatatgttgacgtaataaaagctttaaaaaattattaatataatctattgtattgatggaaatatttggaacttatcatttaaaaaagatttaagattatccacatgcagtaataattttcctaaacttgaaaaactaaaaaccctattaaaatttgaaagattaaaaaagaaaaaattacattaaaaaaagaggattgtacataaactttcactatatctacaatagacaaaaatacattttgtttgacttacaatgctccattagtaattaaattaatcaaatcactataaaactatcattaataagttaaaaaatgaatcaaatttcgatttcattctaatataaacattcctttaaaaaaaaaaaggaaaaaatcattccaatgattgataaaaaaattatgtatttttatgaattttgtgtgtaaatgttaaattttattccactccttcaagaaaacaaaaaatatattacattcatttctaatttttattttcatggtacatgggtcaacaaaggacattgtagaatttttcaaaactatatatatttataaataaaagaaaattgtgactttaaagtgcttatattatggtaagtccaagtcaaacacaaagaccctagagtgtaacgtgctctgctatgctatgttatgtggttcacaagcttcattttaaagcaactcaaaacttcaacttccctattctatatctactatttacctttaaacaacaacacccttatcttactaaaaaagattcacattttaatgtattccaaattttttaggtgagaaggtcacttttattcatatagaagtatagggataatttttattcggtatatatacacgacaatatacattatgagttaattaaaatttttattctttaaattttgacaaggttttttgaccgttaaaattttttcttaaactattaagatttttgaatttagagacttttatctaatttcattaaaatttactaatttagtaattatttatgtattaaattatgctcttcaaactttaatatctaccaaatcatatccttcgaactttgacatatagtaaattatgttctttgaacttttattcatgttagacattacttactaaaattgaataaaaattcttaaatacaataaccgcaatagttcaaagaaaattttttaacaaccttaaaagttcggaaaatattatttagtgcatatcaaagttcaaaaaacaaaaatcctaattagcttacattataattataagtgatttaatgtatcaaataatcacttacacgagtgcttattttattttaatgccaccacctaaaatatacatgtattacttgataccaagccatatgttgtattagtaatttcaatcaaagaagagaaaaaccatcttaagtaatgtctttgctgattatacagagtataataaattaactagtcaagaatttaaatatcattatatatcataataagaaaaaactacaaccaacataatgaattccaaatatttcaaattaaataagaaagaaattaatgacatgggcattaccaaaaaaggtgtaggaaggaacaaaaaacctgcaaactagaaactagaggtgtactctgcctcagtttctatggcaatatatcatgtgaaatactagtactagtctcactctcacttgcattcaacaccagcttcagcagctcgacggggcttgttttttcgcctactcccattatgtcgaaatccattagacttagttgagtcatcagtgcttgatcttgttccattaccattttcttccttaaccgaatctgatgatttctcttttacctgtgaatatcgttttctcttctttccattctctgctgcagttggacttttcgcctctttagttgttgttgttgttgttgttgttgttataacagcttttgcattctcactatcttcctcttctgttttctcaatttcttcttcatcgatctcgtccttcaatggtttttgaggtcttcctcttctcttctgtgccggtatcttttcttcctcaccacttccggtgtcatcgtgattgctcacagttaatctcttcccttttcctctacctctacccataatcttaaaacttcacaaaagtataattcatacacaaaaaagcaattttctgcccaacaacaaaaaaaaaaaacaaatcaaaacatgtaaacaaagatggcaataactaaatattcatttccatcaaatctcaatctaataatcatttcattaccttaacataaagtagccaaaaacaaacttatacttatcactatgttaaggtacaaaatttcacttacaacagcaaaaatcagagatgctcaatccacaaaactcaaagagaaacttcttaaaaaaatcgaatgcattttgttatgtactataagcattgttttatgtactctaagctcactttgatgtactttggcttccaattgatagatcagctcaatcttaatccaatggttatgaagaccgcgaaatagatatcctcacgggataaaatccactcccttcctaagtttatgaatacaaaacttgggtgtaacatgttatctcttatatacatcaattatagaaacatcttaatcactgagagtttcttcttcttcaatcaaaatatccttattaactattatatcaaacttaagtcttcttcagaataaagtatgagaaacccctttgccttatcctcttgtttcacaacctttttcttaaactcaatgggtggtttatatacataccaaaaaaggatttagggttccccttcttttaatttgatttacaatgttcttgaatagattaattaggttatgatattaatgggtttaacttatctttctttctataccaatcataattgaatcaaattaagaaatcatattaagaaaaggtaaaattttgcagttttagcaagtatttgcattacatgattgaaaacccaatcaaaatatgaaacaatttaaccttgtttgatcaaagagatgaaatttaagttgaataaaccatggaaaaagaactgaaattgggattacctaatatctcaacattgaaaaagtaaggataagaaaaaatcaaattatcttcaaaaccaaatatcattaatccaatactcaaagactcaaacttttcaaaaatcccatacaagcaagatcaattaagataagaagaaaacagattcaagtaatgcatgaactcaatagaactaaacaaaacaataagaactttcccaattaacttcaacctccaaaatccacaataaacaaaaacacaaagacatgaaaacacatgtttcaatcaaaaactcaaagacaagagaatattacatatatgagaaagagaaagagtgatagtgattactgaccttttctttttctaagcaataagccttgagtgcataaaacccattatagacttactataaaactgagaaaagagcaatacccatgtggggttttagtagatttgaagagagaaaactgagaagatgaaaaaagattgaagctttttttaatggtggggaaatctatgatctaaagaggaaaagttagaatgaatgccttagatcaagaaacaaactttgagattcagaagcattaaagagtgaaaaaatgaacaagggttaggagtaaaagagtaccatgaatgagagagaggtctgaaatggagatatttttgttgattaggcttctcttctctctgtagtctgcgactctgttaaaaactgtggttgagtggggtttttctttctatgtgtaaacaaaaagaagggtattttggtcattttcaaaaataaaggattaataagtttgaatagagtttgaagaagttgaggactcaaaaaaaataaaaagataaaaaattattatttagaataaagttgaatgaatttaatatgagatctcaacacatatgtgagtagtgtgatttgtaagacattgtaaataaatggtacttataaatattcaaggtaccaaataccaatacttatgtgcttattttagcttagtattttgtcttgtcattccatcaatgacatgagccaaaaaggcttttgagttttgactatactttactcacttttcactataaccaaacacaattcaaatgtattatttaatggaaatgtgactttttttactccaatgggtaggacttattctaactcaaattttaatatattgtaattgtagcacacttttcttttgttttcaaataaaatttgaataataaaaatatttagttacatgagtagttttttttattataaattatgtatcttaaatgaaaaaattgtattacaacttcttcaaatgctgaaaatatggatgttatactagagaaaagtgatactctctactataatgtttgtaattctcctaaaattgcattttttgtgtatttatttcagtctcatctaggcttgaaacatgttcttggatgtaaaaaatacagtttccaaccgggtttaggtttaggttgcttggtctaattttaggaaaacgaatttgaatagcttcaatggagtttgatgatgaaaggaaaataacatgtcgtttccaaatggtaaatttaaaattatttttttaataagttttaagaattttatgattttcttaatttttatgttaattgagataataaattatatttttagcttcttttttttttaatcttgattaaatatatatttttggtatattatatcttatttagaaattaattaaatgtgcaaaaaatttggtgtattaattgcatggtatattttgattgggagtaattttaataatgtactattttaagaatataattgttttataattaagtttgtgcaattattatattaaatcacgaaaatgatgatttattatcttatttagcatatatatttttaatttttcaattaagcttataaggaataaatatagatgattgtgttaatttcataagcttataaggaataaatatagatgattgtgttaatttataattttattattttatttaaggtattattcctaaaagatttattgttaacacaattataattgagatattatatgtataatttataattgtgtatttttttccccttttaagagccttctattcactttgagattgaagaataatggctatgaataatatcattttaggattttaaaaaagaaaaaaacaatatatatttttttcaaaaaaaatgtataatatttttctctcatttaagtaaatagtgcatctctaactattgttcaaggtgttcaacattctcatcactaccatatatagtcgattctttgatttacttagtgatatttgttttcaattgtcttttatctctaatgtttctttcaagtatgtccgtcgaactgcaaattttgtagctcataaacttgctaaatatgttcagatactaattttatttggtagacagatattcttgttcctatttgtactattgttgtaaatagaatactttctcttaaaaaaaaagtagatagtgcatctaaaaagttaagttgcaaatctttatttgaaaaaattattttttctaataatatataagaaattattttgttaaatatactttttatatatatacataagttaaatttgcctcttaataactcttaatttatattattttcacttaataattgatattgatatctaataagaatttactaattatcagttaaaaaaagaatttactaataattatagataaatttaatatttactttcacataatttataaaattatgaagtagatcttaatattttaatttataataaataggtctagttttaaatttaattcaataacttttttttttaatataataactaattttattgctgaaaaattaatttataacttctaagatatatcttatgttagacaataactatatatatattaattaaaacttaattgcttctagagttaataattaataatcaatttaagattaaaataaattttaattttgaaaatacatatttcttttcttttttttttttcaattgagaaaactacatatttcttaagtaagttatactttcttttggcaaatttatatccaaaaagaacaacatttattattacaataaaacctttattcaagaatacacttgggacagagtaaattatattctaattgagagattataactaaatagttacagaagaataaaaaattaaaatactaaaaaatatcaatgtaataataataacaataaataattattaatactatattataatagaattattttagagtaaatata

SEQ ID NO: 18036 - DNA, 6831 bp, Cannabis sativa
  modified_base (6776)..(6779): a, c, t, g, unknown or other
accatattaaacactccagccgaaatacacattaaataataaaatatttttgtcaattaaatatgccaaaaatagaattaacatagctcttaaagatatatatggtcgatctgcatggtcctatatatagttaaaaacaacacagttatacgtacctatccttatagcaaccaaccgcagcctagctataataaatatatattgaataatattcatataataataactatatattatgtataaaatatatattatattataagtctaattctctacatgcaaaaaaccaaaacattcctttattttttctcttcatctaattatacctcaaaaaacccaaacaaagaagatgatgatcagaaaaaacgacatctcaagaagtgtcgttttgtgtgtgttttttttggttctttgttattgtccaaataaattattgggccaaataaaagtaaaagttggggtaattcaaaatttggagagtgattttgggaaattaggtttgagttgtataaaaatggctttaagagatttttatacctctaatcctacttataaaactaggcttattctctttactagagactctaaattcgatgtcgttcaagctgctgcttcaagtacttaattttaacattattaattcttttttttttaattcatatctatataaatattaaataatatagtatcttgttctttttaatagaatacatgatataatgtataaaaatataatttctttttctttgtgtatatatatggtgggtgtattataatacctactccagagtagttcaattaattatttactattgtttttattttatttttcttcctatatttgttttaaaaatatgatgatatatatatctatatatattagttaaaatttggaattcatatttgagatagacacttgttatcattatataatttttcaataataatattgatatttgtctttttgtataatgatatatattatatatatttatatggttctgatttaagtctacctaagaatggtaaatgatgaagtttgaaaaccttcaaaattttataagtaattactgtttgaactataaataattcaaataaaaaaatatagagatacaaatttggctatgcatgataaatcaagttgaaatgtaaatttatattatcctcataatttttttttattgaaacagctttggatctaataaaaaacgttaaagtccaggcaattataggcccagaaacatcaatgcaggcccatttcataatcgaactgggaaacaaagcctaaattccaatcataacattctcagcaaaaagcccatctctgacgtcactccgaagcccatattttttccgaatagccgcaaacgactcatctcaggtggaagccattgccgccattgtcaaagctttcggatggaaacaagtagtccccatctacgtcgacaacgagtacggcgaaggaatcatcccttacttaaccgatgctttacaaaacgtcgatgcccaagtaccttaccggagtgtaattcctccgaccgccaccgatgaccacatttacggcgagctttacaagctcatgacaatgcagactagaattttcgtccttcatatgttggctgatcttgggcaccgagttttcgccatagcagagaagattagtatgatgggtaatgattacgtttggatagtgactgatgggattgctgattttcttgggtcggctaattctacggttcttgattcgatgcaaggagttttagggttaaaaatccatgtacccaaaacgaaagagcttcagaattttacagctcgatggagaccctaatttgaacgtgaaaatcccaccaatgttaactatcctttggtgactttcgggctttgggcatacgacgccgttttcggattggctgaatcggttgaggagattggtaaagcttcgaactttagcttcgaaagtgtgaatttagttaactcttctactgatttaggatcttttggtgtttctcgaagtggttcgaagcttgctcaagcgttatcgaaaacgagatttaaagggctttcgggtgagtttaaattggttaatgggcagttacaaactccgacttttgagattattaatgtgaatggaaatggagaaagaaagattggattttggacagttgagaatggattggagagagttttgggtaataagaagaagagcaaatactctgctttgaataccagtttggggcctataatatggccgggtgattctacctcagctcctaaaggatggcaaattccagtgaatgggaagaaattgagaattggggttccggtgaaagagggatacaaggagtttgtgaatgtgtcttttcctttctcaaacgataccgtttcagggtatagtatagatgtattcaaggctgttatggaggctttgtcgtaccctgtttcctttgagtttgttccttttgctgatgcttctggcaattacaatcaccttctttatcaagtgtttgatggggtattctttttctttcacactaaattgcatgaaatcattttacttgagaaacataatagagacttgtgttgtgttttttttttttttggcagaaactggatgctgcagttggggacataaccattagagcaaataggtccttgtatgtggatttcacattgccttacactgagtctggtgtgtacatgatagtaccaatcaaggatgatagaagttataatgcttgggcattcttgaagcctttaacttgggatctttgggtgacaagtggttgtttcttcatttttattgggtttgtagtatgggttcttgaacacagagtaaatgaagaatttcgtggacctccacaccatcaaattggaacaagcttttggtactcattttcaaccatgatttttgctcatagtaagttttttgtcaatgttttgaacaaactgagaaaacagcacatttctttgagaaattattacataacaacttaacatgttgtgttttaataaatttacagaggaaaaagttgtgagtaacttgggaagatttgtagtgatcatatggtgttttgtggtactcatactcagtcaaagttacacagctagtttgacctcacttttaacagtccaaaagctccaaccaactattactgatgttaaccaactcttgaagaacaaggagaaagttgcttttcaaaagggttcttttatagaagaaatattgaaacaaatggggtttgaagatcaccaatttatgatctataacactccagaagacttataccaactctttgaaaatgggagtaaaaaaaacgggatttccgctgcttttgatgaaacaccttatataaaagtttttctagcaaaatattgctccaagtttactttggttgaaccgatattcaaagccgacggctttgcttttgtaagcttactctcttcatatcacttgaactttgttaaaagttctaatataactaatattctcaacatgtttatcctaggcttttccgaaaggctctcctcttgttcctgatatttcaagggcaatattgaaagtgactgagggaaagaaaatgaaggatttggaagaagcatggttcaagaaagacaccaattgtatgttttcatccaatagtcttggtctcgaaagcttttggggactcttccttatggcgggtgtggcttcatccttggctctagtcatatatgcggctatgttcatctacgagcaaagacatctactgatgaactctgacacagagccatctatttggaggagaattgtcgctatttttaaaacattcaacgaaagggatctcagctcgcacacttttaaatagaatgaagtgggtgcaaggattgtcttctcaaaaccgaaatggtacacagccaactgatcaagaaactgttgttatctcagctgtagagcttacttgcccaaaacaagactcaagagagaatcacaactcttagattatgctagtaatgatggaactctgcctcaacttataatggtatgagtgtatataattgatcatgctacatatttatgttggaaatagttgctgtagaaaataaaaaggaacaccaaattaaaagtttagatgtgctaccgtcaatctttaatgttgtccccgaaaataatttttttatgacggttttcgttatagttatagaataatctaaaatatgttcatgctctaattaatgagcattattaagtagaattgtatcaaatcaagagtaacattacacaagttaatatctcatatatgacaggtgcttgatcttcacttactaattagtgacaatttgttacaatgtaagatttaacatagtatcagttttggtcaagtgggcttattcaatctcaaactttcttttcttttctccttttttttcttaagcttatgagaggtgattctcatgtgatcaccaatatatatcataacctttcattaggtcaaaatgtatcaaaacaagaattacattacactgttaagataaactcaacactaactaatagccattagagataagcataaaaccctacccgataaaaggctatgatatagttaaacttttaagtttcatcactacaatagcttaaatcttttagttttttatgaaagtgggcagggtttttttttttttttttttttgattgaagcgttaatatatcttacatggcacaatctgatattcgaggaaccccacacacaccctcccaaaccccttatgctacttgagctaaccacaagtagttaacaggtaaagtatgttatgtggtataaccacaatgtacattgtcctatttgagatctcctcctataaattccaaccttttttttgtttaactaatcaaactttcgtaaatacataaaaataacaaaataaattataaaaatacggttgtacgaaattttaaatatttttactttttttatgattttatttacagataatacaatatttttatatatttttatgttgtacgcttgataatttgtcgttgattttttgttatttgtatattattttttattgttgttttggtgttgtttaaatgttattttcctgttacttttatatagtttttttgttatttttatagaataccataaaaatgtaaaaaaaaaaattaatgaataagattacatatttgcctcaataataattgttgtatcttgttcataacataaagttttaatattaccaattttttattgaagaaattttgtttgttttaatataaggaaacttacaaaaatattggaatttcggttaatttttacaaaaatactgtcacacggaaatctttttaaaaatactgtgtttttataaaacaccagtagaacacaaaacagaacaactcaaaacaacaatagaacaactaaaaaaatatcagtagaacaacagtgaaaacttaacacaatatactgcagtatgaaacttataaaaaaaattaagtaaaaaagtacaaaaatactacctgacagtatataaaaaaaaatagtaaaagttagtataccatgtaaaattcctttaatatatggagggcggcccagtggagttagtcgtcttaagtgctaggttgggtctaaacccaagtaaagtcaattttgggctccatggtctaacattagatccataccaaaagatcttataaaagtggtaattttctaaacttatataaaaaagttatcccatgaattattttatgagtaattagtttaaaaaatttatgtagtagactccttaaaggttgttcttgtaaaccctttatttgcttccacatcatattgtagctatttaataacacttgtaaattattaaaaaattctgaataagttatagtggtaataaaataagatttaaacagttacttaccatacgtataagaaaaacagtcgcatgtgtaacaaaatatataaattttatttttgacattgtaaactatatttaattttttaaaaaaatttataggcaatcttaaaccgtacaccattataacaaaaatagactacaaaagttaacctgtatactaaaatagataaaaaatcttcagaaacgctcctttaaaagttacacggcaaacttaaccattaatttattatgcaatgtggctatattttttttgaatatatattatttgatttaagtcataatataatatatttctatcctcatgtttctttcttttcttttttgttacaaaagatagagaacatgcatgaatccttccttcatctcaaattataatgtaaatacattatatataaaccatatcccacactatatatatattatcatttaaaaatatttatatatatacataaataatcacgatatataactaccaatatgatatctttaacaattaataaccaaaggttgtaatagtgaatattatatatgtagcaaaaaagagaagtgaaataagtggctgaaatttaacatatagatatatagttatatatatagaaatattattatggatgaaaaaaataaaattaagaagaagtttgttgttttaatgaggtgggtgggttttcacgtggtgtgttgttcacaagtgatttcccattcaaaagaaattaaatcaaaatcttcattattatttcaagtcctaattgcccttcaatttagggttgacattatagccacacgtatgcttttatactcttacataggtacaccaaactatatctattctctatataaagtgcctatataacagaatttgtatgagaaattcatgggtgactttnnnnttatattaaaaataaaataatttattaataaaaataaaatggtttatgagaa

SEQ ID NO: 18037 - DNA, 4470 bp, Cannabis sativa
aatagaaagtcatgacatgtagtgctactcttgtttttaaaccctagaataagaaaatctaatagtcatgacgacatgagtgttgtacttaaacggcttataaattataataatgttgtagttacgtgcatgaaaattaaatgccatgaaacgaattttcttatcatattaggaaaacatacataaacaaaaaaaaaaacgatgaaaactaaacaatatgggtgagagaagagaaccccgtcagtcgaaaccacgtacgtacgtagccacaaaagatcgagaagttagaaaactccgttatatttgacataaccacgtgacagtcatgtcaatataggtcccacagcccacggcctctggttatggatacattcgatggctctctgccccagtacttgcttttctatctttctctctcctaataatcccggtgagagttcttgtcagattccggctataaccttttcttctctttatttatacctgctccttctctactcttcgatcattatcttatcttatatatcttcttttattttttcactctctttcatagaagaactcgattgtaagaaaggcctgatgactagctactactagttaattatcttgttttcttaaggagctacccctgctctagattcattccttttttattattaaaatttctattttgggttgctgaatcttgctccgtaattattgttgtcctttcaaaagaaagagcagacttttcttatttgtttttaaggaaatatactgatgaagggagcattgccggagatgttgcagtactgtctgaacccttcggttaatctttccgggaactgtacggaattgacagtacttgagaggcagagggctcgattgaagtggcaggaagaacagcgtcatcaacaactacaacagagtagttactttcgtgggagtgaactcggtgggatgttcttccaagctaatgatcatgatcaactccataactttcaggtccattcgttcaaagatttggcggtacatcgatcggttaatcacgatcccagatttaaaaatgagtggcctgagcccgagaagtttaatatcccattattggaaaacgtatcgttgtcttcgtcttctggttttgtcagcgattctattaatccttctcctgggtttcaaatgaacggtgccatttctagaacgtatagttgtcctccaatagtggcagtgggtgcggaaacagcggaggttaaagacaaagaaattgttttaccggtgggaaagttttgctcttccggtggaaaacaaaccttcaaaaagaggaaaacagatcaaactcaaaattcagaggtataaatatgtcgagtactcttttctgctttatatttctatttttcttttctgtatttatgagcttgagttcgtttctggattaatgattatataaacctgatttgattatttaatatagaaggctggagaagatgacgagtcaagagataaaagggtcaaaggaagtgcggaggacggagactcgaaaatcacagagcaaaatagcaccaaatatgtttcttgtaacgccaacaacagagatcagtcttcctctggtgacacctcgaaggagaactcaaaggcgtctgaggttcaaaaacctgattacattcacgtccgggcacgccgaggccaagcaaccgatagccatagcttagctgaaagagtaaactcgctcactctctctctcaatatatatatagattcttggaattatttagtactttcccattaatttttcccttattattaatcatcatttcatcaggttagaagggagaaaatcagcgagaggatgaaatatcttcaggatttggtacccggatgcaataaaatcacaggcaaagctggaatgctggacgaaattatcaactatgtccaatctctccagcgacaagtagaggtatattttaattttgcttcactaaagttttaatcccttgtaaattttgatgctttgcataactacatctgtttttttttttacaatatttaaaacagttcttatccatgaaattagctgctgtgaatcctaggcttgacttcaacatagacgacaacttgtttgcgaaagaggtaatagcatgattctagatcaatcatcagagtaactttatctgtttctcattcttgtatatatttcttttagagagcctaaccatatagtgtaaatgtaaactgtgtaatgttatccgaagctgtctgttactaatagtatgtctctatattcaaaacagatatttccaagtagcacagcgggatttgagacacttgggatcaatgggatgtcagcagaaatgtccaactctgcttatcttgaattcaataatcaagggcagcaagtagtttcttccagtggattagaaatggccatgaattttcctgacatgtcttgccttaaaagaaccactagtgcccctgtttccatccctcatcaatttctcgacacttcatgctacactgtaaatacttctataccatctcatttattgtaaaagaaaaaaaaagtatcacttgtactaaatcactctcgttaagctgccttttaatggaaatatatttttctatgataaaacatatgatttattataattaaaatcagtactccatagtaattatgataactgttgttagtgatacataacgaggttttttcattaaatgataaagtttagtttgttgcgcttttgttttttttcttcggtacttttttttacatatttaccaaacaatggtatgcagcaagttcaaccaaccacgacttgggattctgaattgcaaaaccttttcatttcggaatataatcaaggaagaacaacctttacatctgatttaccatttacaggtagtctgatgttattcagaatttttttatagaaattagttatatgattaaaaattggtttcaaggcatttacactagatatgtatggatcccaccaaacgcttgatagggaagttagctaggaattgcttgtgggttccatttaaaacaaataaactttgataaattgcatgtctttctttacacgtttttcctcgcgagaacaaacaaattaaagccatagatttttgagagaccacgatattccaaccaccagagcatggataaagaaagagcaatcagggaaaattaaaaggcgcagagtagtggtggtttttttgaccttgtaagccacatatatataatggctatcatcatcatcatcaataaatggtgttattttttaaaagataaaagtgttaggcgataaagtcatactcaaagttgttataaataggttccgacaattagtgacataattaattattctccatataactcacaccaatcaaaagattcaatattatcatcaaccaaggtcaacatgtactagttgcgatacagggtgtatgaacatatttaatttatactggtccttttttacaccttcggaaaaatcgactaatttggttttattctcatatgtgcaggttctgattgttctactgaagctggcaatctaaagatgaagatgtgattgtgatttatacgatttcttcaaaaagttttcccagaattcttgtttgtttcccaattcatcattttcaacgtacataacatatatatatatatatatatatttgtttatttaccggtgacatagagtggatatcataataaataaccattaattaaccacaaaaacctgtcagctaacggtctaaccaatttgggtcagaaagggactctactacctatgtcatatccgcataaatactttatggtatccactatccacatattacagtacaccttctatattgaaagattataactagatgcactaaaaaaaattaaactataacaccaaaaaatattaagtgtaacaataacaataaacaattcttaatacaatataaaaaataaaattattttttaataaatattgtattataatttaaaataaaattattatttttacataaataaatttataaactataacatgagctatttacaaaattatagaaaaaaataaaaaatttacataaatataacattaaatttaatgcaatcaaatatgatatttcttaactgaacaaattaaatatatgcgtataaatgtcataaaaattattaaaaacagaatcaatttgcaaacacctctctaaaattttctttaagtaaactatattatatatatatattttttctagtaacaaattaaatattaacattaaaattaaaataatataaaaaatacttatatattttcaccccaatctaacactttttctctaatatatatgcatttttaatgaaatttattataattctatttaaatttcagcagtataacaactgtgatattccgtattttaatattctcaattttattatttaattaaatgtggaataactaaagtggtactaaaacagtttttccgtagttacag

SEQ ID NO: 18038 - DNA, 9662 bp, Cannabis sativa
  modified_base (4477)..(4478): a, c, t, g, unknown or other
  modified_base (4760)..(4778): a, c, t, g, unknown or other
aactttttgttgtgactaaaagtagcatttagttacaaataatttatgttggaactaaaaaattgtcactaaaagtatcaattttttgtagtggcaagagtacatgttggtttggcatttccatcataggcaacactgttacgttcattccatatcgaccacatgatgcaaatgatttgttctagctcaaatctgtcatatatgcttgataagtgcacaaggtaatcccctttaaacattgaggaggaattattccaatttaaagttagtcatgagcagcgccacacagatcttgcatatttgcagccgaacatggcatgaccaatatattttcatgcttgtttacaaagagaatagctagaatcagtgataactttgcgtttgactaagttaatagcgactaggagagcttcatgaacaactttccaagcaaaaattttgactttttatagtaatttgagggactaaaataatttccaccatgacgcagaaaaagtcgaagatgatgagcggttgttgttaacctgtatctcttttaattatcaaaacaaatgtgaaaaaaaaaaaaaagttcgaagcattggatctttaaaattgagctttgctattatgcatcacacgatgtggcgcgttaagagtagttaccaattttttatattatttattaaattaaaatgtatgtaattcaatattaaattgcatcgataacagcatgtcacattttgtagtagttggcaccttaagtttaaaaatatattcttggcagttggatttgtatattttagaacccctttcatgattatttcccaatataataaatttataatatattatcttgtgagattaaccttttcacacccgatccctttactagagcctggaaagttcagtattattaatttaattacacagtaacacatttggtattagtattatattatattatatgcaagagaggccagttcaaaagaagtctacactactatagccaccggcccttttataacatatattattatattagaaaacttggtaaaatactaaaattttgattaaaatctattgttaaagcagctggttaaccaacatatattatatactattattttggttcaaaaaagaaccatacatttaagcaaaataatatatataatagatcttagatctattataaattatttttattattattatcattgacatgcagttaacaataacaaaaatcttttcttgcacgtgttcaaagcatttttcttgccatgagtaatgtcatcggaaaagtgttttttttaaaaaaaaacttttttcttatcaaaaatatattattatatttgttaaaataaaaaataaaaaaatattgatttatatcatcatattcacatgataatgatatattttgttagatcacacattatattacggtgtgattattcatagaaaatgaaaaatatatatcatatgatttgatatctgaccttcttcgtagtccttagtaaaaaattaaacaattcacatgatgatatatattgtgaaagggactgcacattaatttttactaaatgtaatcatcaaaatcttattatcaattagtaatgataggtgtgttgaaagtttcgtagagtactgttgatggccaatggtattgataatattgtaagagattgtagttttgttacgaatcatggtctgacttgttctttttcttttcgacacatatgatatactttttattgtctagaaggtaaaaataataattgttgatgctaaaaatttgcttaccatcgagttactaaaaatagcaattccacgactctctacaatgattgccgctcaatctcccctttccaatcatcttctccagctaaattcttcagagacttcggggagtttcctgcaaagaactcttcgacgctcaagtcagttaattatcgttctgataattcagaatgaaagtatagagagaattgactctttttctttttctttttttttttcttatttgagggattttggagggaaataaccataatcaattatgctaactaattcgatcttttccatcgtcaagtccatgtaaaaacacttcgctcagattgatgatgtcaacgaggctttatccccgtgtgcgcgaatagatgatgtcaacaaaactctactagtcacctggttctgagctcattcacaagtcttggagggatgtctatctatttctaaatgaatcggggtatttcatgtcataaccatatcaacatgtttaagccacatatacggtgaatgtgtttgtaggttgttttataaatgttataatatttattttgtttctgtatgctaaacatacagtgttatgtttacacgacacatttattaaacgtattaagcatattgtgtgaccaccttacaaaacgtgcagtgtttgtgttccaatttttgtttcgttgatgtttgtgttcaaaattatgaacatctatagatgatgaatttacttcagttgtaagaaatctctcttcctatttgtattagtgcattctaattgatacaacgtatcgtatttgccattgctgtctcgagttgtaatcgcactgatacaaacacaacaaaatgacgcaaataaaccgatcccatcgttttataaaataaagtaaataaataaagctagcagggtattataagctgaaaatatattatttccttcattaacaaatctgttacatggggtgtggagcagcataagaattagccaaaatgcgttctctaaggccgttttgggaccttggaaataagaaaaagaagaaagttgataataaaaaaaaaaaagtattcatctaaaaagggaagttttaggttatgagcttctcaaactattcctccttcttgctgctaactttgtcatcttcatcttcttgagaggcttttgactcgtcaaattccaacaactgcacaaaaccatgggggggtaaacaatatcaatgtctttcaactttgaaaacactattgaatcaaaatgataattttgtagcccttaaaggacatagaaacgtgctgcctgtggatcacctctcataaaggtggcaatttgtattatcgtgttatgcaagttgacgtatttaattaattaatgctaacgcaacccatacatagagaaatctcaaccctaaccaacctgtcatgctcacatgtcaacctatcgtattcacacgtcgactacactatcttacaccaagggagctccaactccgctaaagaatgttcgctaagaccctacacgacatatcacccccacctacgatggggtgcgtcacctgagccccatcgaaccaaactataaggagatcatgaggcacttaaaagttcacatttaagactcccataggagccaccctgattcaatcccgctagtaaaaccacccttgagtgccacttttgttgtgtaatattctgtattgcctatatttttatgcaaagcatacggacatgtttgataacataaagtctctgctaacatatagtttttataattatcaaagcatgggagaaaatacagcataaacagagataagtggacaaaccggtttgatttcgccattaaatataacatgtgcggccagaaaaccaataacagctgggacaatatataacagcgcaggctgaaaacaaatatatagaattttatgtgagtgcatgcaggagatcaaatcataataaatgaagggcaatttctatttatatacaagtaaatatataatattacaaaaaatgtgtaaaaaacataattatataattgtatgcaattttatgaatatttatatatatttacaattttaacttgttaattaatttcaattaattttctaaaaaaaataaatagagctaaatatgtaaatataaaaattaatatatttactaaaatttaatatgaaataaaaaaagtatatacaaacacatttataaattttatttatattttataaacaatacatatatatttatgaaatatttaattagtattattaatgtttataatgctattattaatctaatatgtttattatgataataaatataatttgtatatagaaatatcataataattttaaaaatgaaacacttaagtttatctatttatttatttaaataaacacatttttcttgtttattaaaaggtcataaataatttaaaatgtaacacttatgtttattagttattgaaaaatgtatttaaaaaaataaatgaaattgtaattaaatatggtcttatatataaacactatgtttatattattattgataatgcttattaattataaatctaacatatttgttatgataatgtttgtgattatatttttttttttaccaaatgtgtgataatatgctgatataatgtgtttattaaaatttaaatacaaatataaataaaacatgtctgtttattatttatttttaccatatatagtttgtacataaaaattaagaatanntttctcatagttaataaaatatataattttttatgcacatataatgtaattaagtactataatatacataaaattataaatttcccataaatgaatatatacaagtcacgtttggagaatgagatgggattggattagataaattgtacgtgatcaagatagtagagggtgttaaaaaaactaatccaacaacctaaataatccttctagcttaggataacttaattccattgaaaaattcaaaataattttattcttgcaacggcgtgtgacgcccaggcnnnnnnnnnnnnnnnnnnntggcttcgggcgcaacttgcgttattttattcaatccaatcattcttcatgttgtatttctatggtgagacttttttgaaaaaaaatactacttcgtatccaacctatattcttctaaatataaagatatattatttatccttcgctatgaactatgactggtgttggaccagccagtcattgatttcatttaagaatgaatttgacaatgagaggaagaaaggtcacctgtgcagcctgaaaccagttcattactacaatggtaagaaccacgccaaatgtgtaacccaaaaacgcactcctaaaatactggccttgtttccctctagaaacatcaaatcgcaaagccagggctacaaaaatacctgaaagatgaaatcataacaattaaatattttcggatgtagaattaattacattaacaatttgaaaggaaagctaggtaggcaacaagataccatataaagtataaacttctgttcatgcaaaactcattttccacaataaccttacggcatgtttatagtaaacaaaatcggagtaattcagtggaaaatggaatgaaaatacagaaaaatatgaattataattagcaactagaatgagacaatcatttcatgctgtttacgcaaataaaaaacataacaggaaagctttgaattgacaaaactgacattttaaataagagaataatacatactagtattttgccacaatagtttttgtcctagtattcacttcctaattttagcaagcacatgaatgaaaattattgccatataaactatacccatttaagtaaacatgctattaaagtcgggagatggcagcttgctttgtcatttaaatttccaaactgtgcaacactgtttggtgttaatttcgtaagtagggacatctgaactaatgttctttattcttggattatcaacttattttataagaaaagttagcccaaactgggttggaaccacagatctcttacccacaaccaactcaaccacatcatacattttccaaattctaatatttttaccaaaaacattattttaaaacagtaatatctttatttatggagtggtatatcctgttactactgctatgtgcatatataacagagtaacacactatggttcacggcaatagaagtccggtagaaaatagtcataatatcagcaaaagtatcataccagggatcactatgtcaccaagtccaagcatagaaaatgggcgtgtagaatcccctgtaggaaacaaaagctgcaagaggggaaaaagaggatatgccatgaaatgtaggctgtgatcagagcatcagtcatatatacctgtgtcacaaaattattagactcagttggaatacaaacctttataggagcatcgaaagacttcgcaacgctaaccataactggggtgaagaaaacccagaaaatatcatacacaaaaagtccagcctgcaaaacattagatggagaactatgaaattttaaggggggaaattgaaaagggaatatctttcgtatatttgtatcataaaatgaaaatttaaaaatgtttcctaattagctatacctgaaggtttataaatgtttttataagaaaaacttcaagttgaaaattacaacaaacttctaaaacacatactcctttctttttagttcactattcagaagatcgatatcacagcaagaaccaatgcatgatgataattacataagctaaaagttttgccaagcaagcatagcatagtaattacaaataaatttgttataattcacaagttcaatttcttaccaagaggatggcaccagtcttgaaagaccctagagaaagcatttcaattccctgcaaataacaaaaaatttaatcctatgagcacgattgttgtacgctgtctagggacatcaatgaataacaaagataataggcaaaacatagagaaaactgagggcagaggcaatagaaatagctagacagtatctgctatttgatattgaacaataaaatgataagaataaaactagaacactaaggtattcaagagacctcaaccctcccaagaacacattacaatcagcataccctcattcactacccctcactacaatgacccatatacccttctaattcctatattccaccactcctgaggtctatcaacgatgcacaataactaatagtttggacgtgaaatgaaaggaagaaaaaaatggttgaacaaaccttttcatgacacaaaagtaacagcaaatactctaaagaaaaaaaaaatacatgacaagatgattgcatattactgacagcaaaaaataaatcgtatcaaatgagtgtaaggtggcaaaacctgaatgcagaaggccaagcctaatatattattagcaagccaatgcttctgtgaagcataccatgcacagaaaaaggttccggggattgcagcaacaacctgagatcttgtgaactcaatctccaaagctgtgtaacaaaggtgtaaggaaaaatatcattctgcataatgcaagtgagataacgtcaactagatcaaattaaaatcaagtgttgtacgagctaaactatggaggcagaatcattttaaagacagcaaagatatttccaacaaggaaaaaggaaccactcaaagaagaaatgaagaatcaaaaattttcccaatcatggcaaccaaacctctaggtgattatgagatcatacttgtcgaacaagtacactccagcaaaatgcataaacacaattagccagcacaaagtacaattgacttcaacattggacagataattatttagtgtaagaattcaaaaataacaagaaaaaagattacatacagcggaaatatggaaagcgccatactataaggtcctcattccaatgcttaggtaaataacgtttgatagcaggtaacaatgttgccctgtacaaaacaaattcaatatcattaaaaccaataaaatgtttccatagtcatacaaatattacaagtaagaaatggacaaatggatactacagcaatagaacatacgagagagcaatgatcccaagaacaaagaagtagcttgtcaatacagcgttaaccaagtctttggataagaacttaaagagtaaaaatagcgatagcagcatcgcactcccaacaaaagggaagcgcatggcatgttcatttgacattgtctcctgcaccagtgaagatccaccataaaaattcaatcttgttcatgaaaacagttcacatacaagatacaacatcattgctgtacttacagtaggcggcgttggcttcaccgatcgatagcagcccacaaaaacagtgaggcaggcagttaaaacaacatttaaattaggatctaccttcacaacaaggggtgctaatgttaaacctgcagaaacattttattcttagtaagtgaaatagagtaaagaccttacataccactgagcataagagtcggaagcagactacagtaaataattttaagtttgaactattcttatcttttctaaattaaaccactcacagaccttctacaaaaacatatagtcgataaagaaacaaatgggtgcacatcatggcaccaaattccaacgatcccccacagtctaatacagttaattatgacaaggagacaaccccaccaccatattttgcataaccctatttcttataaacaatctatacatcattaagttggcaccaaatgctagaaacagttctaaatcttggcattgcactgtcgcacaaaccttactttctctcaataaggctgaagatctgcaaagattcctaggtgaaagagcgatactaatcttatttatattaacaagagataccagatcttttactttcctcccagtggcaccagtgacttacaaagcaaatataaatgcgtgattaaaataacataattaaacgtgaaaagcaaacacggcaaacctgctaaagccaaattcgctacacgctcaacgttcttcatctttagttaaaactctaaaacgaaagctttatccaaaatgacccttctccgcaatcaaaaccctacaaaggaaatgaatcaagtcgcgtcaaaactaaaaatttcccagatcacacaacaaaaccttaatcccaattcggtcataaaatatataaaaaattattgtaaaataacaagtacacacatatatttttcgaatcaatataattgcattgaagaacaactgctcctataatagcaaacgaaattatccgcgtaccagttacagcgatttccccctctcgcagatcggagaaggtaagggtagcccgaagagagagagagcgagagatagagaaatatttggggattttgataactttgcaaactttagggctttaccggaggagggaagccatggtcgagttattgagcactggagcaggttaaaagtcgtgaggacatgacggtgacgtaaggtttataactgccaataaaaaatcggttttcctcaagaaagtaaaagctgaggcatggtctgtacaacgtggcgttatattattggttagtgacgctgggatttgagaatgagctgttacgtttagtgtggctgtaattttttatccaactatgatcaaccgcaccgtattagtcagaatattgacgcgagttggatccccttaaccaagccacgtcttatgaggtttcttagccaattgtattgtgccaaatcatactatgaaaactcaaaatatctttcagctttattatttcttttttatactgttcaactttttttttgttcagaatttcttttttaagatgattgtaaaacttaaatttagtgttaaattaatactaaaaaattattattttaatattaattttttttaattttaatcacaacactaaaaattacaccaaa

SEQ ID NO: 18039 - DNA, 4927 bp, Cannabis sativa
aaagcatcaatcaaccatacataatcggcgaaatcgaaagaaaaaattaatcaaaaagtgattcgatttgattcttttgattgattgattgattcaattggttgaaatttcaaaggtattggggaagaagaagaagagaggaatggcgtgtcgaggcgaggaattgccgagtgtaggttgaaaatctgtgtatgagatcgccaggtggaagaaaacgaaggagaaaatcaactgaatgaaattatatatatatattgcctcctttctttctctctgggcaaaatagaaaaattaaaaaattaaaactaaataataatatttatagaaagaaaaaaagaaaattagtgaatgaaaagtaacacttaaaagcctgtgctttggcgtgtgcgagtttttagttcttttaccttgtttttttttttttttttgagaaaaacctttcgaattggtttggatgtcggtatctttttttccttatatctttcttttgtatatcaaagagtaatttgcacttaaattctctttaactataattttatttttacttaattttttaattttaaattttggtagtaatctaacctgctaaactgtagtaaatttaaagtgtgatccacttatttcagttgactattcacatcgactgcctacgtgtactattatgtacatgtgacacatgtatattagtccacttaatataattatttaaaaattataaaaaaaaatatttttcaaaatttattttaaaattaaaaagaataatttaaattaaattttttaataaataaataaataattttttatctttttttttttttttgattttcttattttctctctttctcactgggcccttttttcacactctctccccgagtctttttcttccttcccagatctgggttctatctcaaaatcaattggtaataggaggagtaactgattcattttatatatgacaatttatttccacatattaacaatgtgggactaactctaatatacatatttaacatatttggtataaatatatattattagtgtagaagaataattaagtaggctaggacattatttaaaaaatggtatgttaagataaaatatctcttgttaaggttgaactgaaattacttatatttagagtattgaactgaatttgagacacttactaagattgatcgtatcatcatcttaatatgtggtgtgtagataaaagagattaaattaagcttattttttttttttttagtaatagaaagaaagtggtttttttataagaaaaatattgttataattacaatttttttttaaatgctctagtttttaaattaattattcgaatttaattggatggacggaataatatgaagtaaaaaaaaaacatggacatgacagataatctacttctatgattaatactacaatataaatataatctagtaatcaaatcattgatattataattagggaaaatggaataagtgacaatggctacgaatatgtttttaaaaaataaattatgggaccaacacctaagtaaattatgtattatactattctagattttggaagtttataagatgacataatatattagaagaaattactttttcatgattagttggctaataatttaaaaataaatataagttaaagatagaaaattagtgtttatttttctcttaattttaaaaatatcatcgtcatttgaaaagtctttcagtcttttctctctaactcaatttctttctttctttcaattcttgtcgtcgactttgttatcatccttgtttccttttgccattggatatacattttagaaaattaaaagaggatcacaatttttgtaaccaatcgaacatttattcttaactttcaaatgacattattattgtacatactaattctattgagcattcacaaaaaaattacaaaaaaccttaaaaaatgtaaatctcatcaaaattctttttttaccaaaaaaatcaacaaaaaatataaataaatcacagattgaacatcaaaaacaacattataaatcactaatttctttaccatgaaccaattaaaatgtgacaagaataatatttttcttctaacttcctacaaatttaagtgttcgatgcttgatcgaacctttttggtcgaatggtcgtgtctctaagtgggggcggtaatagtggattaagacagaggactcgataaatgcttcgtaaaaagacgaaagaaggagaaaatgagatagagaaggattcaaatggcccgggtatctttaggatcaatgaaaagataagcattaatatggaagatattgagttttgggctattttttaatttttgtccaattgtatgcactaaaaattaaatttctctattaaaattacttttaaaattttgatataagatgtccctttaagaaaaaataaagatacaaatagtaattagtaaagggatcattatttggtggaatcaaacaaggaaacatgattgacctaactctttatcaattttaatttatttgaatagactactaaaaagaatacaaatgattccattgactagaatataaaaaaaaatacttaacaaagaaaacaaaatgctctcgtaccacacattcttgaatatattcctatgcttatatttattttcctcacatataagttatttcccttctttaaggtctaaatattcatatcccctttcatacataacatacatactagattgtatgagtggagttttttgagtgtttgtttatagttaagaatgttatttatagatttgttagaccttcctattcttttgagattgaatttttagtagaagtgttgttcttgttaaatttatacttatatgattagattatttgtcttttatttttattataattattattttaaaatataaaaactatgacatacttattaatatttgatccatttaaataactaatttattatatcccaaaaaacctaagtttttgttgtaggtgttgttaatttgggtaccaaaaagatcacgtgactgtaatgcacgaccaattttatagaaccatgtaactcgaagtagtagacttaattcgaaacaaaaactgtatttgagtagtctacattgcatcttttaaagggtgtttatttaaatttttttatttattttggcatataggcaaaaattttaatttaattttttcataatcgtatatattataattatttaggaccacctgcaatttttcaaaaaatttcaaataatttacaatactgaaaataagatttatgtattttattgtactaacgattatttttcttacgtgtgtggcaagtaattgtttaaatcttatgagttcataaaaaagatagattaaaaaactgttttgaataccaaaaagataaataatctactagaacaatcctttaagggtctacacaaaaatttcaacattatttagtttgtttattgtttattagtgagatactaaatcaaaaataagtaaacttgaatttaatcacaatttgttttgactaattattatttaaatatatgtattataatgttcgaaatttatgtagtacaccagtctttttttgataaactctctaatttatttgtttattttttttttgaatgaaagataattattattagaccaacgctaaaaataaatcaaatgacttacataaatgtccataatcccggtcgccaaacttcatcatcaagagagagctaatttagtaatattatgagtaataatattcagagagcgagttcaaaataaaaacttaaacatattaagacttttacaaatcaaactaatatcactcaaaactattgccatacaaaaatctttcttactcaaaagttttgcaataatttgtcaatctaactcaacctcaatactttagtaacccagtcgacaacacaatttttattctaagttttagtatttaaaaaagctttttattctaatttgttttcgtatttaaaaaaaaattattctattttttttataatagcgtacgtggtagttaattaggataattttttaattttcataaaatttcgaatattttaccgtgccgaaaataaggttcaaatagttgattatcacgcatatataaaaaaaaatagtcgtgtagcagtaagatgtttaaatcttatttttgacattttaaactaatcagaattttttaaaaatttacagacgatcttaaataactataacgtatatgattatgaaacaaaaataaattaaaaagctcttttgaatgtcaaaatagatggagatctactgaaataactctttaaagaaatatccaattttaagggattatttcataaatacacaaaaacaacaaaaaaattacaaaaatatggttttacggaattttaaatatttttacggtttttttgattttatttacaaaaaatacggtcttttatgttgtatttttattaatttgttgttgattttttgttatttatatgttattttttgttgttgttgttttgatattatttagatgttattttcatgttacttttacgtaatgttcttgttgttttaatgttatttatatggaaactcgtaaaaatataaaaaaattatttaaacgtaagaatgtaatttttaaatagtaccttatgtaatcatccccaattttagttgaaaaatactaaaaagatattattggtgtctagtactctccttaatgtcataacataataattaaatatcaggtctcatataaattaagaggccaattaagatttttgccccccaaactttgacatataccaaattatgccccttgaacttttaatttcgttaaatatgtctcctaaactattgagattattggatttaagcacttctgtcttaattttagtaaaaaagtctagcatagatgaaagttcatgaagcatgatt

SEQ ID NO: 18040 - DNA, 3371 bp, Cannabis sativa
tattatattatttaatttttcattctcttaatcttattttgtataaccccattagaataaactatctcattcattctttcattctcttcttctctttgtcttctctcttttcttatttcttttttttattgtatattattttataataaatttaatatatttaaaaacagatattttttaaaaaacctatgtatttttttttttaataatttgtttatattaattaatttgtaaacagatacaatacaaccaccagtaccactttaatctccaatattctttatatattttcttcttcttcttcataacgatgcctatagttataaaatattaatagtggttagtatcatttagagattgcgtcttgcaattagttagtgatagagtattgttattagatactagcagtgcattaacattacataagtgacaccttacaattagttaattcttttccttaaaaagctattaaattaaattatatagaatctgatacttaattacactaataacaatatgattgctaagatggtgttagactgggcactattggtacctcttagcatttctcattagcgatattctataaaacttattacattaaattataataagaatcgatacttaattatattaataataatataacatgttagagttatgattctaacgactgatatggctcgagatgtaggttggtccaaagttgttgtgttcagtgattgtaaagctctttctaatgcttagcctttttagaaggtggctggtctgtgctctttgcttttttctgttttagacttgtctcattgtaagttgtgttttggattccccaaactcatgttgtagctgccaatgctttggcaatttgggctaggcttgccaagtttagcggatgcccctccttttgggagttaacttcctttgttgttaacaagccttgtatttagtttttaatgcatctcttccttaaaaaaatatatatatttattttacttcaaacttttacattaaaccatacatcaacttctttattattacaactcatctattcaatatgatatccaatatgatatccagactttctattctaccaagtctttctcttgcaaaaaataaaggataaaaaacaattcaacattgcacacttgtataaggccaaggagctagcaataatcaaactaccaaagttgttttttgaagcagcaatggtatgcattgtataatcaacttgtattaacatttacaggtgaccaaaaaaaaaatatactttaacatattctgcctactagcttctatgttcaaaccacaaacattttcatcactatccgtaatgaaattggaaaattgtcatctttatttaagcttaacagctcaaaaagttttatgggtgtttcacaagaaacttctcagaaagtcatccatcttagtacttgagcgagacgcttaactccagagttctaatcggattcgatgtattagtgctggtataatcacactctaaatttgaaagttgttggttattcaacatgtaacaggttggtgatgaccatgaggaattgaacttcatcatagcatgcaaaagcaaaccacaagcttgaccaggtcgggcgcagagtttactccgaatagcatttaagcttgcaataattcatcatctgatgctccattactcaggagttttgttcccaactctgctcttggctttggtgaaagacctttcactagcatctcttcatcatactttctagccacatctaacattcccttgtcaattaaagcatcaatcagagcattgtaagctgactcattcggactcatcccgagttcttccatcttctcccacacaatgaaaaccggtctaagaaaaccccatctcccaaacttcctcatcagcatcacaaaagtatccatcctcggacgaacaccgctaacaatcattctatcgaacaatccaagaatctctttcggttgctgcagagaagcaaaaaagcactggtatgtaattacatctggtgaacaacccttgtcaagcattttatcaagcaccttagatgcttccctatatctcccattatcacacaaaagctttataattgtattatgactaacaacattgggttcacaaccacattctctcatctccctaaagaccctaatcgaaaaatcaaccccttcagaaagaccaacagcacgaatcactgtattataagccaccacatccaacttaatccctttcttcttcatctccttatacaatttcacagctttccatggcttcccactcttacaaagtatatccatatatatagaataagaatgtaaatctttttcaactcctctcttatccatctcttcccaaaaatccctacacttactccaccaccccaatttaaaccaacccctaagaatcatattaaaaatcttagtattcttatccaaacccaactcactatttttccaaaagcacaaatcttgagcatcaatcacatgtttaaactcacaaagagcatcaataagattacaatacgaagtttcatcctttaaaccaaactcacccaaacgattataagtcccaacagcctcattaacgagatgagcggagacatagcgcttgaacatgatccgaaacgtggtatggtccggataagaaactgggttcttactcattcgttgaattaagtcccaagagagatcgaattcgaaatacttaccgagaatatcgagcattcgattgtatgtatcggtggtgtgttgaaaagtgtgatgggtttcggcccatttgaagaactcgaaggcgcggcgccagtcattgcagtaggaagaaagggtttcgcggactgtagtggggtcgaaaatgggaggagggtcatttgattgaagttgaattgagttgcagagattagtagaagtggaaaaggaatgagaacgggagaggggttgggtttgatagagaaggaggaggtttgtaaggcatctggaattgaatgaagatggcactatttttggagccattttctctctgtattttttttttttttttttgttacgtgagactaccaatctatttccatacgagaatgcagctgctattaggaatccacatttttcctttatgggattcgtttttaatggggtaggaatttttttgtcaaaatgggaaatagagcaaaggactaaaattatttcaaaaatgttgaagtacacatcattttaataatttttattttatataaaatttatatctttaattttacaaagtatttttaacttttttttctttcaatttatattattaaaaaatatacctatcaaacaaaattaaattacattttaaaaattatgacaaaaaaattaaaaataaaaaattatat

SEQ ID NO: 18041 - DNA, 3016 bp, Cannabis sativa
gggatcaccagccttgttggcaattcacatcccctagaccacttctgttagactttagtccctcaagtttgacacactttgcatctcacttagctttactgtttttctgttcttatgacataacatggttcgagcctagcaaattatcagcagcctcacaagtaatattgacgctcaaaataaaacaaagaagcactcctgaagtcacataccccaggtgtacaaaaagcatcttgcatccctagcatctgtgtttcagatggctcctccagaacctacaataaagaaagcttaaaagttagccagatagcgagtcaaaacacaaaaaatacacattaaatgcgaaagaaattgaattaaataattttttagttagctaagaaaataaaagtcaaaaaattcctaggacataatagacaaatataaattccaagagaacatacaaagtctctgatctgcagatcttcaccagcaaaatggcttgttttcactgcaattaatcaattaatttacataagatacagcaagaacactaacttttattacaattctatgttaaatcaaataaaaaattgtttagaacctgttttattagaaaagtcaaaaccacccaaagatgggattgctgcagaataattggaataagccatggacaatcgatgcagaagggacgcgtggagctctcttctattgtcatcagagacattgtcttctttagttttccattgtacttcagcgtctctattttgtccatttcttaccactgacaaattcggaaagttctctgtaaaaaattgcaatactggggtctgcaactgctcctttttaaaatatgaacggagcaaacgcaattcagtcaacagatgctcaatctctacatcccgaatagctctaatggcagcaatttgacgctcaactgattaaaattgaaaaaaaaattataaccaggcaacataaaaatagaatcagcttatgatatattttgtgagctcacatgtcatgttaaaaggagaaaactatgtcttgttaaataataacaactcaaactcatgagggcattctaatccttatagtaattagtcagaaatgcctacaattcctagatggacaggaggttaatttgaatcgccaaactcatggaaaataatactgtggtacaatctaaaaaaaaattcaattacccataatgcaatcttataaaaaacctcagctaaaagcatttctcattgaacccattagaaacacaaaaattcacagttagcattatggctactaaatcccagccactggcataaacaatgataatcattagtaaacataatataccatatgccttgacttacatatttttaaaaactctacactgccttaattccaagtactaataaaagccaagatgaaaaacgaacgaatagaaacaaagttgtgaatcaataacataccatccgggtcaatgaattgagcttcttccttatcgttttgagtttctttcacttcaacattattcaaatcagcccctggtgacgagggagcttgtttatcagttgttttcttaacccttcgcctagccatatattcaaataattacagaaatgtcgattattctgcgacagacaaattgaagttacaatgtgagaacaattttatggtttaaattaacgacatattttagatgtgattagtcaatgatacttaaactacttgattttcgaataaacatgagaaactcatgactgataaactagaacacagaggggaaaatggaggttgtcgctagtcttttaaaaatacactcaccttgccggaaaaaaaaaaccagattaaaagctttgaagagagagaaggaacttcaaagagaaataagcagggatatgtgggcagtgctatttttcttctattggtatgtatggagagcattgttcatatcaagatggcaaaggagcaatgtgctaaggatgggaatcttcatgagtaagtcaacgtggcatttcgctagtataagtttctaagctagagcccaaactagctacctaatctttttctaatccaacttaagcataaatacgaaaaatttcaagattttcttaggttagtactctgtttttcttgaggattaccattcatccaagatctagctagtcctaaaactttgaatcaacgaaataaaagatcacaaacatacaattaaaaatacaaaatctttaaagcctgataaagaattaaactctaactaacaatccaacacactcaaacaattcatactcaaacaaagaagagaaattcaaatataggcaaccaaatcccagcaattaaacactccaagtgaaaccaaaaaaagccattgaaaattaaaatttgaaaagtaatgaaatagagtgaaccaaccttgcagtccagatcaacttgtcttctcttcagaaattaagacgcaaacccacaatgctcattgtaatttaaaacctaatcaaaacaaaacaagaaaatcaaaagggaaatccatagattcgccgctgcatgtttgttggaaacaaaaacctaggtgtaacaactgtatactagtcttgagggcacaaaagaagacggaggaagaggatgagaggagaatacctgattaaagtgtagcttcgatagaatatcgaattttaggcagaggagaatcgcagaagtcgagctccattgttacagagacagttctctcttctgaatttttgttttctgaaaattgtttcgaaaaggatatggctaaggccgtattttcttttatgaaaacaattttctatttcgaaaaagtgagttatgaagccacaaaaattgaattaacttggagaatttataagagcaaaatttgagaaagttggggatagggaagggggaaaatttaaaagaaagaatcagacttggaagggatttttttttttttttttcctttttgaaataattttttttaatatcatttcccacaataatttattctacaccaaaaatcactctctatatatcttacctaatatataaa

SEQ ID NO: 18042 - DNA, 3012 bp, Cannabis sativa
  modified_base (47)..(56): a, c, t, g, unknown or other
ttttttttttcttcaatcttttcattttttttttttttctttttttnnnnnnnnnnttttttttttttttggtttggttctagactaaaacggaattacctcaacaaaaaatgataactttaactggttttagaaaatgaaaaatgaaaatgtcagaagctttggagaatcacatgacaaacaagttaaggatatgaactgagcttaacaaaagtgagagcatgagtttagtgatatgcggacataccatggcatcgttgattgcataagccacgcagtagtgctcctggtaatcatcagttccaatacaaaaatcacgtaagaaaaacaaaaaataaataaataaaaatcgaaaccccatgctatgtgtatgacccatcaacattacattataacaaacttttaaggaagcccacgtcagctccacttctacatcatatgaagatgtatttatgtacagttatttaaatttaaaaataccatacaaattttagatcaaataaatagcatgtgtgacataaatcaccacttaaaggaggcataaaaatcagagtaatagtattgttgagagagttaaaaaatattgtgaagagatagtatattagactctgacagtgtcacttagttttggttcggttaatgaattgtaccttgttcacaattagtttgtttggttccctagcttaacctatttaagcttttgtttgtattgtatatttattctataatcaataaaaaaaatatatttttcacagtagttaaaacttaaacaggtatgattcgtaagtgtgtgacctatacatgtgcatgcttagtgcaaataacagggaaacagctttcaaggacaactaatataaatctatgtcaaattgatattaattaagatttgttagggttgacttgcctgcatcatgtgccattcttcaaattcatcaaacagttctagccgttcaatcctaatcaacacaagatcactgataagaatctttctccaaatatgtaagagcaattgtgagcttcatactaagaagttagaaagcaagagcacaaagatgcacagtaagagaaacttaagagctttaaaagaggatttataccatactatatcacaactgcagtttatctacaactgtagactgcatttaaaggaaagagagggagggagggggagctgaataaaaccaaaatcaggtaataaacttataatagagctgtcattttcatgtaaagaagaacctagaaccaccccacccgcctttcttatttaccctttaaaccagatgcaactgcaaagtagatgcaaagcgggggggactctcattgtgatcttcttatggtgataaatgttgttatcaactcagcaagccagcatgacataaatgtgtaaactggcgactcttctaagacttgtagtagttgtaaacacctctcaagatggtccgtcacaaatttcacaattttcaaggacaaggataacaagtagcaacacaaattaacacccaaacttttgagcatttaaacactaccaaactagtgtaattaattcaagtcaattatgacaattcacaattgaataatccgtcataacttcactaacacttcagagcataggacatacctacgtctttcttgagcttcgataaaagtactataaacttttagcatgtcccaagcaacagccctctgcaataacctcatgttgaacatgatgccagtattaaaaatgggatcaccaaaatactgaaatgaagaacttttatttccagatattaaaatcatggaacacctacctgccatccattgtcaagaaaaagtttttcctttgcttgtaacgttggtgtggcatataaacccaggagtccgcagccccggctctgaatgaaatcatttttaagaaccaaaagaaaaagaaaaagagaagtctttaagactcgaataggaaacaaggaaatccagagaaagactactaacaaatgaaaacaacaatgatcgtgacaacaagaaagaaacagacctccaaattcttaatcatctgttgcccaaaagcatcgtccggatgaatctattgtaataagatgtgaaaggattctagttcagcaattgacttaaaaaaattaaatcaaccttgaaacttatctgtcttacacagtcaaagaaaacaccaaataataataataggtaggcgtgaaaaggcacattacctgttcatacaagaaaaatattgctgtagaaaatgtttttgatgcccaaccaactacagcgctacttgaatctggatccaagtatatcaaaacgcattctgctattataaaagtcggcaagctgataaaaatattagaatgaagaaatttaatcctcctccacgataaatgaagataataagaagtctctttccttctctttttcaagggaaaataggtatgacatctaacatgcttaagatcaggatgtttcaagaaacaataagcaaaaggttcattttcctactgtctcccttctttcatgaactcatttcctacatttttgacatacccgtttttgttctaagtaatgactctaaccacatacctgagatccatatcagccaatactatgatgtcatctaacttgtttacgtcacgcaaatccactgggagcagtttatagttatcactaactacttcccctttttctgaaaagtgacagataccccaatagaaattttatcacttgcataaacattaaattaaacacattaacctatcaattattaaaacatcaaattttcataatcaacaaaatttctagtataaatatttaaaaatttacataatcaataaaaatattagcttaaggcaaaaaagagttgcaaggccattttatacgtaaggcaagtgtttaaaatgttgtttctaactgcagttccttaacactctaaattcaaacattgttaaatcaaagagaaatctcaaagtatagaaatctgaacatatacatccatactcagcattctcggtatggaatttcatatat

SEQ ID NO: 18043 - DNA, 6231 bp, Cannabis sativa
  modified_base (4394)..(4396): a, c, t, g, unknown or other
gcttaaaaaccgcctctaaaaggggtttttgtagtagtgtaatggcgtaaaattgcaattgtgttttgaattaatatcggtattagaataagattttaataactacatttctaccttaccaaactctttatctgatcaactttctcatctcatcatttttattatttttagttcattcacatttatattattttttatttatattaatttttagtggtaatttacctccctgtggataagatatagcccatttactatcgcgaccgcagtgtaactaattggacgacatcaggtaatttggtagctgatgagctctttatgccttagcaactgacaaagtagggagcttattacgtgaaatgtgctccactggtagtaggtggagcaatgttcttatttggttagaggtgcaatgtgccaatgtgctctactggtaggaggtgcaatgtgcctatatgcttcactagtaggtggtgcaatatgctcccttgatagcacttccatatctagaacaaaaattcatgcataattatcttaaatttttttgagaaataacccttgtttttccttttgttaagagagagggatgaacaacaattaacgccattaaaaaaagaaaacaataattaacataaacaatgttcatcaactattattaaaaaagaaaaaaatggaaggcataccacaatataagttaaggaatagccattaaaattaagaatccaatcaatttttttttctgtccaatccaatccaatccaatcagtaattgaatttgaaaaatcatcatccaatccaatccaattagaccccaaaattcaattcaatctattccaattacaaatttgattagatcagttttttgattgaatatctaattacacacctaaattttaataacttaaaaatataaagaaaaatattaaaaactaagcatcaccttttatttaagtttgatacttcataaatatattttccttacaagtgttaaatgtagtcaaaaatttttaaataatgaaaacaataacatttctatgttatcaaatataacaaagcatcatgaaaataaatgcacaaaacaaccaaatgttacaaattcaacacactcacacaaaaaaatataataaaaatatattatatttttcaatattttttactatataaataattttttaacatatataaatgtaattgcattggatcgattttttattggattttgatatttacatctaataatcgatctaatccaattagaatccaacttttagcatctaatccaatgcaattataattgaatatccaactttttaaaattgcattggatacattcggttaaattgaattggataatgcccacccctaaatttaaaataaaatatcaaacaaaactagatacattaattagagctaattaatactcattgccggttgctggacagaccttatgtcctctatcaattgatccaaattacagtaagatgacccaccttcatctatacttatttttgccaacctagccatttcagccgtacatctctgaaactcctctcttttctcaaccattagatcattcaccatctttgccacaatttccctgtcacatttatgacccttcatgtccatcccaactttccaaacttcacccacgtatctactatttattgtttgatcaatagcattaggccaacaaatcattggcacctccgccacaatactttccaaagtcgaattccacccgctgtgggtcaaaaacccacccactgacggatgagccagcacctcttcttgcggtgcccacccaaccaaacaccctctctccttagtggcggccaccaactctggcgggatttcaccgtcttctccggccaccatgtcttccctcatcacccacaagaaccgcttgttgctattcaccagaccgtgccaaaactccattagggtatctctcgtcataacagtaagacttccaaagctgatataaatgactgactttaaaggctgagaatcaagccaagcaatgcagctcctgtcctcttcgaaaatacttttcgaagatcgagtagttgacaaccttttggttagtttatgtttgagaagggcatggagcggtccaatggtgtaggttttggggcactgagttcttatgtgattgagtatgggtccttctagatcctcaaatgtgttgagtatgagggcatgggctcgagcactctgtcttgttacttcaacaattcgatgaagttgggggtcctctatgtctctaatttgagcaaaactaggtaggtctcgacatcttagaatggcttccattccaggtactctcgttatgatcctatccatatcctcatctcctaataatataaaaccgtaaacaacaaaaccagaaatcttaaaaacgaaaataatatatttaactaagtacctctgattggaagctcgccggcttttatgatatcaggaatagcaaagtaaatccaaaagcagcaagcactgatggtacgaaaatgaatgactggaatattgagttcgtctcctatttcatttgcaagaccaccaaatattccatcggccataatacaagtaacgtaagggcttctatctgaacccaatacaccaccactaagcaacatatctttcaaaattggttttgtcgtcttcaacatggaattaagcacccgaagaatactctgttcacctgaacgaggttcatctttaggcaaaccgtcgggtatggttcggaagaggaaaccagggtaggctgcatacttggcttgtatgtgagctcgttgttggagttgaccctggacatgatcggtgttgaggaacgttacgtcgatgtcggccatggctagaagctcagccaaatgaagcatggcgtttatatgtccctgagcgggtaacgggaagaagagaactcgaggaggaaagtttggctttctatctgtttggtgctccatattagttctggaaagatgcaatcaagttgtgaattgtgattagtcctatcaaattatatattataaaatatccctaacctttacaaagggatcccaatacataatagcaatgtgctctattttaaggtagggacttatagtcactctgttgcagtagattgtgagttcacctcttaccaccggtttcttaaccgaaatgttcaaattactgtgtcaagagaaataattttttatcaagtgcttttatttatataattgacatttggcctatgccctataatgtattggggttctcttacgttattatatgtattaataattgcaaccatagctattattttgcaggcccacagtctacacagtctacactacttttgctacctaccatggaaattttctgctacgaagttaatatctgagtagtggagccaattgattttattttgctgtacgtagcacatttgctgcaacacgtgttgttgtttcaatttataaaatcagacaccaaataatccattctgaaaaaagtaaattaagtgattatagactaataaccatttttgttttttaaatttattaaattatgcttttgaaattttgacagttaaatttctttcaacattattgaaattgttcgattcaacaatttttatttaattctttttaattttactagcatatgattgtacatgtactaaatcgtgcatcctaattttgctacctaccaaatcacactcttgaacattgatatgtatctaatcatgtccgtcaaattttcatccacgtcaagcatctgttagtaaaattagagaaaagttcttcatgaactcaacaatctcaatagtctgccagaatttttaattagcctttatataaggtgcttcaactgtggggaattaaaaaaagaccccatatgtggggtacttaattagaagttgttatattcaaaattcggttggcactttagaggaggacacgtgtcaatcttgaagaatatgaatcatcgaatataatgacaattattttaaaggatattaaatagaataactcattaaatgcagatcatagagcatatctaaaactcactgactgtatagttttacgcgagataaggatgtacaaactattgactcgtgtattagcgagaaaccatttcgcgtcagaagacacaatcataaggatgacatcagtaatataaagcaaggccccaacctcgctacatataaaaagcgatgacgggacatgttgactgttagaacacttagtatataatagacattataccaactaagtataacacttggatgaatctggacaaagaatagcgagacatctatctcgctacaggaaggcatatttctggtaccttcgctaatcagctccagacatatttcaatgagatctactgctccgtcgagtcagctctctcagatnnnagctgacattcaaatgatgttgactgctgaagttcaccttgtcaccaaaaattgcgatcgagatatggagcgttacgtcttcaatagcataaccgaggagatttacattattaacctcggaaagatatgggaaaagctccaactcgttgtcagggttattgttgctatcctagcgagatgcctctgtgagatacaccttgcaacgtcattaaatccacgtcagcattaacctattaaaagcagataaatcacagctgtgtgatttttaaataataaccacatttattttacgtggggcgtaattaaatcccataatttcagggaaatattattaggggatatgaatctaattttaattaactgcctccctatgttactataaataggggcagagtgtatagaaaaagcgacaaaaaatccttgagagaaagaaccctagttttgtatcagagaaatctaataagatagactcgtgaactatatgcaaaattttaactgtaaaaccatgttaaaaacttggtgtgatctttgcattattcttcttatttttattatttatgtgcaaattaatcacgaaataggctttattatcgttaatgaaaatttgtgttaatagtttggtgttttcattgagagcctacgtgaaaaaagctctaaaaaaaccctcctaaccaaaagaaaaatctttctccatggcatgataacagaaaaaatgttgatactcatcccgaagagactactcactgtcctgaaaaagagtcaatgggctcacgaaggcctcctaattcacgatctacacggtccacgcattcaagaaggactcagcatgagggtggccaaaatacgcggtccacgcgttcaagaagaattgcacgataattctacaatacccacatatataatatttttactaagcctaaatctatatataagactaatcctaatgtgatatatattcaatatgttttcttctttctttagttacttttaatttttaaacattctaacaatacatatcattcttcttctccgtactcaatatcttttttcttcttccaaatttgttatttagcgatgacggtcaaagagacgcgcagcaacaaacaacgatgaagatcaattggtgaagaagaggatgggttgcaataattctttttttgacaattaatgactctgagagatgtcggttcgattatgagattttattgaaaaaaaaaaatcatcttcaatatcgtttgggtatttgacaatgtagaagtgtaatttccctttgagtattcattgatgattttttttattcatttatatctttaccttgagtgtatatgcattaaattttaaagggttgttctattatgttactaatttattattatttgtaattataattaacaatgtgatgtagttatttgaatttttttaatattggtgtgtacttataggtgcaaataaacttcccaagaaataattaattactgttatgatcaattacttgtattagtgattgatattaatacttggcatcaaatgaatcatcatgttcataaatatcaaaaatataaatatttatatataaaagaaatacttattaaaatctccaaattactttatcttttttatttgttaagaaaaattataataaatataaattaaaaatatctcaaatatattttctcctgttttattctatttttataatttatgattattaatttattatactaatttaaatgtaattagatttttattaatgttaactatttctttaaattaaaaagaaaaataaagagagcaataagtcataactataaatctaattatttttctaagtgttg

SEQ ID NO: 18044 - DNA, 4274 bp, Cannabis sativa
atgtatcataatttcaagatttctgatgaagtcagatgacacttcagttgggtatatttccaagcataaatgtattgattgattaaagaatttttctttaacattaatgcttgttgtctaagtgggcagcttaatgaaactcatgaacatctttttttatggctacatttttaatattagatgcattcatgaagttttgtctattagttgggaactgattctcataactacagcttgcttggcattgtgaattcgatttggcgatgtaaaaaaagcatttattaattcttgtgcgataagtgctatagtgtgtatcatgtgtggaaggctcattgattcaactgttgttaattagaaggtttatatatggaactctaaggtaccattgatctcgtatgtggttagagatatatttgtataacatattgattttctttaaaacaaaaaaaaaaaaaagaaaaaaaaaagaaaagaagagatagactgggtgaaaattttaaaatgtaattaattgattggtgtttgtaaatagtttttatgcgtacgtaatataagtttaagttgatttacaaacaaaaataattaacaaaaattaaggtcaatatatataatattttttacaattttattaaaacatacaaattcaattttatcgtttaacaaaaaaagaatttagttagttaatttttgtaaaatgcatgcatttttaagtaattctttctcaataatctcatattcaaatacacgaggtatgtatttaatttgtcgaagtaaaatgagtaatttgcggcaaaacctccaactatcaatttacttgtaaaaaatcatccaacctcatactttggtggaaaaactctccgtttacatttttaaggtgtcgtctgtccatcctcgttaagtcctaattttacccacgtggtaatgataagtcactaaaaaattatcctatgtggccatattttacaaaataaaataaaaactttaagagtaatttgcggcaaaacccccccaactatcaatttacttacaaaaaaccatccaaaaaactttaaggttggatggttttttgcaagtaaattgatagttgggagagttttgcggcaaattactcttaaattttttatttcaattttaatttcaattttgtaaaatattgccacgtatgataattttttagtgacctgtcattgccacgtgggcaaaattaggacttaacgagactggacagacaataccttaaaaatgtaaacggaacataattttggagggttttcccaccaaaatatgagattggatggttttttataagtaaattgatagttaatggggttttgccgcaaattactcaactaaaatttaatttttatggaattttctttctatttctaaatattagtggtgatgttacttgcaaattaattatttgtcagtaatacttcataattatttgatgatgaatatctatataactatagtggtttctattgtttttaagctcacgactgagattacaaagtacgacactaaattaactattaattaataattaactattacattaattgactaattcttcttaagttacgacacttaattaactattaattccatatatgtacagtccaaaagagcaattaatgtaattaaagttagatactaattgatcccatgggaggatcttgtatatgaaaaaagatgtaaaataaatagtacaaaacatcaaatgattacggaattgatttataatataataataatgataataataaaaataataatgggattgaatagaaaaatgagaaccaccctcttttgaaaaggaataaaaagaaaaaggtgttgtgccttgaacgtcaaacgattctctactaacattcaaagaaacccatcaaagctctctccacaatatgagacaacaaaagcgacgtgcagatatctagaagcccaatttatataaatatatataaattaatttcttttaattagtgctcatattgctggaaactatataataatataattcttttttataatattaataaagatattatatattatatatgccgacaaaatagttctctctttgccggattatctaatcttcttcttcattcattttgtttattagtttacgcattttccctatttacttataacaaattataatcattattagagaaggaaggaacaaattataatcattagagaaggaaggaagtatggacaaaaaactattactattatcattaaaaagaaagaaaaaaaaagtgtaaattttatgaagtttatatatataaattagaagataagacttgggttttattactattaaagataacttctatttaaatatatcatatgtgtattaattattccctactattttattccttaaatgttattatggttattatttttacttgttacgatttagttgattttttcataactcttatcatttgctcgttgactgatgtctcatattttagtccattttggatttttagttggaagtttgaggcttttgctcactcttttgtttggtttgtttgttgttttatggtcgtggaatgatttttctccacgtgaaggttgcacattaagttctccactagaccactgcatctccagattgcaaaaataatataagtataaaagttatatcttccgtaggggcagtggttgtgttctctaggctattttttgtaacattgatttcttaagtgatggttaaaaagaagatgaccatttttgaatcgaagaaagacagaaagagaaaatgaattttgttattacttgagagaaagtacaatacaattttatgtatacagtaatggaaataatagaaaactaactaacagaagagtaagttacaactaatcaacaactcgattaactaacccctaaccacttaaaccatctatacccttgacagctctttcaaactcaatgtagtttgagaaacaacattgagtttggtcctaagtagaggaaacttagagttagatataagtttggttagacaattagctatctgagcattggcgggaatatgattggcacgaatttactgttgaataaccttgtcatgaacaaagtacagatcaatcttaatgtgtttggttcgtgcatcaagaacaaggttagcagcaagtagaactgtactttggttgtcacaccaaagagaaggaatttgtggttgggatatatgcaaccctgtcagcagagattgaatccatgacacttttgagacagtagtagctaggtttctgaactcagcctcattagaggatctagatattactcagggctatcttaaactcatctcaactgagacaaaagtgcgttggccgagcatagtttggagttagctaaactacccaaagcatagctttattatgtggatggccatgcttaaccgactcaaaacaaaggataggatagccaaataccaacctgaaattgataacacttgtctgttttgcagcaatgaagatttttttaactgctcctttgggcaggtttgtttaaatcaggttaagatgtggttgaattggaacatgagcaaaagaccactgccaggatgtgattagatggctcggtaaggccaaaataagcaagtggtgcactggaagctttggtgtatgcattgtggtgctctcgaaactcaattttttgggaggaaaaaattgtaaatagtgatataatcatagcacaagtccagaatgtttcaaagagtcgaatttcttgtatttggccaaaaaaagtgtccaatagagatagaatatggtttgaaaccttgtaaatattagagattatttagatcctctagatggagggcgcgatagtgttgtacaaattttcttagagtaatgaaattcacctgattcatcaaaaaaaaagcttcaaaggtgaattctggaactagcttcaaaaacagaccatgatctaaggttcttgcaatgtatcgaaaaattttatttacagctgtccaatgttgttgtagaagagtatgcatatattggcaaactttgtttaaacagaaggcaagctcaggtcgagtgattgtaacatattgaagtcccctaactatagatctatacaaggttggatcttccataagctcactgccatagttggacagcttaaggccactgttcattgaggtactttgagtgttaacattctgcatttcagctttgcagaaaagatcttggagatacttggttttagtaagcagcaagccttctaatgtgttaacagtttgaatccca

SEQ ID NO: 18045 - DNA, 4963 bp, Cannabis sativa
attcaatccttggttaaccataaaagattgataaaaatttatagtcgagtatcataatctctaaaaattaactcgtaaacaggcaacacaggggacaactttttagagattgcaatgctggttaacagtataaaaatggatgtaaagtgaaaattatattgcatctaagaaatagtaagataccagctaagatttgcacaaacctgccatatgtgtatttggccgagaaacccagtcagtccgcattctgcttgactgtacatggatttgagccaagggagaattcctcggccttgacaccttctctgcacctgaagttcttgcaacttaaaaccccaatctgatacaagcaaaactgcttcttctatgaatggttttacgtttctctgacggattgattcctccatatttctatcccatagttcttcaaacattggttcttcaattagaatttcgtcctgcaaatgtcatggttaagatatgttaaacatcagcttaattttataatataatatgcaattaactgaattcaccaaaggggcatcaactatcatactttacaaaattaccaaagaaccatgtgaagtccagcagttgctagctattcttgataatgtagaaaaaaagcgaacatttctttcttcttactaattaattaaatcacgtaagaacaagtaattatactcaaacaaaagcatcaaaaggtgcacatttcttcttattatgaaccatctaaaatcagcagttactacttttgcagaagcagaagaaagtacatctctttttctctctggcttaataattaaacagccactacaaaaactaacagaagttacagcatacttttaatgttttataaagaaaatataagatgaaaagcaactcaccttctttccaagtgagacagataaccacttatcaatccgctctagctttccagataaaaaggtacgatgatagaaagaggagagaaatccaggtaatctacgagctaagaaatacataaattttcttcttggcatccaattttcccatgttcttttcatctcttctctggtcatgccaggctcatacggattcataatgggggccaacaaggctgcacctgaaaattccatcaagatttctcaataaatcaatttcatgcttaatgtggttttcataacaaaagaatggtcaaaagtgatgttagaagaaaaaaaaaaagaaggaaagaaaaaaaaggggggaggagggacatcattttgcaggtgaaattttcttaagtacataacaccatccaaaacagaaatttaattatcatacatggtctatgcaaaagatgatcatatacctgcaactttgtcgggaatgtatttaagcgcagcccaagcatgcatgcctccacttgagtgggctagcacccaaaacttatctcgaacaccgacagcattggctaggtgcaacatatctaatgctgatgagttaagatttcggctgggatgagggtcactttccccaaaaccaggaaggtcaaacgtgaccaagcgaataccaaactcttcaagtagagacaacttaatcccaggtataccttttgaaaagagaatgaagattaaatgcttaattttcctcaaatctagaaatttagaaactcttcaagtgaattgcagtatcataagtgccaatttatgaaaatttagaattatgtgaagaattttacctgcaagtcgtgatgaaaggaaagaatgtggggtaattatagaaaatctagctatgtcagctgggacaccttgttcttgataagccatctgtctcccgtccggaagttgtatacgagtagcatttggaggatgtattctcactttcttcattggggccatgcttccgtgttggttatttacattaatagctgcacatatttaagttgtaggtaaaacaaaccacccaaaaatagcaaaagaaaaaccaagttcagtcagtacgaattctccacaggcaaagtttcaaggtacccagataaagctttgcacattctagaacagactaccttttttttttttgaaggaatagaacagactacctaaacgttaggatttagggaaatagataaaaagggaaaagaccgtacagacagactaatcaatcaatatactctatcaagaaatctttcaaatcctcagcttatattcaactctcctgaatgcttcaaatattcccttttctcttttattagtcttgtgtggaaattaataccagttaattcttagaaaattttaataccgttccctgcaagcttaggtcatacctaacttctttaacatttatataatttatttattttattactgtgccttcatcgaagaataataagaaacaaagaaaaagaacaacaacccagataaagaaacacaaggcggaaatgcatgacatcccttctatttttcacgttattcattgggagtaagtaaaaacaattgtcttttattctacaaaactacattagtgttgtcctgtatcattcatgatcatcaaagtttcgaatcaaataacttaattcaaatacaaagaaactcaatcacctagagaataaaaatcttcataaaccccagaagacccacgagtagtttacctgctagtgcgaggaaaaagacaaagaagatgacggaccaagcgtgagccggatcgcgatcctcgggcaaaaagtcattgaagtaactcaatttgtccgaagctcttgcgatcggcttctcaagctttcgcacaatgtacgaatcctcagtcaggaagctctgctgaacaatgtccttgcatcctctccccaaatccaagagaatctcgccccaagcgatggcgaaacctttcacctgttccttcaggctctcgtctggagcctcctccgatttgtcgtttcgaggctcgtcggaggaggaggagacgaactcggtcggtatcgtttctgtatcaaacgacggtgttgagagaagtataggatcagcggcgtaccgtactccggtgtcctcgataagactagcgaactcgtctcgccacgtgttggatcctcttatctccgccatgtttgttccccactgaaaagagcatacagttaacgaagatggaccctgtgagatcgattaggtaatagtactgctacctacagagctatgtatatatctatctaagagagagacaaatgtcttggttttagtaaagaaaattcagaagataattatgtcaataaaaagcaaaaattagaacagagctgaaactgcaactttccaagcgtgacattcaagctacttttgtttattccattccattcaaaggaataattataaaaaagaagaaaaaaaggaaaaagtagcagttgaatgctatcaattaactttccaacactgaaaaccgtttggctactctgaaaatttcatattcaccatcaccaaccttttctcggcaaaatagactggttaactaattctgtccgccattacttattttagaaggagctttttttttcctttaatgtttcagggtttttgattaagacaagaagatgaacttgagtcgttgatgatgatgtcacttatagaatgtgtgacagggatcaatattgcacggtgatgatccttccacgtcaccaatagccacgccgtacggttaacggctgacaaccggtttggccggtgcgtgtcttgtggtccagagcgtgcggtgtgtgcagtgtgtacttgatattgccggtttgaggtgaaagagcagatacgagtattgtgcggtggcaccatgtggcttcagaatgttctcttcttttacttttctttttctcgttctttttccataacactatatattattcagctactatatttataagaccctcaagcaaatgcttatttatgctaaacatcacttaataagtagtaattagtactaataaatttcttcaaagataaaatagttaagacttggataagagagaaagtaacaaccgaactacagaagccatattgatttgaattttggatataacatccaatgagcttttaacattttcttataagttaaatccttttaaatttctaaaataaatttgtttcaaaataaaaaaaaaatcctcaaataaataaatgaggctcatcataaatatataaattatataattaggatttaggaggtctccactctccacccctaattctcttactttagaccactgaactgataaaacgagatataagtggggggattgagtttaattataattaagatagatatggttgagattaagatagcgacaaaaatacgaaatgcatgtgaggcaatctcaaatgcagacagataacatgcactgttttccataatcgagtcaagtgagaaaactagatggggaatgatgacgtggagctgagtttatactagctaaacttacacagagtcggttgttttctttatctttttcttttctcactttctttacaacagctttgtggtccccacttgtaaactcagtcacaaatcctctcttcttctctccctcatgtattcaacacggtgtcgttttcacgtggtccccactcgaagtcgatgaatattgattaatgtacaaactacaaaaggttctgcttcggcctctatttcttttttctttttttttttttcagatcacttcctcgtttggtggctcaccatcttcaatattgttgaacaattttcaaaggtctttattcttactcgaccagtttttgatgtcaaaaagataaaaccctcttcttaattggttgcggctcctaaatcctaattgatgttgttaccttagctagtgttgtggacatttttctaataaacggtagagaattgaaccatatataaaaatataagctactccactcattgcattttgagatagaatccaaaaatagctatcatcttgaaggagaatattgtggacattcagggccgatcctaaggtatatgagacctaagg

SEQ ID NO: 18046 - DNA, 9687 bp, Cannabis sativa
aattttttaaattaattaaatatggaaaagacaaaaattgttaaaacaaaatttgtcaagacaagatttatcaggacaaaagacatcaactttgtcctaaatagacatggtagacgcctgtagcattatgctatccctatggagtttgtctttttgggttaattaattatttaattaattcaattaggtaaatatctaatttgaaatgtggttataaatattttaaggttgttgagatattctctccagtagttgagagatttgctcataaatatcgattaaatatttatttatttaaataattaaatatgatttaattaaatagctttaactacgataaatagaagtcaaatttaaaaaatcaagacaacacttttgaacacttaaatttttgaaatttatagagagaaaaaaataatttttctcacaattgttcttgctcatgtgttgagaactcaacaagaaaaaaaggttatgtactttatcctaatagcccacactatttcttgtgtgtggtggaacgatttagaagatacttgtgtgagttcaattaaaatttcctcatcatttggattaagggatacaacatacgagatgttttgaggataccctaaaagacttcaagtggtataccccaaacatattattttcatgtattgatttaatgtacacacatttggagatcctttgggctatggtacaatgataatcagataatacgaaatccttctattgtgtacctaatttagtaccataaaaacaacaatccaaatccaatttagattcctcaaacatgttcgtggtatgtctagtttatgtcacaaggcaaagtttgacccatttgcactaagacggtctcaaaaattaaaatcctagttggggttgtcaacttaggtgttgggtgaaactctaggtgtccaagttaatttttgaggtgttaaatcgtgtatttttagctcccaagacctgaatttggatgcttcatgtcttcaaggtatagaatactaaaaggtagtttgttgaaaataacttggtgggatccaaacacccattccggagtttccaaagtcaacctaggcataaggctagggacccatcacaggttgacttgctatgattcaggactactcaacttcgggatgttttctttcttgtcacattttaaacattgacatccatgtaatcaatgatacttttggtgtaaacattttaaacattgacatccatgtaatcaatgatactcaactttacacttgtgtgaggttgacttaatgacgtgaactaagctcgtttctcttgaaactaccaagtgggcatcactgttggaaatcttggacaataatttctattcttcaagcattcctagtgcgagtatgatttcaaatccccattcccttctgaatagtggaattcaaaattctaagtataaaatgagaagagaaaagatgattatcttttcctttcaaacttaaaatataaaagactccttgaatgatttcccttgactagagatactttttaaatctatcaacattggaatgtcaacaattactacaatatttggttgttgtctcagcattgtctctcttgttgcactgtgtgtttatgtagatatagatgtagactttatcttctcttaggttgtagccttgaagttctttagcattccttgagctgtgttttagcaaaggtggtcttaatcttctcctcagcttcactgtggaggatgccttcgtcaactccttagatttacagcgtaggaggccttcttcatctcttcaaatttacagtgaaggaggccttcaatatctccatggatttatagtagacgagaccttcttcatctccttgaatttatagcagaggaagccttcaacatattctcgagtttacagtagaggatgtcttcttagcaactttcaacaaagtgttgtagtagtcattaaatgttctttagtaaattgaggatgtgaccaactcccaaattgatatacccaagatgggggtgatgtcttcctcatctagagtgcaccttagaatgattgtaggtgtagtctccattttgtcttggtcttaaacttagaggtcttcatcgttacttttgctatattcacaatggaggatgccttctttgtcctcttggttgtctcgacagtggaggaggtcttctacttcccttggaaactagcacaatagaggaggtcttcttggcaaatgtcaattatgtatattgtaacatttgcatgctattctttggtttcaaaggagacgatcgctaccagctactgttaagaacttgacaaacaggtggtagatagtgagatggctaggaggtcattgggcgttgaccttttaaggagacttggtgtcaatcattatgaaggtattcatagtgatgtttgccatgaggaaattttgtctatgagtggttatctaattttaccacagggagcgatgttggctcacttgaaaccatacataagttgcttacatggcaccgaatctcttagggagtgacccactctttccatggtctctcttgtttagaatatttggtgacacttgatcattaatcataacctctatcaccattatgtttgaaatttcatttataatatccgagcttgactgatcttgcccccagcgttaatctctcagtaactagggtgaaaaaataatccaaaaagtatgaaaaaatatatttaggctatttttgactgtaaatgatgatctaacggtaaaaattaaattctgaagttgattttcaattttagagtttacattgtgatggcaggacttacttagggtatgttgtagcttaaatttgtaactcccttggggtgaaatttggagtcgatagcttcagattcatgattaaagtctgagacatgacttgatagagcattaaaatagcttcaaaatgcaagttgaattgtgtcaatcaaatctatattgagtgagttatgaccattttactgaaggttgttctgggcccaacgctcaagttgacatcccagtgcccaagttgacgttcagcgcccaagttgacatgtaatatcaacctggacgttgggcaagttggaaaacgcaccaggtatgtattttttgatgcctaagtggtatttatacatcacttagcatgtttatgtcttctagtgaagctagttactagttctctgagatattgctattttgcaaaaatgggagactcaaaactcccaattttagagcaagtcattttgccagaaaagtgaaaatatgaagttgtgaatttgacttttctaactttaaggctctcaattattatgaaaaactaggcgaatggtcgagatggaattcagaattaaataagtagcaagccatttgtcaacctgggcattgggtactctttttggagcttttgggatgtcgttttgacacttccaaggttcttgagcttgaggacaaggtctcctaccctatttttgaccatttaggagggaatggtcagagaaaaattaacatttgatgattgaaaccaacacactaggttgactgtcaacctgggcactgggcccaacactagattaacctaggcgctgggctcagtttttaggcccttaggattgcagtttcctcctcgagtttgcttgcatcttcgttatttctgatggcagaaaaaatgctcagaacactttttgaaaaaacttgttgaaaatggcctaagttgacaatatgtcaacctaggcgctgagtctagtttcaggtcacctggaagttctgcttggtccccagaaatagttgaattttaatctttaatgaaaacagagaatgtctagaagaattttctgaaaaactcatcaaaattagcccaaggtgacaaaatgtcaatttcggcgttgggcaagcaccaggtgtcaacctgtgcgctggtcccttgttttggaacctaggttgggctgcttccccatttttgatgaagataaagaagacgcacgagtcagatttttgatatgatgcttgaaagtggccaaggttgacacattgtcaacttgggggctcggtgcctaggcaccgggtgctcaaaaatgaaagttcttcaaatttgattctaatgcctcaaacatgttcatggtatgtccagttaatgtcccaatgcaaagtttgacccatttccactagcacggtcctaaaaaactgaaatcctagttggggttgtcaacttgggagttgggtaaaacccttggtgcccaaggtgattttcgatgtgctaattcttgtattttcagctcccggagcctggacttggatgcttcatgtattcaaggtatataatgctgaaagataatgagttggaaacaacttggcagaatccaaacgcccatactagagttctcgaagtcaacctaggtgcaaggctaagggcccctctgaggttgacttgttatgattcaggagtactcaactctgggatgttttctttcttgtcacatgtcaaatattgatgtccacgtcattaggctacttttggtgtaagcattagtaattagataaatcctatatttggtgtgatttcagtaattgaaaaaatatatctttttgcactatatcaaaaatatgttaatatacaaaatattttagttaaacttaattttttttaatttatttttaccaaaaaattctattttttaattatttttttaattgatagaacaattttagtccatataatataaaaatgaattttttttttctagattaaaaaattaagcatatataaatttagaaatgtatgataataatgttcttcattctataagctaaatctaccaagactggtcaacgctacacatttttgacttttctctttgttcatccaataagatcaagacaaatactattattcaataaaattattgaattagtttaatatataattctatgttctttagaacaagacaaacaacattcaacctattaatattatatataattttttgttttagcatttctttttttttttttaaaaaaaaaaaaagaatatggtattggtgtatatatatttttgccgaataatatattatataccatattcaagcatctaatctacacgaaattggaaataattgaataaatacaaatttatatcccattaggatggttccatagagtttcttactaaattttattaaaaaaatttacagttaaacccttttatacgtgatgctaactccctcaaaaataaaattaaaaaaaaaaatagtgatgttaacatagtattatatgtaatatattttttagaagatatatggtatatattaaaattaaaaggaaaagaaaagaaaagttttcaagtaaaaacaagagcaaacaaagggtaaagccaagtcaacggtctaaaaaggccactcaaatggtaaagactccatttttcttcttcttcttttcgttactttttggtagcttcttccttctaatcccaaaaatatagagaaaaagggtactcaaaaagtgtcatcaaagatctctctgcaatcaaaatctcaaacctcaaatcatttctctgttacctcacactagctgaagattaaggatctgagttttggatttggagtgttaaataacaaagtgttgtcatttctagtatattgggttttatcaatcttgttttgtccttttttttttttcctttccttgggagagaagaagaagaagaagaaaacaaagacccttgttttctttttcatagatttacttgggttcttgttcagctctctactttatctgaattttgctggtttttgggtgtctctgggtgtacatcatacagtttctcttgaggtttggaaagaattgttgtctaatttagatgggggcttgttggagcaaccgaattaaggctgaaagcccttttcatacaggtaaccaccggtcttctttttgaatttcatcaaaatttatggtttcgttattatcttatacttactgattgagatggtttgttgttgtttagctttaagtctttagaagaacacgatttttgcctgtgttgttaggatcgatacatgcatattttatttgttttagccttaaatgaaatttagacaacgacttctgctatttcctaatctgaaccattaattgttcctttttctatagaaaattatgccttgaaatgaaaaattgaggagttatgctacatgtcatggtaaattggttttatcttgtgcttgttttaacaactcaagctaatacattacatattcacaaggtttagctttgtagataagagtgaaatgtgtatgggttcatgattgtctatatctggatacaggatttggtaccatcctggttactagttactttggttttgttgaatttttgtatgcatatatatctttaccctacatgtgaatagtgagtgtttgtttgatgtgtcacatttggggttttgttgaagggtttaattccaagagcacgagctccagtggcaaatcctcatcattttcttcatcaatgacacctagaagtgaagatgatatcttaaggtccccaaatgtaaagagttttacctttaatgaactcaaaactgccactagaaatttccgaccggatagcgtgttgggcgagggtggttttggttctgtattcaaaggttgggtggacgagcacacgcttactgccaccaagcctgggaccggaatagtaattgctgtgaagagactcaaccaagaagggtttcaaggtcacagggagtggctggtcagtatatttcttatcttttcgatgttattatgattttggcttagtaacgttactgcttgtctgtctccataacaaacttctatgaagagaaaagttttataataaacattacactattgaacatacaggcagagatcaattatctggggcagctacatcatcttaatcttgtgaagttgattggttactgctttgaggacgatcatcgactcttggtgtatgagttcatgcctaagggaagcatggagaaccatcttttcaggagtgagtttgtccactcctcttgtgatttcattttgaattatttacttgtctcttaaaaaaatagaatgtgttaccattccatttgtcatcttcctactgattgcattcgctcttacattgttccaacagagggttctcacattcaacctctttcatggaagctgcggatgaaaattgcccttggtgctgcaagagggcttgcctttctccatggcgctgaaacaaaagtcatttatcgggactttaagacttctaatattttgttggattcagtatgtgtcttttctttttttcctcaacatatggttcatttcattgtaatggcttttttcaagtttaacgatttcactcgcctttccactgccttatctgttttagaactacaatgccaagctgtctgattttgggttggcccgcgatgggccaaccggtgacaagagtcatgtatctactagggtcatgggaacttatggctacgctgcaccagaatatttagccacaggtattttattttatttgttttatttcttttatgcattcttgacatgtaaggaccacttttgattttcattgtcaaatcttgaaccccaaacttatatttaagctttcgatgtgttagttgtggacaagcttgtttgtcgaaaaatctttgctttccaagtgtgttttggtttcacaataataaaacttggtgatttaaatttaagatttgactttcatggtcaaatcttgaaccccaaacttatatttaagattttactttccaagtgtgtgtgggtttaacagtaataaaacttggtgatcgatctttatagtagaagtgttttcatcatgtttaatcttctcatacacttgcatcttttgttggataggtcatctcactgcaaagagtgacgtatatagttttggagttgttcttttagaaataatttccggacgacgtgccatagacaagaaccgaccaacaggacaacacaaccttgttgagtgggcaaaaccgtacctgaccaacaaacgaagagttcttcatgtcatggatgctcgtctagaaggccagtacacccttagcttggcccaaaaggcagctaaccttgctcttcaatgcctcgcaatagaacccaagtatcgaccaaacatggatgaggtggtaacaatattggagcagctccaggattcaaaagacaatcctaaaggcactccaaaagagcagcgcgtaaacagtgatgctcataaatccagccgaagcagcttgatagatggttctaaactcaatacttcttatcccaggccttctgcttctgtgctttacagttaggagaattttgttgtgtagctatcatatgacttcttattagagttcaaaacatgttcatagagaaggttgtttacgaaatgtatagtttttgtttaaatggatgtatgtatatgtaagtctgccatataaaaatgtttatctgaattgatcatgcaaagtcctgatcatggttttaagtatttgtttaactacgtttgcaatcaggtttgtatgaggttgtcaccatgttttgagtacttgaaattcagtttctagtttggttaattgtctaaccaaaactagaattgtttcatctttttttctttcaacaaattaagagttgtgcaagtctctcttacgctatcttttggtatgaaacgggtcacattggagttgtctcttggctgtaaaaacatgaagtcttgtgagcaacaacacttaataaataataatagaaaatcaaatagttagacgtgtaacaaaatatatgatttttattttttaaaattttacatttgactgaattttttttataaaatatcaaaagagataaatgtgtagcaaaataacctttctaaaattacccaaaagtattaaattgcaaaatttagtgaaacataaatataaataaaattgactcaattgaaaaagaatatattaattgtccccctactcctcaccttggtccgggtgtggcgttggaccttaactttcatccttaaccgaacacctccatcacctcaccttttcatcacatttattttcttatttcctatcttcttcttcatcatttctcaatagtttcctaagtaaaccaggctttaattgaagagaatagtaactttcaagtctacgagaattatcaagaataaggtaaccaattcttagtattttttttttttttttgagcagtggtcaatatcattgataatcaaaatatcattagtaaccaaagaatatcgtacaagctaaaggtctatgcatcccaaaaaataaaataataaacagttatctagcctaataaattatttacttatctgaaaatcatacacaactaatttatgtgcaaccatattggccgaccgatgtatatggatctgggacaatcctaaaaatctagaaaacatacttgttatgtcctctaacaatgatcttagatcaatgtctcctagcaaaaacacacaattgctaagggatcaaaatcaacagacaacaaatattgaaggaaaatacctatccaatgtcactaaaattgccagacagtatgtttaaattaatggaaatctccatattacactcctaagttaacagttgatgtttgttccgcttcgtccaaatgttccaattgaaaataagatgttccaaactgttggaatttattttac

SEQ ID NO: 18047 - DNA, 5042 bp, Cannabis sativa
aaaataatctcataacaattataatataattatacaactataattaaattataaaacgacaaaaaaaaaaacggtttattatttttatactagagatgtataaagagtaaaaacaaaaaaaaaaattgtgttgacataattttataatttttacaaaaaaaaaaaagaaaaaaaaaattgccaattttaggaattagagcaaaaaaaatttcttacacttaatcaaaaaaacattttcttttcccagctaagagtaccaataactgaaatgtatgtaccaaggattagatttttttgaaagagaaaaagaaagaaatggagctactggttctatgctgccagtttcataattaatgaaagtgcaattcattacacgattaatgctattcaatctcactatagaaagtgcaattctgacaacattcctgtgttttatgaattttcttggtttctttgtttttttttttgaaaaaaatgtgtagtttctgtgtaatattatgatattgatatttgtattgtatccgttggtggtgagtggatggtggtggtgacactcttgttgatgttagcggccggtggtgcaaaaacaagaagattccaaataattaatcccatcattaattattattattaggtttgttttctaattttggtgtgtcactagaaatagacctgtaactttcttttctttgttgttgggtaacgttttttggaactttcattttcattcctactggccattatagtgtactcaaaataaaacaaaaccctcatatttgggtgggaccctagtatatcatcagcccccgctccggttgttgccaaattttgctgccccaataaatctttgccacgtggccctattaagttcaaggaactcaataactcattatagctcattacgccacgtgtataatatgagccaccaaaatcttccttttcttttattagttttttactcctaatatgttttacccattgaacttgtaattaatgcatgattaccaacacaactaactgtagctactttgagttgggatttattattggaaataaaacatgggaaaatggaaagtaaactccttttcatatgtgatgtgagtttgttttgagttaaaaaacccacccaataggcttggcacatatgtgatttgaaactggacaggtggacggtcagatgggctccacgtatgcaatcaaggtgtaagggatgtatatgggggccactgaaaaagcatacagatcaaagggtcatagttgcatatggatgagtggactttttggtcacactaaagggctgatcatggatttaaattttataaaatatgcaaagaggtacaccattaatttccacagtcggtgccttggtggggagaacatgttttttgctgaaatacctcaaacattcaataagaagatatttgactcaaactgagctatttatataacccatattattgatacctttttcttttttccacctaaaattcaaagccaaatcacacacaacttggaactactataatccagctcaaataatgttttttcctttttctttaatgaaaagctcaaataatgataatgtaattcctctgaaaaaaaaatggctatgtaatcaatataatattgattattgagctttgtaagttgcagaaggaaccaatgtgaactcccggcaacaattttaaaaataaataatgtagcaaatgactatatattggataaatttgatttgataatatattttataattttaaataatagaacaaaatgaaagaaaaattagtacttgattgtaagtaaatgtgttcatcatttgataaatgttaagatagcaatgacaacatgcatcaatatatattatcacaccacacacacttcacatatgattcccaatgagattaatcattagggttgtaaatatttgacttcattttatattttgtcaatagataagggatgtattgaatagatattagatagtgaacttctttcttcattttttttccttattttcggtgaaggttggtagagtaagggcctactagatctaggaatgtgttatttatgttagctggagtgtgaacaaaatacccactgaatttgtttataggagacaactgaatccgaatttgtcctctgtctaagcaaaagggcaaaactatgcatgactctttctctctttctttctttctattctctttgagttgctaccaagaaaagaaatcataatttcattttctctttgcattgcgttacgctgtgactaaataataatattattttgatgttctagatagaccttgcgagtgacttgtgaggtagggaagggaccttgcttaaattccagatatataaatattatatagatttcctttgatgctttggatgaaagatatttctattttgaaatttgaatgagaatctatgattggaatgtacaaaacaattgtctccaaacgtcaacaaaaaataaataaaataaaataaaaaggcttgactatatcttcctttttattttcatgctttagaccatctttggcgattttccctatcagcaagtaatacttttatgttttatcataattggtttcgttttggtttaatataatcccaattggacacttaaaagttcataagcatcagactcatcaactaaggggacaaacaatcttgtcataaactttgtgtatttcaacgattgttaaagtacagtttaattaatgttttcttttaataattatctttgattaccaaaagattcaaatttgtcttacactttgtgggctttcaaattagagacaaagcacaacttaacaaacttttatttccaaaagattcaagcttaaaaagccgaacgatcaagagaatgtccaattacaacaagcaagactttttcatagcaatgttttcatttgggtactttagctactttgttctcatcacatatttattttgtttaattccttttccaaaggagatgtgggcttttctttgcctgttttagatttcgatccaataaatgttggagtttaaaggcctaactgatgtttctcacattgaaataaaaatatctgctcatacttctaattagtacccagaaagataaatcatgtacttttgaagcagtatcaatgtggtaactactaactagtattggatatggctaaaatatacggtgctacatctaggaatgacaattcatggtcgcggatcgtgtattcgtgtggtattaagacttatatataataagtatatgtccagtctgaacacgacctgtcatctaatgtaaccagtttataagtattttttatttaaacatgtcaaccaataacacatttataacatattcaacacgtttataatttatttatgatctattaaagtactaaactaatttcaaataaatcattaaatagtcagttacgtattagtcgtgtcaactcaaacacgaccggtttactaaacggattaaacgagtcaatctgaacactacccgaacccatttaacacaaatccaaactcgttagttcttgtgcgggtttcaactcgtgtaagtctttgagattttagtcacagcacagcctcgtgtcactaaggcatagtataggaaacaagaaaaggaaacggttagctgagtcaaagtaattacgagttatgttccactttatttttccccggctagtaggcaaaacgatttgtaaattgttataaaaactaaagacacaaattgttgcaaaaataaagttgcaattttttcatgaaatttagaatgacaagtggaaacctttaattcacatccaaaagaaaaaatatatatttaataaaggaaaaaaaacactcatcaatgattcctaatttcctaatattagaaaatgcgacattgtcaggctaggtattagaatagaaaaggcaaacagggcaatcaaattgtgattaaattaggaggagacgagacaattacactagcatcttcttcagttacaaatacaaatatctcaaacatggattttctaccataaacagagaaaccaaacagttataatcttagttgctgctatcactgttattattattgttgttgttgttactatgatgatggttactggcattgccaatcccaccctttctcccatgcttgagctgtgaaatctccaactgggtcttcataaagaattgcatcctctgcaactccaactccttagcaaaattcattctctgcttctccatctccactacctgttgcaacttcgagctttcagcttgctcataagcctctccaaacttcaatatagcttgtgtcaattccttaactgcatttccccaacccttcttctcttttcctcccctaaatgcccctcctccacctccacctccactcctaccaggattcaaattcgcattcaaattcatctccctccccgtcctcactcttttcctctcataaaaatccattgggaaactatccgtcgaagcgggagatgcctcccttgatgagctcgaatccaccggaccccgtttcttgtgttgcatcttctggttcttcaaagattgctgaagatggtgcggtttcgggtcccgtaatccttggaaaggactaactccccgaaccggaattcccaggggaaccttatgagcatgttgggaagagctatttgctaaagaaacggcattatgaccaccaacggcaccggcgatcttcacagtgggaccaatcaaatggtcgagtctgtcgtagaaaggccacttgctaggccctccgccggacgaaagcttagccttttcaagcttatacttctttttcacagtatcaatcctgttcttgcactgaatatccgtctttgcagccttcgtatagtcatccctaccactcacaatatccgccacctctttccaatgtttctgctttagatttcctcggctcagctccaaataccgctcgccccacgcatcaatcagaactgacgtcgctccttcactccagcaatcctccctaccaccaccgccgccgctacctctttcacccacaccattcctagtct

SEQ ID NO: 18048 - DNA, 2555 bp, Cannabis sativa
ataaaaatattattagttacactacatttcaaaggttacactcttgatgaggaaagaaagtaatacattgccaactactcacgaatgatcgatggcaattgtgaggaaaccctccctctttcataacataaaaatatatatatatatttcattaacttatatatttgctaaagggaaaggagaggtaaaaatttatattgataaccttaatattaattgattcatgtgtctctcgacttcggcattaactctccctctctcctttctcgctataggctacgtacgactatgaccttattactttctatagttttagtttctattaattccccaaaaacttctcattattcaaaaaacgccgcacaaatacaaactcgtcatcatcccttttcttcttcttactttattcattcactaaaaacacacagctaactataacattttgaagaactcactttcttccaccaatattattatgtacagtactttcgggttcagaatgctagtggttctgttcatagttttcataatcacctcggcgcacggttctgatctcaaagctgttcttcccgaaacgacgtcgtttccaagaaagcttcaagctcatcaagaagatcaagggaaagtagttatgacgtcacagcaagattctaaacagcaggtccaccaccacaagccctgcgacgctttttctcacgaaaagtctcgttcattatgcaaccactttcacagcaacgacttcacgagccgcggtgcaagacccaccccacctccgacgccgtccggtagattcggaagtagtactatcgatccaagatacggtgttgagaagagactggtcccctccggacccaaccctctccacaactgatggtcatgatcacatctcaccctcatcctaatatattatacatatatatatatatatataaatagaatagtgagaaccagttctcttggggttatttcgcttttcttggtttctttttgtggggtttctctccttttttttttttatttggatccaagatgtgaatatgaagaagatactcaaatcgcttgcattattcatgaagaaaggttttctttcttattgattgaaaatggatcaaagctattactaatttagctaatggtgatcaccccgtcgagcttgaagaggcaagtaattattaattactgtattaacggaaactagtttaagaggtttccttttaattagagttatatatattttgttgtagtctcatagaaaatgtcatcatttccacgcttgtttttgaattcctacttcatgtaaacttcttaggttattaattaaattgttcaaaaggtgtcaatcagtgaagatgagaagaagaagaaaaaatgattcttttttggagcggcgaaaacaagcatggaaatgggattcagccattttttttttttaagaaaaaaaatacttagttaagtaatttgatatattttgcatttccatatattattttccttgtattttattgaagggtgttagggaattcaaaggaaacccatgagtttcataaatttgtagccaagaggagttaatgtaagggtgccattgccaaacaacattcaatatgaggttatttaaattaattagagatctttttcttttataatttttggtgggggacaaagtagacttttccaataagttctcgtgtgtgttcagttgttgatctgcattaaatatagtcatgtataacattatgtaatagtactagaactattagtggtcatgatgctttaaattacaagttatttaaattaatttgcttaagtatataatatatattaatttgtatatagtcttgtttttgtctggttaaatttttctctggtacgttgtgtagtcaattcctttatccgtttcctttacctcttttactcatctttcatgtatgttgaacatcatttatggaagaagaagcattgcagcttctaaaaatagtatattgaaaaggaaaattgatcagagcatatattatgtaatacatatatttaaacccagcttcacacgtataagtgagaaaattaataaatgtagcaacacacattttaagtaatgactaataatatttgattatgtagattttttttaagaaagagaatttatatataaatttaaataatactgtgatttaaaagctagcttgggacaacttttgtcaaaaaatcaaaacgaaataagcaagggacaattaaaaagaaaaaaaaaccaaagacttactgtgatttaagtaatttgtttaattaggaccatttaataattagcattaatgatgtgttaattgtgcaaatgaaattataatacacgcaaatgaaactggttggatggataatgaaatgatagaaaccactcagaccagcttggtgattaatgaaatcaaattgttattttaattttgaaagggagcacacttcattcaacaaaagacaaacattacaaaggaataggcagatcagccataactgttgaacttgcaacaagatgcatataaaatttaggaataattatataatgcaccatt

SEQ ID NO: 18049 - DNA, 6885 bp, Cannabis sativa
cgtgggagaaatatgcatccctaattacacctttaattttttattatataaaaaaacacaacatcaatgctattgtgtggtatcaatacaaattttaagaataatattttttttatttctaataggataatatctttatattttgccacctaagctttctacctcatcaaacattctctcattctctaaaatattatcaatagaagctaaatcaatgaaataaaaaaaaatataatcaaatatttatagtaataattaatgcattaatttagacatcaaaaataatattttataacaattgattgattattttactttcaattcttataccacctagacatgacattgctatcctaagaaatttcttagcttctttcactaaatttttttttaaaattttttcttatgagaccttttactatgtgtttttatattcttattttttttttttgaaggaatcttttattcattttatctttttctatctttaatcttttattactttactctgttgttgatctgtgctttcgtatttctttttaaggcacaaaatagaaaggtgaaagtggaaagacactgttcggttggacctcgaatcgaactctacagtgatcaatctcctttgcccaacttcatacatttccctctgtatatgtattatcataatactccatagatgggaagcgttgcagtggctgaaaaagagcaccgagtgttcgatgtggaagagactatatttgttgcggtgggaaagcgtgttcagcagagcgagagggcgttgttatgggtgctccataacttttcagggatgaagatttgcttgcttcatgttcacacaccttcacgtctgttttcaatgagtgagtttttcaattgtctttaatgaatgcttgcttttcttttttaggtcccatttgcttctgttaattaatgagagaaaatggcttttggacttcttggtctgacttattatgttattttcgtaattgggttttgaatttcgctttacaactatggttcattcgatttgaagatggaggatgatgatggtgataagttgggtttggatacattagtgtttattcaattggttatgtttggttgcaaatattggaggaaaagatggattgggaatcactagtctgatgtcaattgtctattatgttggataaagatctgtattttgtttggttgatcaatttgaaaagtgggagtattaggaaagtgtctcatatgtttttgtttttcttttcttttttcttaaaacaatggtaagcagccatattttgattgaggctttttagagtgctcttgaaacaaattacgaaaaatttgctcactcctgcttgtatttcaatgaatatggtatgaacacattgacgtttatgattaaaaaagatcaaaatgattgtaaaatgacagggttgcttaatcaaaaatatatttattgctttatgggaatttctgttttttatgattagtttatgttgtgtacattttattctatatgttgcacaattatcagaaccacaagctgttgtagcttttttttaccactatccattttattagaattgcaacataggcatacatatatgtagaccattttcatttgtttatcgtaaatacaagatttgtctatgatttgcagcagaaggaagtactcctgccaacaaactgaagcagtatatggttaaagcatatcagcatcttgaaaagaaaaatttaagagaacttctagataactacctactaatgctttcgcgaagaggggtatgtatcacttttctaacccttcatatatttgatactgtgagctgtcgtgctaacaattgattgtgatcttttagttttgaatgtaaattttcttccttcagttgagtcaattttggattgtgaatgaactagtataaggttattatgaatgttgcagagaattatattatgatatgattgatgtatgatagacttttgttctccaggcgcaggcatatgaagtatggattgaggcggataatgttgagaaagggattgtagaaatcattgctcagcatgatattagatggcttatcatgggagctgctgccgatgaatattataatgagtatgaatacacgtgtaattcactggcacatttatgcaagaatatctctgactggcttctttgatttaagtttacttgttttgagttaattgcttctgtgaacttgattttcctaaaattctgctttttttttccttaaaaccaatattctggttttgatttagctctttttccaagttctttgatgagggaaatctaaaggaataaacacatgctttcattataactgactgattctttctgaatttgaaggacactggcagacctaaagtccaagaaagcattttttgtaagccagcaagcatcaaggtcttgtcatatatggtttatttgcaagggtcacctcatatataccaggtaattcttggaatgaattaaccgatctctgttataatggtttccctgataactacagatttgaatcttgataacaagatggtcattactgaaatgtaatgttttagaattgataaatcaagattttttttaaaatactgcacttgaagatgcttacaccccccttgaagaacggttttagctatcatttgttaagaaaaggtgattggaagacattcgatcgtattatcagtggtcaagaatgtaaacagtcacggtagttaataccgttattttgtgtctgttaaagttgttagcctctttttctgtttggttctgtattgttgtaacaactttgagtgcctatataataaagactttgtcatgttgagagggtgtggttttactacatcattactctcttttctcacaaaatctctgttctgttcttggtgctctgcaccagtaaagaactcttctggtttgttctaagttcttggtgctttgcaccagcaaagttttcatcactttacaaagaacatgactaacctcatcttttcttgttcacatagaatatctgcaagttaaactttttaactaaaaaattttatttcttggaaaattggaaaaaatgaaattttcaattcttttggctgttatgatctcttctgggttcattcacagcaaaggttgcatctccatggccattcagtatctagaaaacatcaactctagactctattgtctgcctgtctggcatgaaaatcctgaagtttcttttaacatctgatttattacttatgtgtctgtatcgtgtcataatttacttgtgtgtgtgcatgtttgtactataattcttctagttactgtttctagagttaaatttcttgttattactgacatcaagagaacttaaaacaggagccacagtcaagaaacatctgaaagagaagctgtttttccattgcctctaatgcattcgccttctgaaatcagtcaatcccaggaaataaaatcggagtaccctcataagctgagcaatctaggtaggcgcactctactaattactcagcctgattgttttatctttagtgagaatgtatctgagcttggataagtaactttgttacagtggtgtgcagatttttgggatgataccaatgagttggatgaaatatcaaataagttgtttaagcattgttcagtagattcaagtttgtcctccgacaaagagtttgataattcaaagttaaacccgttgttggcagatgaggttagagatgtttaccttgacctatcaattctcccatttactgttacagaactaaacttgtatgttgcaaacttactgcatcatgatagtcattctcttcgtaaactcttgttaaaaaaaaaagtgaaaataaggattctggaaattgtaatttgtcacttgtgggttttatgtgaaattgatctgatattgacaagagaatgaaaaaatttctcatctcgaagaaatcatgaaagcaatttgtttgtttagtaatgttattaactttgcttttccttttaatcaagttattggagcacaccttcaggagagtgtaaactctttgattcttctatgaattttgcaggagctgaatgtggaagaacaagaaggtaaagaaagctgttttagtcacgaacaagccattacgggtactgaagaacagaagtggaatgattttgaagaagctgtaaagcgatggaaagatgacgaagatatcgtggaggctaaatgcaaggcaaaccttctccttagtcactctttcttttctttctttgaattggtgtctttcttgtgacatgtcatatttctaacttatgtttgagattagagcaaaaagcattattcctagaaaaaatgaagagatgtgttctgcatcccaatccatatcaccttgcataaagtaatcattttacatgttcacctgaacacatagcatgtaatttttagtgttcattagttgccgggcttctttccaatcatacaaatttgcagatccttagttcaaggtcattttatataatctatattacaggtattttcttgttgttcctgttattaaggttaggtataactttctagaatcactctatcctcacatcacacaaagcattcatcttccatggctttgtttagctgcctcgtaaatggatttcatctcccttaatacgttggttatttactgtcttataggcgaaggcatttcaaaagttatatataaaggagattagccaaataaaagagagtgaagaaacactagcaagagtaaaactagaactggaaaggatgaaagatgagcgtgataagttcatcaaagaacttcagatggttcagaaggagaatctagtgctagagagtgaattagcaaagtcagaagatgatattaaggaattggaagagaagattctttcagctgttgaacttttgataagttttagagacaagcgggatagattacgagtagaacatgggagtgctgtaagagaagtcgcatggctaagaagattgatgagaggggaaacttcaagcttttgcaagccacaactcccaattttctcttttcttgagattaatgaggcaactaataattttgatccgtcctggaaaatttctgaaggaagttatggaactgtctacaaagggattcttcgccaaatgcatgttgccataaagatgttgccctcctatggctctaagagtcagtcagatttccaacacgaggtgagtttactttaatgactgcagtactggtattttcatcgaaacaccggttaaataagagaaacatgcattatgcatttacataaactagaaatctaattctattgatagcatgttcaaataaagtcaactgagaatatacgctaatttatacttttccttgtcaattgaatctcattaggtggagattataagcagggtacgacatccaaacgtggaaacgttaattggaatgtgtccagaatctaggtccatagtgtatgagtacttcaaaaatggcagccttgaagactgcctcagccggaaagacaaaaccattccctggcaaatccgtacgtgcattgctactgaattgtgttcagcccttatctttcttcactcaaataaacctagcattatacatggaaatgtgaaacctagtaacattcttctagatgccaactacgtcagcaaactagggaacttaggtgttggctttcttattcaaaaaaatgaagatctgaccaactcaaccaaagtatctaatgaactagataatgactctgtatacatggatccagagtaccttgagactggagagcttagatcagaatcagatgtctactcttttggtgtacttcttctacgactgttaactgctcggccacctgatgggcttgtgaagaatgttcaatgtgctgtggacaataataacatcagtgcagtgttggacatttcagctggtgattggccacttgagcaagccaaacagttggctcagttggcattgaggtgttgccagaagaactggctggatcgaccagatctcgtgtcagtaggttggggtgttcttgagccaatgagaacttcatgccatgtttcaggttcatccttagtttctaaaaaacgtcaacggattccctcccatttcacgtgtcccattcttcaggtaatacaactacattatgtcataatagtttatcacttggacactaacccgaggcgccccagttatgggtgtttttgacatgaattggtggttgaatttacaggaaatcatggaagatccacaaatagcagcagatggttttacatatgaagcagaggcaataagaggatggcttcatactggtcatgacacttctcccatgacaaacctcaaacttgacaacttgaatttggttcccaactacgcacttcagaatgcaattcaagaatggcagctacaacaatgatatttcttttttctttttttatattattggaaataaactatgaattttggcatcaattcgaccacccattttaactaactgtcacactatgtaaatttgtaatttatgtccatattaaagttacttattcaccactgaaacggaaacattaatctaaatggaaattctttttatgtggataatctcaactatcatttatatttattctatataaagtgtgcctatataagtttatgagaaattcatgggtaattttttatttatatataataaaaaataaaaataaaagaaattccattaatatcacaaacatattagctatgaataacttttccctaaccacgtgaactgataagagcaataattagatttgaactgatatttaattatataaagggatttttctgggtaatgtcaaaactcttgtgtctgatctatctttactttatgcattgttttttctataaaacttcacatat

SEQ ID NO: 18050 - DNA, 4772 bp, Cannabis sativa
  modified_base (2899)..(2907): a, c, t, g, unknown or other
atataaaacatgtctttggtaggtatatgagttttgtccctatgatagtgacatttttatagccatcgattaaaaagttaagggtggtaaatgaaggagtgcatagcaataatcaatattttgagtgtatgagattatttgtacattcctttaattttttaataatatttttgaacaagtggtgcgaactgagaaatacttggagcgatcaaagaacagactgatgcaagacccaatttttttttttttgaccatctggaaagcagaggaaaaaaatgatgattgttcatctggaaagaagcccaagtttaatgggtttccgttttcctcgtgggaatttgccgctgcaatcgatgtcttcttggtcttctccgctggtcttttctgcatatacttgaccatgccccccactgaatatggaaaactgaagctgggaaggaccatctcggatcttcagatgcttaagtgggttttctccttcttttttctctatttttctttgttctccatcttttatcatgctatcttcttcttttctataatgcaagagtcatcggtttttgtgaatgttcttccaaaaaggtacgatttaatagagaaatatttcaaagtgtaagaatccattacggtttaatagaagttgcctctaagttatgccatgatgacgtaaatgcatttacctcgaaggacaggacttcggaggtaaggaaatcaattttttttaatactggacatgcttaacaagcatcaatggagatgatggaaatttttttaattattatttttctaaaaactcaagttctcaaggagattgaagggcttaattacaagagttagaaaagatgatgcaagagggtggaagacctttttgacataaaagggatcaattttatactcttccagattcaaattgggaagcaacaaactcttatacatatgttttgttttttattgtcttttattagttttgttagatatcttatttctaaatatgaaattttagtgtgttactttacattgaaaacaattttgtttggaatatatgtattgtacattatggcattgcaagaaatatataagatcaaaatgcaattacattactagacaaataataggctttataaaatttagcaatttcacttcaaaagtgttataaaatttagcaacagttctgtgactttgtttatgatcctctctttgatattccagaatttcgatagtaaactagttgtcaattatgcttgttctatggcgtggggttaacacatccggtgatggatgagttcatttcatttcataggtattagactattgatctgcaataaagtaagatcttttttttttatctatttcgtgcctgactttttatgtgtgatgattttactttcagatatgctgctggcatgatgggcgaagaagacttccattaattttagagtaggatttagaaatgaatatacaagactgaacaaagcaagcactaattctttcatcttctttttgtaaattttactgaaatcattcaacttacaaatgttggttgtgaattgtattgataattttttttccatttgaatacaacaatggataatgataccataacaaatagacaagtttttttttcttttattgcaggcaaaaactgcaaacaatgtactatcacttgattttttttgctattatagaaattctagacttgaaaaagaaaagtaaaaaacaaaactaagaaacacaagtattcatagttgtcttttacagtttatctttaacaaccaacaaaagggaaaaagaaaagcaaacagcatctacaaagccttcgatttattgatcacattgcactcccaactcccaactcccaaacccatttgacaatgaaagagactaaaagaggaaacaaaaaaaaaaaaaagttgaaaatgcataactcagcagcagcagcacttctaatcttgatttttctaccaaatatccagctgaaagtaacttattgatgctttcttggtccttctctgagctctctcctccaactttcttatcctctggggcaatttacacacataaccttctgctttgtggccctcacttgaaagaccactcaacttctcaatcttctatcttccaactagaaactccaggacatcaatataatcctttccttgatagtgtaaacttcaagcttttgagtaatcatgtgttacgtatactgttgaaaaccaggttctctagtaagaggaacacaaagctaagccacagaagcctgcgatcatcgctactatacaaccataaagataacttatagcaaatccaccactaccataagccataccataagaaaagtaaatgttatgtacgcaactctcagaagaactacccacataacaaaactccctatgatcgttttcgataaaatcctaaccaaattttaacaacaaaaactgtatcatcatcacccataacaaaccacctcacatcctttatacccatttcattacaacatttcattccgaagaacgtaaataatttaattcaatcacataattagcaggcatcccagaaaagaaacttactcaaatcatggaataaaaatttgttggcaatgtattaccccaaatcaatttatgaaagtttctaataatttcaagcacccaaatcagatcagacctaaaaaaaagtgtcaaagtaacttatggtacctgggaacgcacagatgattgtgactgtcgttgaactcaacggcaaaaatccaaactcggtcaccgataatgaaggccagccatgatcaggtgtggtagacctcagaaacaacaccccaaatctaagaatgaaggaaagataaaacaaatatgagagagagagagaggtgtatttactatttatatatatatatacagagagagannnnnnnnnagagagagagagagagagctaaatatagatggtacaatgattgagttttgctttacctgcttaagccatggaagagcaataaagatcgcacagtgaggagaggaagaccagcaatagagaaagtgattgtgaaagaacttgtttactagccgaccaattcctccattgccaacaaccacaccatcctcgacctcaataagcttttttttcggcagaaacgagagagatttttactttttccattttggtctcagtattattattattatttttttattaattttgaagaatatttaatctactacatacatctacacgttaaatgatattgacccttaaaagtcatataagtgagtggttaaaaatttatctgtatactataagtacaaaacctatgtcactactgtagaattattctatatatatagtactaaccctcaactagataaggatccttatgaactgaaccttcgagacacctaccacccctcggaacagctatatatgttctcctcttcggcacttcatccgtcatatattgttaattttgaaactatttgatgccgcaatgcatcttctcggccttctcactatgctattatgaatgatataatctatagattaaatatctataataaataaataaataatgtgtaacataccacattaatattttaagttgttaatattttcacatatggtgaagttatttattacaatgtgtaacacctataattatcacttatattaagatattaagtagataaaaaaagtattacataatcttaatttgtaatttgatgaatcaaatcagcatatattaacttaaaaagttgtatttacaaactcacatcacccgaataagcttaaaaattactctcttccaaaacatttacaattagtaatccactctctatttatataagaaaacttctatggcatttgagtaaaaactctacctctaatttcagctttgatttccttaaccatgattgatcaatgttgaacactttggtgccagtaagtgattctggctcgtctaaacataataaacaacagtagcaattactgcagtaaatacattttttcatgccctttcatatattgcttctttagttggaattttatatcctaaataagactcatttcaatataatcttatttactaattaataaaatatcaaaaataacattatattgtttacttcacatattactttcaagattatatgtttaatatataaattatattaaatcttgaacaaattgttattcatgattatagtgttaattgtcaacacaatagaaaatagtcatgattatatgcttcaaactatttagtttcacgatttatcagtgcactaaatttatactggcgtgataatcagtgatgtagcttacttacacttgtataagttgaataccctttccagggtatcagcaaagtaaacttgtatcagatgtattggttatacatcacactagaccgacattgacagtgaaaaagatattataaacttaccactatatcttttctagttcaatgtcacttacttgatcttaggtcaaacgatatcaatcctgagatgattatgttttagcctaattatgctatacaagttctttgatttgttcgttactagtttacctgtaggactagctcatgcttacatcttaggaatttggtattgtaattgagtgggagcgttaattatagatatagatgttataaattattggtgtcacaattgtatatataaaaatgtgtgttgggtcatcaaataaataagtcaaatttatgtggtctattttggaataaagtttatgaattaaggggatgattgtaatgattttaatatgtggat

SEQ ID NO: 18051 - DNA, 6732 bp, Cannabis sativa
  modified_base (30)..(33): a, c, t, g, unknown or other
  modified_base (4557)..(4561): a, c, t, g, unknown or other
  modified_base (4662)..(4664): a, c, t, g, unknown or other
ataatcaatagatgcaattgaaatcgaaannnntaacttttattcattgttaattcccttattaatttacttgcttcttatttttactgtttttttatttaaattttctcttaaattttatatagccaaatagaagtaaaaatttaattttaaagtacttacatactatccttgtgggatcgacctcactctttgtgagtctataacttgttaacaatacatatacttgcgtgttgaaaataccacaacatgtcatgagaatgaggatattgatgatgactcataatagtatttaattttattttatttgtgaaaattaaatttatgttggtattctagatatttatttatttactaacttttagactattataattatattataaatgtataattagaacaattaaatttaatattttattttattaattatttataattaacctttcatgttttttttatttattttaattttaaaataattgataaaaattataaattaaattatattaattaaaaaaaaaatacaaagttttaccgatttattattgcgctcataaaaatcaaatatccatctattaaaagtaactttttccaacacgttaatgagatggtaaaaataaaatttttcctagcgcacatttttgttggcaaaagttaacacatttcccaacacgttaatgttttggtaaaagttaaacttttaccagtacgttaatgtgctggtaaaagttagacttttgccagcgcacatttgcactgacaaaattctaatttttaccagcgtatttatgctctgagaaaaattattttcactagctattttctttttgcactagtaaaagttccaatgccaacacagatttactaatcccttttgcgagcgcaaaaaggcacctgtacaactaaatattgttttaccatcacaatacccaattattgcgagcacaaaaatacgctagcaaaaatctcatttgttgtagtgtgttaatatacatatacagggaaaaaaaagtacatggatcttacaaaaacttggagtacattggtcgataagtcacaagtttatatatcaattaatgagatcatctccaaaattggacatcaagtttctcataaactgatcaacttgatcaagttcatcaccaagttcactaaacgtaacatacttcaactcgtccttggcaccaggagtttcctccgaggatacccctcgtgtgcggaacccgatgtcatggagtagccacagatcattgcgggaaacaggtgactcagcagggccagggatttgcaaagccggtgatgacccattggactcggtcacaacaccgcttgctaccaagtccgtacttttattaagcaacgcaggacaacgtcgtttcacttgagccaactttgaagccatctcattcaatactattactcgaggtgatgtggcaggattcacatactttgcctcttggtctaatattgatccattcccctcctttgtactctccataacagtactacatttattaggtatttcgatgattggaattgaaatactggaactcttactatgttttgcagcatcacaagatggggcacatgatttggataaaactgtcttgagagtatcatgaattgtgcagtttggtaattcattgtgttttaaacaagttgtggccaatttgttaagcacagttaccgaattcaagacctttttatgtcgggcgccttcaacgtcgccatcgccattgccggcccggtatggttgggataagagtaaagcaagggaattattagaggatttgagcttgggagatgcagctagctcattgagtagtaaatgagctgaagtagtagttgaagtatttgagcctattgattttgctggatcagttccatcattttttttcaaatgaatagttgaagtagtagaagaagaattgtaattttgatgatgatatgctgctgattcgatcaagcatttctttaggcgagtattccaatgattcttgatttcgttatctgttcgttttggtagatttttggctatggcggaccacctgatgaaatatgttagccatgttcattagttaatattaatgtaacaaaattagatgattaaaacgttttattatatttcattttctttaaattgaatatatataataataattttctatataaaataggtagaatgatttaatatactatttttttaactttttttattattatttttattgtttgagttgctatgaatatgtactacgacttaagctcttccattaattgttaggtgtattagtatgtaaattatttagtgcctacaggttaaagtaagttatacgtactgtagctagtcaaattttatggaaacaaacaaaaacccactaatataataaaaacaaaaatttacctgttgcctagaacagaatgaagtcgaacaatagtcagttcttcctctgggctgaatgcacctctcttaatatcaggtcttaagtaattagcccatctcaatctgcagctctttccacatctcgaaaggccttaatttataacaaattaccatcttgatcaacatacgcatacatataataaatagaacataaatatttatatacatattatgatgaatgaagtaattaaaagaaatgataactaccagctttttggggtaaggaacgccagcctccttcaccgtgttgttgaatataagaaagaagcttctggtcttcctctggtgtccacgcacctttcttcaatccttgtacgttgcagcaaggactccttcccatgtccctcctagaaccaatattgaaaacgacagcgttaatttggagatactttatctgctggagccagttacacacccagatgataagatatatagcgatttgcagcagcgttccaaattttatccttgataaaaaattttagaataaaaatttatgacatgatgttgaccaatatttttattacttaaattgttatgtgtagggatttttcataatgctttattatatgtcttttgaacacatggtgaggttacaggtttggactttggaccaccaataattgtgtaagaaaaaaataaaacacaattaactagtattgtttataatactaggttaattgatatagctacaatataacaaatagataggttagacaaataagatgccacaacgaaagaaagacctaattcttaatttttaatgtttattctgtcctttatgtaattatttgagaaagtgaaatactgactgtacctttcaaaaaaaaaaaaaagtttttccgttattgtattttaaaatatatattttttatttttatcgtaattcacgtatcaactcacctagtaatttaaattgcaattaaaatttacataacaatttacataaaaactactcaaataaatagtaaatatataaaaaaaaattaaaaataatatataaaataatatctaaaagaaaatactaacttcgcgttaagttactaaccaccaaatctagtagactgttatttttatatttaaatattgaatgccaatcaatttaatttaataaataatatgataaataaataaataattataaaaaattatgtcattaattatgatgatagcaaacctcaaattctaaaatacaatactctttcaaaaaagacagtctatattaacattgttattcgacttttaaagtaaacaacatcataccaatatatagtcaatatatagtgggttgtgagtaattaattagtgtcaatatattgtaggttgtgagtaattaattagtggttgtctaccttatttagtaaatccaaaaatataaaaccctataccaaattacagtactagcgatttgcaaattttttaatacaggtgtcccttagcatataaatatattatatatatacatataatactaatagtttatatttgtggtcgtttttttgagtgatcatcaccacatgcgcccatccgtgactagatataataaagacacaatttataaatgtatagagcaatatatacatatttatatataagatgatgaagaattaatatactggtatgaattaatttattgttaatttataacttgttacattcatgcatgttcatcgtgctaagcgtgacaagctttcaacatattatagaagataatctctaataattacggcgaagatagttaattaatgaaatgcatgtttattgtgcatagtataataaaatttaaaattatatttcattaaaatagatcactatttacggtcataaggttatatgattaaatattgtaataatttattgaataaatatttaatattgaggatttgtttggtttatagggtaagttggataataaaaatgaagtgtagttgttaatatataggtaatagtaggtagtgtacatgtaggtgatgatgttggtaagttgaaggtgttaatttatcaaatggaaaagtattgattttggttgctcttggctacacaatatggatcatttgttgttagaattttagataagataaacggggtttcatctcaaaattaattggtgatgnnnnnagtagcccatgttcttatatatgattcaatatttttacatttaatccatgtgagacaatgttctccaatgtcccccctcaagatggtggctatttttgctnnncaatcttgaatcaccttatcataaattgtaccatttgctcgtttattttttttttgtttgcagctgggagttctatttgctcgcttattcttgttcgcggctgggagtaccattttgctcactagcggctgtggatcgaaagcccggtagggatatggctctgataccacgttgagaatcatggtgttccattttgctgagtattgatagttgttcactccttagaattatttcattaagatccttcttttactaaaaaaaaattgtatccgcgtatacattttaatatttctagagcttacgttaactatattctagattaatctaaactataaattactaaagttcttagagaattttttctacaaatgcctaaaacattctagagtaattactattgtagaaatttgtagtaatttgtaatactagttctcagtacacatttcaataatttcgatcattctcatagtacagcttaaattttcctcttggtagcctctttgtgaaaaaatttacaaattgctcttcggtcttgcaatgattgagttctatttcattgttttctgctacttccctcataaagtggtacttgatggttaacccaaaaatttccctggtgacatgcacattaatattaaacatgtgtcaataaggatgacgtcaaggagttgaataggccaaagcatagcattcgacgtaggaggggaccccaaccctatgccctggtaagtctaagctccgagagttaaaattatacgaacctccaccctggaaaccaccttgggcacctagggtttcatctagtgcgcaagttgatattcttatatagggttttagtttcaaagacattatagtgtaaatgggtcaaattttacattggaacatcagctagacataccacatacatatttgaagcaacagacttagattcagaacaagttcatttttaagcacttggagcaacctgtaaagaccacttagctttaatttagaaattaacaaataactagggcttcattatgaaaattatttattaatattgaattaattatttatgatagtttatttggattcagaatgcatttttatatcatatataaaaatttcataattttgcatgttttgtgcccgacaacattagaacgcggtgtttggctattagaatcacatcttagtattttggatataacgggataatagtttagacattgggaatgtcgggaatagtcgtgattttagaatttcccaaaataaccctaagtgcccttttatgttgttttgtgtgggaagggcaaaatggtcagtttgcccatttatgttttgtcttttgtggtttttaatttaagcttataatcagatttttataactatccttagctgattttaattcaaataaaaccatttattttattcattttacaaaaataagaaaaaggcaaaattttcacaacttcctctccttcaactctctctctctctctctcaaaaattcctagagcagctagggttgatattttcttcagcatttcaagtagaattcagcaagatctaagtgattttaaactcttggtaagctcccaacactttgtcttttaatttcttgaattttaagttagaggattgttgcagttattgagggttgttgttgtagttgtttgatgttgttttctgaggttaaaatatgttaagttatgttgatttgagcatattttggtaggtaatttgtggtttgagcaagctttgagttttagaactcaagcttggctctttaatggtatttttcaattatgagtatgggtagttgttttatcaattggaaaatgtttattggggtgtattatgcaggtctggaaagtttggttgggtttggaaacgatttggctagggtttggagctttttggtttttcagggtaaaaccgactaaacggtataacaatgcttgtaaaaccggttacccggattttgtagcagggaaactcgacaattcagcttgtcgtttcgcgttagttttaggtttctagtattggttgattccctgctagtttagggtattgccatattaagttg

SEQ ID NO: 18052 - DNA, 12048 bp, Cannabis sativa
taaaaaaaccatttttatatattgattttgcttttgacttttcaaagtatttttttttattgtttgtagttgtaattatatatcagtatgatttttaaaaaataagggggccacggccactttaacccatgtgtacatccgcccctgcttgtcgggatgaggaccacctacgaagattattttttctgtgtgagagctgtacagtgtagaaacgatacgaattcacgatgatcagttgacttgacttggccatgctttcattgattcattaattctcgtaaccaataattccctcgcctgggcaaacattatctgctgttctacgctcacttttacaaatcttgtaacagagataaaccctcatcgatctccttaggagttattatattgctgaccaaatcatatgaaagaaaaatgatcatcaacttacccactcatcttttgtgagcttatcagaagcacagatagctaaacaaaaataattatgctaatttccacaaaattcccaaatgcccttttgttggcttcgtcgatactaattatatcgattgggcttaacgttggagctattgtcccaacttacatctaccacatctgcactaactccaccacttacacacctaacagtgtctaccaaattaatctcagaaacctcctctcatccctttcatccaatgcctccagcgaatcccataacaccagcgccggtgaaagctcctcctcccccgtctacggtagcttcctttgtcgcggagacgtcaataccaccgcctgtcatgactacgtgacgttcgccgttgaagacgtcgtcaagcggtgccctgtgcagaaggagaccatgatatggtacgaggagtgccaattgcgctactccaaccgcttgttcttcggcaccgtatatgaaagcccgagaaactattatttgaaccccactaccattagtactgacatagaccggttcaacttactggtcggggccatccagctggcagcgactgaggcagcaagaggccggcaaggggataaaaagttcgcgactaaagaattcgacgttgatggattgaacagtttgtactccctcgtgcagtgtacgccggacctgaacgcctcaagttgcggtagatgtcttactgatgccatcaaaggccttcatagatgctgctctggaaaacttgggggaagagttatgtttcctagttgtaatgttaggtacgaactctatcgcttttacaatcaaaactcagcaaccccgccaccgccaccgccacccacaccacaaccgtcgctgcctccaagtttcacatcgagttcaaatggtagtttttttttttcataattaattttatttgttctataaaaataagacatttttcgttttataaaaatatgatcagcaatgaaattatttagtctgagactagcggctcgggtacttagaagttagaacccatatcagtcctagacatggctactcagggttgcttgctgggtatgaaaaatttagtgcctgtttttaaaaactcactcatcacgtgatctctagctttctttcatgtaaattatgtatttaacgtgcgttttggaaaaataatgtcattagctctctttattaaataaagagccctaagcatccacaaccacatataaatagagttttgtagcacacagctcaatttgagtaaagccgaaatgctgtcaatttgtaactttaaacagaaattaaacttgtcactttgtgactttaaaaagaacctgagctttgcaattaaattcttagtgagcaacattaacccttgttattgcgttaataattaaatctttgatatttatcattgacgaaatctcgcctaaatagtttaccatatacaaaatagtgaaattgtggctattattatgtatgtgcgcaggaaagaccaaaacatcatcggtagtgattgtaatttccgttgtggtcccagttgttgttgccacctttctacttgtcatttgctgctatgtccatcgcatgagagcaagaaataattataatactatagtaacccaagataacggtaatttgccaagtgtactattgcactaatttattattattttaatcggctctgtatttgtactctattttttttagcagtgctacagggtggacgagatgcttgattagtagttctttatacttttaattaaagtaaaatatttgagattggatatttaattacccaaataataatattacacattacaaagtactaattaatactctctaccatttctcatttttttttcataattttcttttggttgaactactgcagcgaatgacttaacaaatgatgtcgagtccttgcagttcaattttaagagcattgaaactgcaacaagcaatttttctgatgataatatgctaggtaaaggtggatttggtgatgtttacaaggtatgcactagtgtactgaaacagattttagatgaaattgagaataaatgaaaactcaaactattgtgaggaaaacacttagatattgcccttagcaagcatgttttttcttttctttttttaaagggagtgcttttagatggacgagaaatagctgtgaagagactgtccaaaagctcaggacaaggtgcagcagagtttaagaatgaggtcgtgctggtagccaagctccagcacaaaaatcttgtaaggcttttgggattttgcttggaaggagatgagaagatacttgtctatgaatacgttcacaacaaaagtcttgattattttttatttggttagtacagctacacacattaattatactatttggatggaatctatatgtaattaatattactactctactactcatttgtccatgttttcaacatatttcctcatgcagaccccaagaaacagtcccagttgaattggtcaataagatgcaacataatcgaaggcattgctagaggagttctatatttgcatgaagattctcggctaaaagtgatacatagagatttgaaggctagcaacatattactagatagaaatatgtctcctaaagtatcagattttggcatggcaaggatgtttggccaagaacaaacacaaggaaacactataagaattgttggtacttagtaagtttcaaaatttaactcactctggaacggccctaatactaattatcattatcattagatgcttatataaatatatatatatatatatataaatctaactaactacatataaatctttaaatttttattatcttcatttctccccttgcttgtgagatcacagtggttacatggctcctgaatatgctatggaaggattatattctataaagtccgatgtttacagctttggaattctgttgcttgagattttaagtggcaggaagaactctagctctcatattggggatcgtacagcaggtctcgtagcatatgtaaggtttatgtggcttaacatgattgatttttgtaaacattccctctcaaaaaaacaatttacccttaaattcataattaacctctctgcatacatttataatacaggcttggcaattatggaatgaaaagaaagtgttggatctgatggatccgtacttgaaagattcatgtactcctcatgaatttatgagatacatacagattgctttattgtgcgttcaagaagatgcaaacttaaggccttccatgtcatctgttgtttcaacgctcaaaagtgaagttcccagcctttctcaacctgaacgacccgctttcatttcgagtggacttcacagtgaccacgaattgaacccaactgatagtttatcggtcaatattgagatgactgttactgaatttctgccaagatgattatattgagtatcatgccaaaaaacttataatggcatgtaaaggaaaatattttattcaaatatgttgtctattcgaagagaatttatacatctcttatagtaattttaagaatccattagctggactagacagaatttacatgattagtaaaaaaatatgtccaacagttagattggcaaatctcttcttgaaacagtcaaaccgcatgccaaattagctttatgctttcataaaccagaaacatgacgtgatctgttgaaattataggccttgtttccttgatactgaaagtctgatattgtttatttgtgcacacagtgtagatgacttgaaatatatttaggtagcaatagctaatgtttaaacaactactctgttgttgatttgtcatgtgccagaaaaatctgatcaattctcattattcgtttaattgctaaagcacaccaatggttttaagttcaacatgccagacagtatactagatctagaacggtttaaaagaaaattattgagcataatttgtctaaataatttagtaaaattcaacatttttttttctaatgaacttggaaaagtattgctcataaataatatccgtcattagggataatagggaccatcacatttgacaaaatagattattattgtaattattttgtaattttgtacatgtgtataatatctattaaataagatcaactactctgtaattttacattatatattatattgattgttacatcatgagacaaaaagaaacaaatggaacaagcacaaacattagtaatagctagagataacaattaataaatatattttcttcagaaaaaaaaaatagtgtatacatatataaattttcattgcttataaaagaaaaaaatacaaactttgtgcaaattaactactcatactttcaaagaatcatctcagtaaggaatttataattctaattgacaaacgcacttcaggctttactaataacatattattttgtatcagtgatgtccatatcgtgcaaaacgcaaatattatctcttagaaacaaacaattagtttaatcacacatcacaaccactcaagcgaaaaaaaaattgacatttcaaaccatgcttttcccacacactatcttcgttacactgaggatggtttttttcaaacttggcttttttcacacattatcttcttacatttatttttattttcaaccaatcttattacttggataactataaacagttacaaattataattactagttgtttttttccaaaagactcaggacaggatacgaatcagctactctgattagtttttgtgggggctcaccagaagacgaaaacaccaccaacgattgactttgaccctgcttaaattgattcattaattgtcgtactggttcatagtacccactagttctccctgcctgggcaaacattgtgcttttcctccactcccttgtactgttgttgcaacttgataaccacctcatcgtcaccggactcattacttgcaatgatattactcatcaaatcctaagagaaaaagctaaacgaaagtaatcatgctagtttccacaaaattcccaaatacccttttgctgctttcgtcgttactaatcatatcgattgggcttagcgtaggagctattgtcccaacttatctctaccacaattgcaccaacgtcaccacttacacacccaacagtatctaccaaattaatctcagaaacctcctctcatccctttcttccaatgcctccagcgaatcccataacaccagcgccggtgaaagctcctcctcccccgtctacggtagcttcctttgtcgtggagacgtcaataccaccgcctgccgtgactgcgtgacgttcgccgttaaagacgtcgtcaagcggtgccctgtgcagaaggagaccatgatatggtacgacgagtgccaattgcgctactccaaccactcgttcttcggcactgtatacgaacgcccgagagtctcacttttgaacaccgccaacattactgaccagaaccggttcaatcggcttgtcaacgagaccaccaaggcggcggcggctgaggctgcaaaagggttgccaggggacaagaaattcgcaactaaagacgaaaacttcaatggattccaaaggctgtacacccttgtgcagtgtacaccggacctgaacgcctctggttgcagcacatgtctcaccgatgccatcggaaggcttcccatatgctgttctggaaagcttgggggaagagttctgtttcctagctgtaatgttaggtacgaagtttatcccttttacaatcaaaatgcatcaactccgccaccggctgcctctccacagccgccaccacctccaggtttcacatcgagcacaaaaggtatttttattttatcagaattactggtctgatttatctttgaaaatggctgattgaatacttgttcagcgtgaaagttgcctaattatcatgtttgttagatcagagattttcgttaatagtgtgaataataggattctaggattaacatttgaaacttaatttaaattgaatttcactcgacagccatttctttcatttaaaataatactaatttcacgatcaaatagtattgaaaataaaaatataagcaatgatataatgatttaacttcttaattagcataaagaaagtcttaactctttaaaccatctattgctgaaaaaaaaaattaataaataaaaagaaaatctcaaccttctatgaaatggttttttctttttttcaaaagccatctatgaaaaggctttggttaattttaataagcttatttttcttcttgaatttttataacaagcttcttttaaagacaaaaattaattaaaaagttcttttattaaatttgggtccaactcaataataatatgtgactagtgactacttactttccttacaaataaatgaatatgttactacttatgagaggttttatgttccaattttgttttttttttcaatctttttgttaagtctttatttgtcttattgtccgaagatcatgcatatatggctactagcaagataacgttattatccttaattgctggcttgtttgtatctttcctatgttataatatatgatatttggcttgatgtagacaaaaattaacaaattatttatgaataagaatcaaagctaggataagtaatgaaacgggaacgaaacataaatcaaacatgacctgagtgttatataggtcatgaaaataattattattatttataaatttgtatctaatttttattcttttttggttagattacttctagtcttgttctgtttgttttatcccctgttttaaacgaattctctgttcttgcaaagattatgaactttatatataagtgctcattaaatattcgtaatttaccagggaaaagcaatatctcagccagaacaattgttgccattgtcgtaccaattgttgtcgctatgctactattcatattgggattctgtttcataaccaagagagcaaaaaagaagtacactctaggtaaagaatagatctaaaattatcttaatatattttctacatttgcttttacttatagctaagcaaggaaaatatatattttttttttgaattctgtcatttaattagtattttttttttttttcatttgattggttgtgtagctaaagatggtgatgatattactacccctgaatccttgcaatttgacttggctactattgaagcagccactaacaaattctcagctaagttaggtgaagggggatttggtgaggtttacaaggtattgtatattttaactatctgttatatgcgctgttgtaacattttaattaagtagctaataatcaaatcaactaatttaattattcttagggtaaacttcctaatggacaagaaatagccgtgaagaggctatcaaaaggttctggacaaggtacagaagaatttaagaatgaagttgtagtattagctaagcttcagcacagaaaccttgtgagattgttgggattttgcttggaaggaaaagaaactttgcttgtgtatgaatttgttcccaacaaaagccttgactatttcctatttggtacgtcctgtcttattatgaataatttatttacaatgttacttgtctagctgctaggtgctgattctgagcatttgtttgagtgcagacactgatagacaaggagaattaacatggcaattacgttacaagattataggagggattgctcgaggcattctatatctccacgaagattctcagcttagaattatacatcgcgatcttaaagctagtaatattttgttagatgctgagatgaactcaaagatttctgactttggaatggcaagaatgtttgatgttgatcaaactcgaggaaatacaaatagaattgttgggacatagtaagttcttcgacttagtgctctcttatagaaatacaagacatatagctatattgttataacaacattatctttaacttattcattgagtaaattgttttattgtgtcatatcatttttgcagtggttatatgtctccagagtatgcaatgcacggacaattctccctcaaatctgacgtgtatagttttggggtcttggttcttgagattatcagtggcaaaaagaacagtagcttttatgaatcggattatgctgaggacctcctgagctatgtgagtaatttgatcaaaagatttacaattttattttgattctaaaatgtataaggaaaataagatatccattatatgtgatgatgatgatgatgatgagttattgatgaattgagttgcattattataattacaggcttggaaactttggaaggagggaaatcccttaaaattattggatccaacagtggcacaatcatactcagaaaacgaagttgtgagatgcatcaacatagggctactatgtgttcaagaagatccagaagacagaccaacaatgaagacaatagttcttatgtttaatagttactcaattactctggctgtaccgaaacaacctgcattctacaatagaacagatgcagatatgccatcgatgggactaaagtttgatgattcaagaagcgttgggtttccagtttcaatcaatgaagcatcaataagcgaattatatccccgatagttatatagtatttaaacaataaaatattaaacaagatctatgcttatttgcgtacgtgtgtttcgatatcaatataatttttcgcaacatatttatataagttttctaagcgtgatgttttagtcatgcacgtacggcgagtcatatatagaatagtcttaaacaattgtgtcgtttcatggtttcaagttattattatatcgacaaataaatggtttatatattattttcgtcctacctttatacattattttaaattttttgttttatcggtagagctcattttagtctaaatatatattattattttttttatttttttttttttttggaaggaagtccaatttttcttttaacatataagtccaacttttgtttttaatataactaaaatactcttaaattcttatatattagttaattttaattgtatttaatgtattttactttgaatataatattatattaatgaattttattattataggaaaattattttcgctgacaagaaacttaatacttttttttagaaaaaattattaattaagagaacccacattttttaaatttaataaatatcatgttacctaattttaatgttatttaatttttataaaaattatgttccaggtatgttatgttttatttttataaaaaatgaggagtgttaattacaattttttagtacaaccttttagtcaacctctacgtttgaaatgacaatgtcgaaatatttttaagcgatatttgttatagttatagtatcatccctgtaaatttttgaaaaattctgaatagtttatagtacctaaaacagagtagttcatgatatttcagtttaccactcgtgttcaaaaaacttcaaacgtattctcagtactactgtaaactattcaaaaaatttcaaaaatttacaggaatgatgttgtaagcataacaaacaccgtcgtgaaaaaaaaaattgaaaataaatattccgacatatattttcagacgtaaaagttgactaacaaattgtaacaggaggttgacagtagcactcttcctaataaatatatattaattattattcaaaggctatacggttcattgttcaagaaaataattaaaaatatatatactggatttggtagggtagatagagagatagacttattatttttttttaaaaaaaaaaacaatagagagataaacttaagtttgttaatttcctatcatacgtcaatgttccacatcgagaaggagaattgatgagggcaactctaaagaaaaatagggttgtttaaagagcttgtcaagtgggagggccaagccaagtgacgtatggtgtgattaaatttatcaaaaaaaaaacgtaattgtttatgtataccctatatatattgtattcttttttaaaaaataaatatataatggttgtattttatgtgattaaatctatataaaaagaaaattaattacgatgaggccactttagctttattaaagccctaacgatctagtagtgtcttaataccatatgaagtgtgaatcaagatttttgttaaaaagcaatgtctctgttaaatcaatcaaaatttgacatgtcaattacttttttatttataacaaaattaaacctctaataaaattaacaaaattagttaacatatttaataaaaattaaattagttgatgtgttaaactttaatagatttaatacagtatggaataccaatttttaactggagatcttaattcatgaagtgtcgtattcattcgtacaattaaatattgaatcatatatatttaatatcaaagtattatttataaaaaaaaatactagtatggcatgcactaaataaatatggagcaatcctataagcttctttacttcaaatctttacataagattaatttattcacaagttattctattttttttctaggtaatttaaatattatattttttaatattttattcattaaatttatttttatgttaattaaagaaaaaaaaacaaaaatacaataataataataagaagaagaagaattactacatatactactttttatttttttttcaaatttacaatttagttactcccgtagtttatccggtaatttctatgttggttggtatacgaatattgattgagatttaaattgcttccttagttactatcagaatttttataaaattctgtaaaaaatgtatatataaaaaaattatttttaaattgaaaaataaaaaaaattaaaacaatcattaaaacaaattgaaacgatcataagctaaaatttgtaaagtattacaacttatttattaaaacgatcattttaaataaattgaactataactttgattttgtaactagtcacaaaaattattaatttgtcaatgtcattgtccttgttattgttgatctagtcaactgttggattttttaattttccatctggcattctgcgtaagtggatggaacaaaatatctttaatgactttgggtcatcggatgactcagcttattaaagttaaaaattcaattatcaactgcttctcttcaactccaatcagaatcaaaattagatcaacatacactttgagcgatttttattactttcttcttttttttttttttttcttaattttattactttcttcttgaggaaaagtgatgaaaatattttgtcccaagtttttctatgtaatcttggctcacgccctctgttcgagttctcttatccatatcggagagtcgacaacaacttttcgcgctcacgcatgctcaaattcttcgactggtagtactttaacccaaaacagtacctacctcaacaatctcaatcttctcttctcctatctcaccaccaacgccaccaacgatggtgatttctaccaaacaaccgtcgcaagagacactcctgacgcttctaccggctattttcaatgccgcttagacataaatgctactgtatgccaagaatgcgtcagaaacgcttctacagaagcacttaagcggtgcccactagaa

SEQ ID NO: 18053 - DNA, 3077 bp, Cannabis sativa
tgtcagttgatgactcgatgtgactctgaccaaggacctcttcaattttcggctcattaatgccgactgacatgtacctcaaaccacgccttaggattagcacattttgacggttagccttcagataattgagtgcacaacgtacacttttagggggaactcaaggtatttaaaatttgaaatgattactttgcctcactaatctgctgataaatagggctgaaaaccttaatcaaccacttttagccatttttgcttttgaagaatcagagcaagaaatctattttccttcaaatccgaagaatcctcaggaaacaccaaccagcatcatccgagcaaatctaaagcttcgaatagtgagtaaattcttcatttcttttctcttatatgtttgaatgtttaattttctgggttcttgctgtaaaacttgatagttctttaacttgttataggagaaccatagaaaatttaggtttaagaatgtaaactcttgactatgcttaatcacattgcttgatcatatctgcattttaattttgattccacgatactcactttcacttacccattcggggcttagaaaaaatcaacccttaattcgaaattttgaaattctggattgctaacctcattatcatgcaaaatttttgtttttgatcccttgatcggacctggtcggtatacccaacctgctttcgttcattatcccgaccaaatgttcatcttgtgtcctaccttttgtagttgaaccctagtgagttttgggcaagcggacatcatatcgaccaggatctgcttcaagcgaacatcgacaggatcctcaactagtcattcccttattgtgttagatgtcatgacgttcatctatccccacttcctattacaagtaagtttcctttattttttgcattttacttgcatgttttcgaataatcctattttggaatttggggtataactcgtttgcatagaaaagtggggacttaatgtgtttaatctgggtaaacttagagatattaggtagtactaatcaatctatttaagccgtctctacacaatctcagaatcatcacacttgatcatccacatgtaatgtgggattgcacaaatatgggtctttcctcttcggatcatggggctctaattatgacaatcaccccctttggcagtccgacgtccttgtcgaccacactttcgattaggtcaaggctctgatacctttgataacgtcctcgtttcaagccgccattgggcccttgcacccacagaatgatggctcttatacacgagtacattactctggctactttttggaatgacgactgaccctataaaccaacacaagtgtttctagcatgctttgtccttactcgcacacttcttgggaaaattttctaggaggtcacccatcccaaaatcacactaggtcaagcatgattaactgtgaagttctttcgtaatggactaccagaaaataagatgcaccttgtttatataggcagtaccattcaatctatttaaatcatcttcaactaggtagtctcatacctagacagtctcagaatcatcacacttgaccatccccaagcgatatgagattctacaaatcctagtctttccccttcgggtcacggggctctgagtatcatagttaaggtctatctatggtgaatgttttactcagccataccaatagcaatacactaatcttttaaaaggtttaagttctgactttgtgcttgagatgtgaagaagtttctgaaactctggaacatgcgatgctattttgctctattctgcatcctacatagatttttgcttggggattcggccatttctacaccgatgtggccatggtctagctataggaggtgtttattttcctctttgaagagttttcccgggagagctttgagttgatattgatggtgatgtggtggctgtggtatgatagaaactcaatattattttgtggcgctcaatcaagaattgatgttgtctcggagcttgtcgaaaaccaattgttggaatttcatgagcaccttcggcgtggattcttgatggattgttcctctttagcgtcgacgtttggtcaaactgtgttgtggtcatctctgcctgctggatgtttctcgttggccacagatgcatcggtgattcctggtaaggggtttatcaggttaggggtgatctcgggtgatgatggtgttgtttggttggcgtgggcagtgagactcttgggagactttagtgttaatgtggtggggctaatgttggcataccattaattttaaatttaatcttgttagtattaattgtaattcaaatgtggttatggcctgtctgaataatccttatttaaatgttagtttaaattttattattttggatattaattctttaatagttgttgttaaaggtggttcttataatgtcattttgtagtatgcgaatgatgttcatacactagttacttctattactaatacgagggattgtatttagatggatatttatctaaaaattttaaattctctatcacaattgatttattttaatgaaatgatctattttctctaaaaaaaaaaaaacgaaatacaatattcatccctagagaattaatgcacgtacggttcctaacatgataaaaaaaaaacaaattattatgtcaaaatatttccctttcaaaatctggctaaaagtacttaagtaccaatagttttggttcagcagaaagaaaagtaccatatagtttggttagagttatgatgtacccttaaaatcgctcacccacccaatcacttaataaggaagacaaacccattttctcatatccaactaattttattacgaccccataaacagaaaccccaccaaaatcctaacatcatcatacacttagtttggttgaacttcaagaaactggtccagtcccaattacaatgaaaatatagaaacttggtcagagtttggctcagcttttatatagtactccattacatctcaaggtgccatcaatggaattgattagatgtaattagaaattataattttacttaggcatggcaaaaattcta

SEQ ID NO: 18054 - DNA, 4804 bp, Cannabis sativa
  modified_base (83)..(84): a, c, t, g, unknown or other
atagggtattgttgtggggcttgataatttggatggtgtaattcgtataataagagaatcttcaagcaatgcagttgcaacanntggtctaaaaaatggtaagctttccatgctcttacatttcatatgtataaattgggtaaattaattttaagagataattattgatggctttcccttaatttccatgaacttatttaggctgtttgtagaatcaatagattgaatttgaggtacagaaagttttgcctggagttatatttttataggacttggtgaagcataaataaaattataaggaacgatataattcaattacatactggtttcaatactgttgaacctattgtgcagaatctatgatcagatatattaaaatatcagcttaccttgcctagtgcaagttttttgaaataaaaaccaagtatattgtactcatactgaaactaataccatattcagtacttcattctatgattaacgtcaaagaaaatttatagcaacttacaaaattgtaagagtaatatctgttaccatgccaacgtccatcaagttgaccatctgaattaaagcattaccaagtaatgtgcaaatctttaaatatgcttcagcctcctgtgtctattctttcttcagttgttattactgtttattttggaactttatgctgttgaattaatcttatatattaatttttactgcagagtataatctttctgataaacaagctgaagctatattagacataaatctaagaagacttacacttcttgaggtacaaattagttgtgacagagtggatctgttctctgttcggattcttaagtctcttagtcatcctttgcaaggactttatactaataaatgtaattctttgcagaggaaaaagtttatcaatgaaagtgaatccttaagggagcaaatttcaaaattagaggaacttttgtcaagcaagaagaatatgttagaggtatatatttactattcaagccacaaataaattttgccgcacttgttacatataaagaatcagatttttttgatggaatattaatggaacattttgacaaacaattctctcatggacttgttttcacccttcttttcatgtgtaaccttatcattttattgtcgatcatttggtagaactgttgtgcgattgttgtttgaagcgtggtttcaaaatctcttttttagaatcttccttccatatttgagtatgttcaagcaagattataccttgtattgagaaactggtcttatgtttccatcaacttctgtgtgataaacagaggcactactaaaatttcttgctgttgttgttttagataattgaaaaagaagcaattgagttgaagaacaagttttccaatccaaggcgatcaatgatagaagactcagatggtggtcaacttgatgacatagatgtcattcccaatgaagaaatgttactggtataaataagaaaatcaaaatttgacgaccctatctccccattttttgttccttttaaaatattatgccttattatttatataaaatttatgggatttttcttttccttttttttttgtctgtatgtgtttagggcttcagtgagaaaggttatgtcaagcgaatgaagcctaacacttttaatctccaaaatcgaggaacaattggtaaatctgttggaaaattgagggtaaatgataccatgtcagattttattgtttgtcgtgcacatgaccatgtcctgtacttcaggtattttgagttacttcttggctatttatttatttatgtcaatttggcctatattgattccctttttaaattttgtaatctttctatttcatagtatcttggtaacctagatgttttacatcaaacaatttttgtagtgataagggaacagtatactcagctcgtgcatataaaattccagaatgcactaggacagctgctggaactccattggttcaggtattcaccttatttcttttttttatgtgttgctttcctgatattattgaattaacttatcactttggctggatgcagatcctatctttgtctgatggtgaaagaattacatcggttattcctgtcagtgagttttctgaagatcagttcttactgatgctttcagcaaatggatatatcaagaaagtttctttgagcagtttctcaactatcaggtcgacaggaatcatagcaattcagttggtttgtcctgcttcctgttctagtcatggttgttttttttcaattctccatgattgttctttggcttatccagatctattaactggacaggttcctggagatgagctaaaatgggttcgctgttgctcaaatgatgacctcgttgcaatggcttcaatgaatggattggtcattctaagtgcgtgtgataacgtaagtcatttcatgttcatattactgtgtgcagtatgcaattagtagatgggatgcaattagtgtcttaaacattgccattttttctttatctctaaagttgggattatcataattattcttccctctggttttttattcatctcttatagaaaagacagataaagtagatagtgttaagatttcacttagttgattccctgttgttactgagaactagaaccatgctgtcattttctaaccttgattgtttttctctgcttattctattatggaagtttgcaattgtacaataatggtagataatttttgttgctgattttttttccactcattgatgacccgtgttaatggttacaagtttgtattcctttataattttgtcttaatagattcgaacacaaggcagaaatacaaggggtgcagtggccatgagacttaaaaaaggggataagatggcatgtgtggacattataccagctgcgatgcgcaaagacttggaaagtgtgtctcttcagagcaagtaattttctaaatgataatatggtgttggataagtttatcgactggttagcacttagcagcataccagcttgagcaatactagaatttgcctctttttttttgaaacccatgggcacgtggagtaccccaactgatcccatagggaaataccctgcgggccccactgccagtcagatctactgagggaacccttgccgctacataccaaaacttgccttattggatctaactaaattatatgggtttaattggagctatcatttttggtccatacattcacctagattactctggagagaaaagaaagtcctgtgttgatggctgtctttgctttgctcgaggatacatttttctgtcattacctattttgtttatggtataactatttcgtgtaggatgtcaatgtcattacaaaaaaatgttgcgtaaaacatgcattcccttcacaagcctgtggctatgtggtgaatgtttcaaggcaggatggaaatagttggggataataaatggggcctgattgattgagatgattttgttgcctttaatttcaatgtataatgcctagacatgccctgctgacttattgaaaatattttttttgatgagctaaaattacttgggaagctaaaagtaacttgggtatttgagttccgagggaaggggagggtatgactgttaggaatagaagatgtggcgttaatgttgctgttatgtttatgaaaaatttaatgctatagaatggttacccatttagccgagctaaaattagttaatttttggttcatcctaataaagtttatctcagtatgccagtttccatgatattatgatactatgatttattatcttaattgtatttgttattaattcgacagtcctaaaggcctcaagggtccgtggttgttgttcatatctgagagtggatatggaaagcgggttccattgagcagatttcgttcatcacctttgaatagagtgggtttgataggatacaaggtactttcaacaggatttggatctattatttaagactgaccaaatttcttcttctattctaacgggtgtaccacattgtttcagtttgctgcagaggatcgcttggcagcagtttttgtggttggattttcattggcaggtaagagtactctcttcagttgatatttgattgatgtcaaggaaggtctagtctgtaagtttattttgtattttataaaaaacaaataacagaggatggtgaaagtgatgaacaagtggtcttagtaagtcaaagcggtacggtcaacagaattaaggtgcgggatgtctctatacaatctcgctacgcaaggtaaatgcaaataagcttttctttttctttacctatgtttgtgatatttggcttcaagaactgccctcattattttcccaagacattagaaaagacactatgcaatgtggatccttaaatattgacacatgtaaactgtgaatccataattattgtgaatccataattattgtaaactgtgaatccttaaatattggcttaaagaactgccctcattattttctcctttgataccgttgttcatcaacatagcagcccatctgtattattattgttagaaaattgtctgtatcaatattgacacatgtaaactgtgaatccataattaatgtgccagcttgtgaagttgttatgtgttcttgttatgttgactatttttgtaactggcattttctcttcaaggggggttattctgatgcggttggaccatgctgggaagatccagtcggcctccttgatctcagcaacagaatccgaggttgaggaagaagtcgcagctatttctgcctaggtccgtgccaagcaattttgttttcttgttgtgcagaagaa

SEQ ID NO: 18055 - DNA, 6680 bp, Cannabis sativa
gctcagaaagcttttactgaatgtttgatatttcctgaacgtttagtcctataaataccagatattttcaagcatgagcaactttttttttattttattttatatcttgatttaatttaaagtagtgaaatacattactaatatttttagtgtttggtaattgggtttgggctaaaattaaatatcctctattttgctttcgtgattaataggtcccagaatgcatagacaaacttgctcaggctggaattaaaatatgggtattgactggagataagatggagacggcaatcaatattgggtaagattagtgcaagatagtgaaaaagcatatatacttttggtagacatgaatttctcaccatattgttttttttttcttccaggtttgcctgtagtttgcttagacaagagatgaagcaaataataattagctctgagactcccgaagcgaaagcattagagaaaggagaggacaagtctgctgcagcctcggtaagctctttattccctttctttccttaccgtaacttttggctcgttatctttggctgtatttttcatacaatgaatgttctaacttaatagaatgtttctgttctttaggcacttaaagcaagtgtcatccaacagataagtgcagcaaagcagttgcttaccgtaacatctgaaaactcagaggcattggctttaattattgatggaaagtcacttacttatgctctagaggatgatgttaagaacctttttctggagcttgccattggctgtgcttcagttatatgctgtcgttcatctcccaagcagaaagcacttgtaagttttactaatcatttctcttgtgtgctagaagattttcttgtcattttcacatttatatctggagttggctgaacgatgagtttcataaaatcatgcaggttacaagactcgttaaaattaagactggtagtacaactcttgcaattggtgatggggcaaatgatgttggaatgcttcaagaagcagatattggagttggtattagtggcgttgaaggaatgcaggtaaatgataagaaaactgcactgattttttattttgtttttaacttttatacttgattactcttatctattactctgaaaatatttaacacagaattctaatttcatcatctccttcccaatatttcaggcagtcatgtcaagtgacattgcaattgcacagtttcgtttcttggaacgcttgctactcgtacatggtcattggtgttaccgacggatatcatcaatggtaattgcatcttcgttattaaagtctcttccataaatagaagaattttgttatggctgtggggattgtcaacctttaagttccaacttaaaaatttaaaatatgaactcattcatttttgttgttgtgattacagatatgctacttcttctacaagaacatagcttttggctttactatcttcttctatgggatatatacctcattctcaggacaagctctttacaacgattggtatctgtcgctatacaatgtcttcttcacttctcttcctgtagttgccttgggagtgtttgatcaggatgtctcatctagattatgtatcaaggtattctgatcctaatgcctctcacttttcatgtcttacatcaaacatatttttcttcacatagaaagaaaaaagaaattaaaaatacatataaacttaaagaagaattacatttcaatttatttaacatctaaactaatgctctttatcttcatttcacagttcccattactatatcaagaaggtgtacaaaacatcctctttagctggctcaggatactaggatgggcttttaacgggttactaagtgccgtcttgatcttcttcttctgcaaccaagctatggagagtcaagcattccgcaacggtggagaagtagctagcttggatatccttggaaccaccatgtacacttgtgtagtgtgtgttgtcaactgtcaaatggcactgtccgtcaactatttcacatacatacaacatctcttcatatggggtggcattgcattttggtacattttccaattggcatatggagccttgaccccatccctctcaaccactgcctatcaagtcttcgttgaagcatgtgcaccatctccatcttactggcttataaccctctttgtgttaattgcatcccttgctccttacttcacttatgcatccatccaaataagattcttccccacataccatcagatgattcagtggatgagaaaagatgggcaattggatgatcctgagttctgtcatattgtgaggcagagatcaattaggcccaccacagtaggatacacagccaggattgaagcacagtcgaaacgctttgaattcaagcctgaagtcctttgatgcacataaaaaaatttatttcttgcttcatcatcaaaagttctcacccaaggtattgctgtacatttgttcaaaagagagtttctcttttttctctttgtacatatctaatgcatattgcagacgttttctctctttcttctgctgcttgtaaagaaagagtctaccaaccacgaaggcttaaagaagatatataccttcaggttgcctctttctgcttaacgcagacctagctttgaatttttgatacattaatttatttttttatagcctttcatgacagtagatatactgtttagtaaatgtaccatacaagaagcaaaattagtttattctgtaatgtgtaaaatagaaaataagagcattttgtttccttgatgtatattaacgaatttagttcattattaatgatctttgatttgtttgataattatagttatttttattgcaaactacacatttatcatttataataatgataggaacctaatactattattgtttcgtttacttaacagatgtaatttattgacattcatcaactcaactgtaaaaagggtttaaagggacaaaaaaaaaggaggattataaccaaccttaaaatataatagtttgaagtaggaaattgagtagagaggaatttccaaaactttcaaagaggcaaggaactaacagaatagagggaaacttatttatgaaattgttaatttttaaactaatcttctacaatagtaattcaagttcagattatttctcaagttccttgtaattgcctccaaacaagtataaataccatgattcgagagtagcttctgatgagtatcaatttcaactgtctgtccctcagaaacaacagccatggtgtctgctgttttgacagtggacaatgagctatgacaaagacagacggtgctttccttcattagagaatccaaggtatcctatttagtattaacacaaaatttgaggcaatatttgcaaaccaattaaaatacaagttttagttgtgtattagcctcatttcatgtcgagaaaaagaaaatcgatttttgagaaaaagacaaattgagaaaattagaagggtgtatgtcaaacttacctgaactagatattcactttgagcatcaagagcactagcagcttcatccaaaaagaaggcttcttgagttcaccaggaaggcccttgcaatagctactatttgtttctgacctcctgagagcctcactctcccctttctccaacaagagtttgatatttgtcaagaaatgttgagataaaatcatatgtgcattcgccattttctgcaatgtttatatatcagtactactattagttagaggaaatatatagatatgtgtgtgttcatatctcacagctgcattttctacatcagcacagcttgctttgcgaacagttgagaagaacttggctcctgactccaaattttgctaaataaatcagaagtaaatctccaactttaacctattaaaattgactcaattcatcaatcacaactctgcaacttcacatgctatatcaaacttcagaacatgaagcactagtgtcacaaagggaaactaagaacaaaactgcttgaaataactaaaaagaattcttttcagcaaaaaaaaaaaaaaacactaaaaagaattcttgataagctctactttttcgtttttgtaaataataataatggtcaagctttttactcgcctcgcacctaataataataataataataaaaaaaatgttttcctttttcgaaatgatattagtttagaaatgttttagggtcgaagataaagaatagttgggtgaaactagtgagaaaaattcctaattgtattaaggcattaagcagaactggcacacttacttttctatttagcatagaaagtccctcagttttactgccaagcttctttgtcaactcaagactcaagtagtgtttaacttcatataataccttgtgggtgtttttttaatttttttttaccttgtgagttaaaagtaatcaatcgcatgaaaattagcaacgccactgtagaaagaacggatactaggaattgaacgcataaattatgatccggtactcaaaatgtgtttgtttataattgcttattagtgtgggcacatattatctcttataaggcttaaggtgataagtttgaaactcagaaccaaacgtaatagactcttggtcaagtctcttcttcaatctcctccaagttctcaacatatcagactgtattaatcccttgtacaaagtttcaaaagtgactttctgaggcagaaaacccttctctatcatctccacaaaatactggcaagcctccctccacttttgcttctcgcataatccatgaatcaatgtcgtgtacgaatccaaatctggcccacatccactctccttcatatcattccaaatctctctaacactctccaaactattcagctccaagaacatagcaaccaaaatgttgtatgtatgcagactaggcatgcacaaactctcctccttcatcttcctatacaatttcatagcactttccacatcttttcttcctctaaactctttgaagaaacaattataagtcaccgccgatggactaattccgcctctgatcatctcatcaagcaactcctctgcttctttgagcctcccacaagaacacaggcacttaaccaccgaagtataagtcgccacatttggagagatacctttctctctcatttcctccaatttatcaagcgagagctgcggcttatgagcccggctatagacatgaagaacaatagaaaaacttgtcacgtcgggctcaatccctctccttttcatttcatcgaacaccttctctgcattccttatcgtcctctcaaacctctcctctggatgcaaactcgcatgcctacaaatcccattcaacaacacattgtacgtcactacattgggctcaatccctctctccaccatgtccttcatgaacctctcggccatgtcaattcgaccaatcttgcaccacccataaatcaaaacggtgaacatcttcacatcgggacacaagccgtttctccttttgttaaaaacctcagctgcgaccctcacgtatccgtacttgcaaagggtatcgagcaagaagtggaaatcctccgacgtcgttcttgtcccgacgaaggtctcgatgtcgtcgaaggccctgatcgcttggcgtgtcaggccggaggatatcaaccgtcggatgaggatgaggaaggtagtagaagtaggagtgagattgtagttcgccatctcaacaatgagctgccaagcaacgtcgtattggcgaactttagcgacgatgtctataaggagattgtacgaggcggtggtgagaggagaagggtttgggatttgcttggcgtagtggaaaaaggcgatggcaactttggaagtgtgcttgagacggaggagggtttggttgagaaggtgcggagaaagagaaattccatgtagctggagagaagattccatggcgtgataggggttgtgatggtagagaaggagcttagctactgaatcggcgtcgtttgacggctccagcgtcgggagttgatgatcgactgagaccacggcatcgtctaaatcagaagaagaacaagaagaagatgaagagaaataatagaaaggagtagcagtgagtgagcgaccaaggggggccatctctctagccagcggccattgctggagcttcagaagagtacaacctaatcgtttgtcgggaaaccagagcctcctcattttctttcctctgtaacttcacaaacaaatagttgagaaattatagtaaactgctcaaaataaataaataaattaaaagataaatatcatttttgacaatgtattttgtaaaaaatatcaattgaaccttttattttattaattgataaattaatcttatatttttcaaaatggtaaaaataagactctgagttcaatttttaaaaattttatttttttaatataacgaactttaagacaatttctaacatgaaaagatagagaaaatgtaattagttttgtcataatatctctagattatattattattaaattttattttgacaaaaaatcagtttaggattctatttgtacaattttaaaaaatacaggattcattttgttatttaacaaaatagagaatccaattaattaattttgtaaaatgtccgaaatagtatttaccctaaaataaaaatacaataatgtccttttttttttgttgaaaaacaaaacttcattaaacc

SEQ ID NO: 18056 - DNA, 4015 bp, Cannabis sativa
cctcaaaacctaaaccctaattctaattctgagagtcttcgtttgcctccacgacccttactagccatggctgaactaaagctctccgagagcaaggacctgacccgaatagagcgaataggtgcacactcccacattcggggtcttggcctggactcaacattagaaccccgtcttgtctccgagggaatggttggccaaacggcggcccgtaaggctgccggggtcattctccagatgattaaggaaggaaaaatagcgggtcgtgccgttctgttggcgggtcaacccggaaccggaaagacggctatcgccatgggtatggcgaagtctctgggtttggaaacccctttcgctatgattgctgggagcgagcttttctctctcgagatgtccaagacggaagctttaatgcaggcctttcgtaaggccattggggtgagaatcaaggaggatacggaggtcattgagggcgaggtcgttgaggttcaaattgatcggccggcggtgaccggagcggcctcaaagactgggaaattgacattgaagacgacggagatggagacggtgtacgatttgggagcgaagatgattgaggcattgggtaaggaaaaggtgcagagtggagatatcatcgccattgataaggcttccgggaaaattaccaagcttgggaggtcgttttcgaggtcaagggactacgatgccatgggaccccagaccaagttcgtgcaatgcccagatggggagttgcagaagcgtaaggaggtcgttcactgtgtcacacttcatgagattgatgttatcaatagcaggtatccttggttttcatagaatttatccaccgatatgaaatgagctctttttgctcataatgccattgtactacttttcttgttaagtcttacgatttgtgtgataatcttagatgatttgagctgtggagaccttgtaggaaatgtatgatttttagttaattctttcctttacctatatctgctcaaatgtatagttgttcttgctggccttcattactctctacttaacatatttcatacatatggacaatgctagacaaacactctaaggaaaaccaacaaagcaattaaaaaagctcgaatataatttgctgattattcttgaaaatttgatgggctgcaatgccaatgattttaaataccatacactgaagcaatgtttcattttctagttccaggtgaaagccctataaaggaaattgattgttgtaaaagctgtagacttttttttttcgtctttttcttcaagtttggctgtaattgtttcttcaaatatccatggacttttcctatttcaatagggtatcttatttcaccatttgtgttatctcttgattcattgtttttacttggctttattctcccatcattaactcttctctatttcagaactcagggatttctggccctcttcactggtgatactggtgaaattcgtgcagaagtgagggaacagattgacacaaaagtagcagagtggagggaagaagggaaagcagaaattgtaccaggtgtcctctttatcgatgaggtgcatatgcttgacattgaatgcttttcgtttctaaatcgtgcactagaaaacgagatggcccccatattagttgtagctacaaacagagggatcactacgatccggggcacaacttacaaatctccacatgggatccctatagatcttcttgatcgcctactcataatctctacccaaccttacacagagcaggaaattcgccagattctagatataagatgccaggaggaagaagtagatatgtctgaagaggcaaagggtttgttgaccaagattggagtagacacatccttgaggtatgccatcaatctcattacttccggctcactagcgtgtctgaagcgaaagggaaagactgtcgaattggaagacattaaccgtgtctaccatctgttcttagatgtaaagagatcaactcagtatctaatggagttccaaaatcagtacatgttcaataatgaagatggagaagaagatgaggttactgccatgcagacatgaaaatttcttggacttgaagttgtgcggtatctattaaaattggttctactttttccaggttacaaagctttgtagttcctcatgttttagggatgaattggaggtcacttgcctagtgtagccgcaccacattgtttgtttgaaagctctagtaccatctctcatgtttcttcaatgtaatcacaaaagttctatttttattgcaattgatcatttatgcttggcaaatgattataccttttaggagctagttgaaatatactgaagaatttggcaagtgaaagtaggggacatgaacgttaaatatgaacttgtagtttttttagtacatgaaagaacactagaacctgccgtacagccaagaaggaaaagtagatggaaagacataatttaaattgagcagtagtggaagagtattcatattgggtctctctaatacccagctgtgttctattgtgttcttgatcattttattccattaaacacctatattcagagtctacactctacatatgcttaattcccatgttcttccactttcaatctttttgtgtttgcttattctccctattaatgatttggatcttactactagtactggggtaaaatcaattgatgttgcactcaccctttgtctgaagtttgaaatgaaaggaaccagaaaattctgggaatgggaggtatttcacaatattggaggaaggaatcactggatttgagaaatgaaatgcatcaacaaaagatggccctcttcaacattaacattgtgtcccttaatgtgttttgatagaaaggagcttaaaatcattttacatatccattgtcacgtgttgcacactgggaagatgttagcaggtgaagggagttgcttagttataaataccaatttctgatattgtacgacacgattcaatacgaaaaagatatgagattggacacgatattacaaattagcacaattcagataaaaatgatggatttaagcatggcaaattcaaaggcgaaacacgttaagtatatgaacatgaatagactagtctaaaagtacgacatgttaaaaaactagataatttttattttttttatcaagaattttttttgtgtgtgctgaaattgtcccaagcgacatgtcgcctaaacttgtgttataagtttcttaatgttttagcgatgttttatcgatatatggtttgagaatatcactcccggtgacatgtcgcctagtatcatttttgtgaaaaacgttgtaaaatattgggactttatggggaatgcttctataatcaccaacgttcttatctctatttaacatatttcggcgggtaacattcatgagatgtgtgatatcaaatgtgaattataaacactatataagaacggtctaaagtattcatttgtgtaactaagttttctatcaaaatttttgctagaaaaccttaagacttgataatttcaaaagctatttatcagagaatttccatagtgcttagagataggggaaataagtttttcgacaaatgtgttataccttgttcaagtcatggtgatctccatcgttaagaaaaaaattccacatttaaaacattaaaaataaatgcaaaatacaatttcacctatgttaaattcataacataagagtttattaattttatgttcaacctattcaagattataaaaataatcttttaattacaatcattttaattaaagaaaatatatttttattctaatgacagtggtattaaataatttgagtaaaatttgaagtaacaattgaactcaattgacctcacttaagatttttgaagtgaaacttttaaagtgaatgatctcatttagagtttggatagagaagtgtaaaatgttgttttatttaatattttaacattatttttgtcttccctcttacttttaataatttattgttttatttttgcctatc

SEQ ID NO: 18057 - DNA, 11891 bp, Cannabis sativa
  modified_base (11257)..(11259): a, c, t, g, unknown or other
tttcagtttcaattttcaagtggaagttttgactctttgttgaaattgaattggattattactattgatatacatgttaaaactatttttttttctaattatttattgctggattttagccttgaataactctaatgtatacaataatgagttaggagttttattttttcattaaggttttgttgtctaaacttttggagacatttaatatagcaacttatagattggctaaacatatgttctttaattggacaataagtttttttgaatgaaagaaacctccttcttccatatattactcaattctagtacaatttcaataatatatggtaaatataaaaatgtaaaattttaataatatatcataaatataaaacgtaaattttaataatatatcgtaaatataaaatttaaaatcaatcaccgagacatctatgatattatatatcgtatatcgtatatcgtaaatatatacacatgatggtatattgtacacgtactatttaaatttataaacatacatgcatacattaattaagttagtacgagtactttgttgtttttatcagcataatttgcatgttttttcatttaaatatatagggtgcacaaaatttgagtttatatgcttaattttattagatgtaagtaaaaaaaaacactcattttggcttgaattattccatctattgagagaaatgaaaaaaaaaaattaagtttgattgaaatattttgataaacacatatttttgatataatgtaaaaaaaatattttttaatatttttttaatataagttattaaattttaacttgaatatttttattattagttattggattaaaatttaatggtttattatttttaaaattgatattcattgcatgttgcttttctttttttcttatataacaagcataatattaattgggaaatgttatatatattctttaatgtttattttaatattattaatatatattgaaagatattgtttaatttgtctacaaaagaagcaactgtgtttttatagaaagacctgagtttgtttccattaaggatgtctataaatatatatataatgttatatctacatcgatggattaggacaatctctctctcataattaagaactcaaatgaaccaattagaaagactaaaagtcatcgtctatactatataagtcccttttctcatactgctattaataacaattacgtttgttgatccagatcatgaatattattatatatattatcatcgcttaatgattgtgactcacctcaactttgaattatagataatatacccataaatatacatactgccctttcccggtttacatatataaagatatatatatgtatcaccagtcactactactacttaattaatatatataaattatatatgagagtcttcaaattattaatcagcatcccaaaaaaaaaaaacagacggctatatgtatgtagagaggaaggattacccgtctacatcgatcaagggaagagtaattaattattattattattttgaaagggagagcgtaattattcatatacatcgtaattaattaattatgtttctaaaaattataaaaccaatcaatcaattttaaaggttatggatttcgacgtgtataatatatattcttaaataataatataatatattacgtaccaattaaaataatatatagtaaacttggtatcctcttattactagctaacactgattaaataatgtaagcagtgattgattaatttcaaatcgagattattaaatttgctctcacaactttatatatatacatatacatattcagagtagtaatggacaatttggatcatgattacatattttcttacagttattaaaaataatgtaaaaagcacaaagtagtactaaattgagtaatcgaatagtatatatatatatatatatatatatatatatataaagctatagctatataaacaattacttaattatatttatatgcgcgggcatgctattagctagattgatagatatctctaataattataaatttgatgatgatgatggatcgatcgatgatgacttaatttattaaacaataataacatatataagcttcattaattaagttgttgatgatgaggaggaggaggaggatgatgaggaatgatatcttgagccgaagaagaaataggataattccagttaagtagttcttcaatcatctgcattgcaattttatcctcttccacattcttattagcttcagcaacagtcacgtgatcaatatcatcatcatcatcatcattatcattatcattattattgaagatgatctcctgatccgtacaattactgccactcccaactctcgttgacttagtcaacttcccaatatcatcatgatcatgaccatcaccatcatcccaatattcttgatcaagatcatcattaatatctgaaatagtagtagttgttgtagtagtagcagcagtgttggtattggtgttggtgttggtacttttgttgtggctgccgagctcaattctcataacccaatcagagccagcgcgagatccagcgcgcttctgccacacaccaatgtgtgaattgtcgttgtcgagtctaagacaagtgagggaaggagaagggtctttgcaacacttccttagcttaatgctaagtaactccgaaagggcctttgggcacaacggtcctgcaccaccactaccattaataatattactctcttcttgttgaacatgatcatgatcatcatcaccacaattactagcactagttttttgaggagaagggaaattggtcttagcattttgaccattcatcaatatagctgcctggtcgtatgcccgagctgcagcctcagccgtctcaaatgtccccagccacacccttctcttcctacatacatatatatatgtatacattattattattattattattattcttgtgtatatattgatacatttaactcattcacctactagcgtgtgtgttgtgtatattgtaataaagaaggttggtgaatatatatatattttacaagacttacagtaaagggtggcgaatttctgacacccaagagccccactggcgttgcctgactcctctgaattttctggattgtaccataatttgattagagagagagagagagaaagagagatgatcaacttggcctggcctggcctgaggggaagttttgcacagagaatgagagagagagagagagagagaaagatataattttggttgataaagtggaaataatgagagaataagagtaagtatatagtagtgtgggaaattaaaataaaatagagtagagaaattataattaattagtagaattaatattaatgtttttattttaatggtgagttgggttacatttaagtgaagtgtcggtggatttgtcgggaagtctatctcagctagctttaaccaattacttttcttctgcaataaaagttctcacccgctcaactagctatggactcactcactttctcttcttatttaatgcatgttctctactcacttcaacatatataattaaatttatttatatattgatataaaagtacacagaaatatcatattcccaatagccaaaacaagagaaaatatgttatatatgaatggtagctgtatatcatgtatatgcgtttacattattatcattgttatgctatgtatatatatggatgaagagaagagagtgacttgacaaatagcaggaacaattaacttactatcaattcaaaaaccatgtatttttgtaattaattaatcatgcattgatctcataatatataagagacagaaatatataatctccaaaccagaatgacagcaccttttaaaaggccttagtataaattaatattacatattcaaaccaataaatatatctatgtacaattacttttttttaggcataatcgtatgattatatatagatatatatataacgtttttatgttaatacaaattaattgtataagtaaagaagaatatatcctaaactgtaatgccgaccattcattataaatatatatatgtgcagtagtaggtaggttggttggtagtacgagtacagtgcagtgttgcgtcgaattttcgtacgttgacctgtaatagtcttccaagtgtcttttatataatttaagattataatcaaatcatatactatagattaatgataaaatggactagtgaggtctaatacttttgtaatattgctatttatataattaaatagggatataatttccgtgatatacttttacggaatgtattttgtggtacattagatgggtctcagggtacattagatgagtgtcagggtacgttactattttttaaccttaattacccctagatcaatctcagccctcagatcaaataactctctcatctaacggtacaatcacaggaaaaaaatcatgtccctaattaaataatgggttttaccgttttacataatttaatttttatttcaaaaattgtcattctaatatagttgtattttttgatttggtgttgtggtattttttcgattttgctaactatggtgataactattaataatgggaaaatatttactccaatgtgatggggtgttgttgaagatattataattttattgtttaaattttggaaacgatttcgtcccatatagctcgcgataagaattctgcagcttatgattggcaaaacatgtccttcagttagatgatgagctatcctgcttcaaggaggtttcaccgccgattgtgatttgcttcattgttaatcatgtatgactttattcactacgtcaaaaaaaaataacgggtcttactgttccacataatttaatatattaacttttataaaatatcgctaactaattaaaaaaaaaaaaaaagtattgttattgagcattagtagtgtccaacacttttataagtgacgacccatgattagttagcgatatattatctaaaaataatttttttaagttatataagactcaatagttaattacactatgaaagtgtttagtaccttttaagatttctctttaattaatttaatattataaaaagaaaattatcaaccatttcttataaaaatagtaagaatcattaatatctaataataatactttatattaaataatttaatatgtattaaattatttattagtaatcaactcaactgttattgcagtgtctgcaattgttgacttatctctgcataaataagattttcatgtgtatataataatatatagttgctttctttacaaattacaacctttttcttcataattatgaaattatattatgaactatgaagtatgaataagacatggatggaccactattgaattaattgacaaacaaagacttacaaaagataaattaagtaattaaaagaaagttatatatttgtgtatacaccttcaacaactaaactgttgcatgtcaaaatattactgttactgactttgatatatcaatggacaaatttctctttatttcattgcttggattaacgaaaataatattaaccaaattgacagttttttaatttaattttattcattatatgaactactactttgtttgcaagtcggttttagaattgtttcctaactaaactaagtactaatcaatctatatttattttttccaattaataaatataaaagataaatttgtagtaattaaggaaaattaaactctcgtcgtgtactcaaccaaatcaacaacattatagtattatttcttaatttatttggttattgaaaccaccagtatataatatatattgacttcttattatgaataataataatgataaatatcccataaagacaacgtttaaaagtttcactttttatttatttaattttctttaattatatacaaactacattttaataaataaagaaaatttgggggcttttggtccttggctagtgcctaccttcaaattcaatgcatgtgggccgaatgacggttattaagccgcctagccctaccttagtagcccacatttgccactcaattaattatgtaattaccataaataccctttttgtgctctttccgtaaatgactctaacctggttttgttttgaaaaacaaactaaggtcctaattgccaacaacttttgtaattttaaaaaagaacaatgttaaaacgttacttatataatttaatataataattttaggaaatttacaaaaatattaaaatttaagttaatttttacaaaaatattatcacgaaattttttcaaaaatattatatttttataaaacaacagtggaacacagaacaaaacaattaaaaacaacaatggaacaactaaaaaacaatcgtaaaacaacaataaaaatttaacacagtacacagtataaaatttatacagtatttttgaaaaaaattctgccccatagtaaaaaagtaaaaaaaaattagaaattgcagtatgtggtgtaaataatccataatttttaaagagtaccattatccaattgtaagacgacatgtctaaaaaaaatgctagccaccactagtgtccaatagtaatactctttaaaaatatatgacatggttgatgattaatatttgggaaattttattcgtatacagtctaatattttaaaaaaataaacttaaaataatttttaaaaattacctttaatatttttttaaaaaaaaattctttctcacattattttggattaattttaataactttttttaaatcatgtagaatattttttattttttctttctaataaaattttatgtaaacttcttttttgttaaaatatttaaatcataatttatttttgttttataggtatattttttaagaatataaattgaaagaaaaacaattaaaaaaattaatataataaaagattttttttcatttatacttttataattaattttttatttatttatacagtgagatgaagtttaattcacaaatacacttttttttgtaagtatacgacttcttcctctcttccacttctcacaacacgatctcctctcttccattcttttcgaatggattttcaattttcgaagaaagggatacgattctttcactcacctccatatcgcttgctcgtcgctacttcgaccaaccactataggtgtaacaccctactagattaggcgtgttatcgtgatttaaagctatttgtgtaatctgttactaatcaacatatttattgaaaacatatttaattaacctttaattgaaataaataacattatataaatcgagatcccgcatttaaaaagttacaactgtttacaaaacagatagctacaaaagttgtcgcctagcgactatcaaaataaagcttgctgccccgaagaccgaacactccaggtctaaccacctgatatgtacaatcttcatctgcttgcacccactgctactcacccttagccttgcccttacctacacatgtaaacaatatttgtgagccgacagactcagtaagaagaatataatcatatcataacttaaaccagatcataactaagtgcccatacacccaatcataaccctatctcgcgtcccacacgtactgagtctagaacgttcgtacgatagtactattaatcataatatcagcctatactcagtactttagtcgtaccgatgtgatagcgtcaatcagtactctaccaaacatataggtgttggtattcagtgcaactctatgtacactaatacaaatatttttaatatgtcaactaacatgcatacataaacatgcacgttaaacaagtaataacatatgcatatccttatacttatcttatctcgattccgcattcaagtgtgtcggtcaatttgaatggaactgttgctcgacggttgacatgcccctaagttgcaacatacgcaaaatgaataagtgatacgctaaatcacttttcgaaacctagattcaaaatgaagagtttccctatcaataaatagcgtgactaaaacctaaataacgagaaacactgaaaaataagatttcgagaaaaagtaccaaaaaaaatggcagaccctcactataaaaacggaaggctattttggtttgccatttctatagtagaaaaaaatccaaattctcataactccactccaagcattttcaaacttaaccaaacaatccagggtacctatttaggccataatatgcataaactaagtgaaaatttcatcatcaaggcaaaaactcaaaatctaccatcaaagagccaaatttgagcttcaaaagctcaaacctggttcaaacctacaacagctcatagaaccaccgtaaaataactcaatcaaccttaatagaacataaacaacttaattttaatcaacacaagacccaacaaaagctagaactcgaatttgcatgttgaaacctaactttttcttaaaatacaaaagagagaagagtaaaaacttaccttgagctaattctaacctttgatacaagaaattctgttgaaatccctcactcttgatcgaaaaatagttgagaaaatgcatcttatggatgtagtgacaacttacttgtacagatcgcttgataatgatatttatatgaaaatttctaaaagttttaagatgcctgaagcactaagctttaagcccaaagagatatgttcgataaagttacagagttctctttatggcttataacaatccaggggcatgtggtacaaccgcttaagtgaatatttattaaagaagggatacaataataatccaatttgtccatgtgttttcattaagaaaataaaattaggatatgtaattattgttgtctatgttgatttaaatagcataaggactgataaagagttacatgaggcaatattgaagaaagaatttgaaatgaaagatttgggaaatcaaatattatcttggcttacaaatcgaacataccaacaatgagataatatttcatcaatcaaacaacattgaaaaggtcttgaaatgctttaatatgataaagtgaaccctttaagtaacccaatggttgttagatcactaaatattgaataggacctgtttcgtccttgtcaaaacaatgaagagatacttggtaatgaagtaccatatcttaatgcaattggagctcttatgtatcttgctaattgtactcgacctaatattactttcacagtaaattttttatcgaggtttagttcatcacctactaagaggcattggaatggaatagaacatatatttcgttatttacgaagaattactgatttaggtctatttttctccaaaagctcaaactaagaattggttgggtttacagatacacgttatttatcaaatccacataaagctagatctcaaattagaaacgtgttcacttatggaggcattgcaatatcatggtgttctcaaaagcaaaatcttattgctacatcttcaaatcatgctgagatatcgcactacatgaagctaatcgagaatgtgtatggctaagatcagtgagaaaacatatttaaaaaagttgcagtcttttgactcataaagatctgaccatattatataaagataatactgcatctgttgctcaaataaaagaaggttataccaaaagtgatagagccaaacacattcctcctaaatttttctcatttacacaagaacttgagaaaagaaatgatctaactatctaagtatacaatacattagatccactgagaatttatcacatcttttcacaaagtcacttcctgctacaattttaaaaaagttgagacttggtattggaatgtgtcatctacaaaatatgtgaataataactggcaatgtcattgtgagggagagctttttcaactgtactctttttctcttataatggtttttttcttattggattttacttagtacggtttttttaacgagacagtattaattataaacaaattatagagtatactaagggggagtgttatgaatgaccatatagtatagaataagtagtaaactccaaatattagtactacaataacagtaatagttagggttgttcatccggtccattccatacttttttgtttaaacaacatccaatccgcactaattgcggattttatattttggatccaattcgattcgcatagtagcttaaatccaatccaatctaatctgcaatagtgcggattgggttgattaattttttaacgataaattatttaacatttcatagaaaaaaattaaaaaaaaactattgtttcttaatctccaataataatctattcccatctctattcatatacaaatcaaaccaatatacatatatatatatcaatatatatatgtactcatctttagatttacactaaaatatatatgtatccattattaaaataaataagctagtatatatatatttaaatttatgtgtatgtgtttatgtgaataaaaataatttactagtatcttctattataaaacaaataaaatgcactaactcaatatattactaaaaaaagttaaaaattagaaatttgtattttttttttttaatattactaaaaaattaatatatattatatagtatattttttaaaaatatatataatcaagtattgaattttatcggttactttttatataatcaaaacaattataaacaagtattttttttgtttagtggacatccattcttctattatgatgttatagatatgtgtaactgttaaagagtgaaaaatagaggagagcataaaagaataccaaaacttattacttatatttatctaaatttataataattttaatatttattttatttttcattcttccatttatatatgtaaaactctattcgtattgaagaagcccacagctagatgcaactagataggttatatatgtcagatctgagcatgtgtttataacatactttatggatttgggctgaagaaaatgagctttgtctttgggcttcaaattacacaacaatttctattgagattatttcacaaatacacaaaaataataaaagaattacaaaaatacaattttacggaattttaaatatttttacaattttttttttattttatttacataaagtacagttttttatgttgtattcttgttaatttgttattgattttttgttatatgtatattattttttgttgttattttgatattatttagatgttatttttatgtnnnttttatgtagtttttttttttgaaatgacttttatgtagcattttttgttattttcatgttatttttatggaaaatcgtaaaaatataaaaaaaattctttaaatataaaaatataatttttttttacaaaaaaaatagtactttatataattataccatttctatttctctatttcctttttcttcattttatttatgccaaaatgcgacataattattggaaactaaacatattcaaattaagtattttcaatataaaaatataatacactaatttcatcaaaaactcatttttttttttaaaaaaaaaaagaaaacatcaataacttcaggtttatttgtaccgtaagtccctaaattatataagtgttggcaagttggaccctaaactttattttttgacaaattaatctcaaactatataagttttaacaagttaatcctcaaattttattatttaacaaattggtccctacacttttattttcttaaatacataaagtcccaactcttaaatattggtaatttatttatttatttatttagctttgtatttgttatagtgagatttctctcacctagaaactcgagaccggactcctctttaaaaaggacacgtgtattcagattc

SEQ ID NO: 18058 - DNA, 2687 bp, Cannabis sativa
cctcaaaatggccaccaggaattttcgccctgatagcgttttaggggaaggtggttttggttcagttttcaaggggtggattgatgagaactctttcactgctacaaagcctgggactggcatggttatcgctgtgaaaaggcttaatcaggatggctttcaaggtcataaagagtggttggtgagttgattttatctcactttttagttaacaattttgaaaagactagctcgttgttgtacaatgtcttatgtttatttggtggacccttctggtttaggaaaggtggtagtgaaacaagcctgtgttcttcttggattgaggatgtgtactaacttgtcaatacttgaaacaggaacatatctgagtaacttgatactgtattggttggatattgacgacagattgtctggttctacaggcggaagtgaactatttgggacagttttaccaccctcatctggtgaaattgattggttattgcttggaagatgaacacaggcttttggtctatgaattcatgccacgaggtagcttggaaaatcatttgttcagaagtaagtttcatcaatcacatttgtttactcttgtaacagtaaagataatgattattggcctatctagtatggatttaatgacgactataattcttcctgtatcagggggttcttattttcagcctctttcttggaatcttcgtctaaaggttgcccttggtgctgcaaaggggcttgcttttttgcacagcgcagaaactaaagtgatataccgagatttcaagacgtctaacatacttcttgactcggtatgatctcaaaaagtttctggcatgtagaacttttgttatgatattcatatatatgatcagtttggtagaatatttgaatttattctaagaactatatcttctataactccagaactacaatgcaaagctatcagactttgggttggccaaggatgggccaacaggtgacaaaagccatgtctccaccagggtaatgggaacctatggatatgctgcacccgaatatctagccactggtaacgtattttccttaactctactgctcactgatttagattgtgattatctttggttcaacgctcttgatcttctatttcttgaaagttgaggcaatcaggtttcctactactaataatgaatctactttcataactgcctgaaggtcacctgactgcaaagagtgatgtattcagttttggagttgtgttattagaaatgttgtctggccgaagagcagttgacaaaaatcgaccatcgggagaacacaacctagtggaatgggctaaaccctatctggcaaacaagcggaagatcttccgaatcttggacaaccgtcttgaaggccagtacttgatggaagtagctcataaggcagctacacttgcattgagatgtctatcaactgaaggcaagtacaggccgaacatggacgaggttgtaacagctttggagcagcttcagagttcccaggaaactgttagcaaccagaataattcaagcaacgaatccaggacaaggactcgtagacgaagtgcggatgatgttagcagtaataaaaagaagataaacagttcttatcctcggccttctgcctcctcactctatgtttagaaatgaagtatgaagaaatttactagatatatatggttttcctttgctcagttgaaagaaaacacaaaagaagccaaagaagctggtatgcaaacactgtcatgaacaacacacatacacgtatattctgccttgcggctgtacagtttcttacgtcaaattaatataatcaaaagccatgtttgaggcagtcttcttgaacttgtaacatagcaatggctcacctcataatgctgtacgtcttttgtttcttttatttttttaccaattgcttttgaggaaatagaaggggcaattgttttgtatcatcactattgtttaataacctcttatttttccagtctggggttcttctatgaacaatgcatgtctttttttcatttttttttcgtgtgatgttgaatttttttgctctctacacaaatggacaaaaacagagattaatgaataagcttgtgaatttgatattcactcacttaatctacttcgcatacaatgtgcaataattgtgttgaaaccaatcatcatattaagtcaattaacaatgccagattatcaagttagctttaacgaactctcgaacagttacaacacaagtcaaagaccctaacctactcctttatattttcaaaactaaaccaatgtaatagtaaaagtgttctacataatgctactaaaaatgaaatttttatttttattattaattaaataataataaataatttttttccaaatagtagtgttacactacaccagctcggtacagccggacagcgtgcgggtgtggcaagtcatctgtatccttacccattagcacaaaactagatatctcttgaggtcttatctttagtgtcaaagttactctttatatacctttataaagaaggactcatatctcatgtgagacattctattagacactaagactcattttgtcgaaattcattaactttgagaataagttcaaacaaaaaggcatactataaatacctctcttggtaatagaaaagatagagcttgaactagagtggtttagagaaagattga

SEQ ID NO: 18059 - DNA, 7456 bp, Cannabis sativa
  modified_base (2620)..(2620): a, c, t, g, unknown or other
  modified_base (2751)..(2751): a, c, t, g, unknown or other
  modified_base (6677)..(6705): a, c, t, g, unknown or other
  modified_base (7012)..(7017): a, c, t, g, unknown or other
  modified_base (7424)..(7425): a, c, t, g, unknown or other
tttattattcttttaaatgattatgcctttcttagacttatgctcttatcaaatgataagttccatggattataattgtgctcaagcatttttaagatctcaacaaatgctgtagtgtgataaattgtggatattgactgtcatgagtactgatttcatatattagcgtgtgaagcatttctctgtgtcgacactgtacaacacacatgggaactggcaatctgtgtagaacacatcttaagttattagcgttggcttatttatttttatttttgtatttatggaatttgttgtttatttgaatttactgatatcagtgacaattgtagtgtcagtgtattgaagctgtcaacttgttctcaaaatggtttaggattacaatatactttatttctcaacatttgtaaaaacaaattgacagcttggagaacaaagttaattgttcaaatgatgtattgtttaaaataatacagataggggcttttggtagggttaatcttagtatgggaatgagaatctctaaacattgtcttgtttattacaagttctgttttttttttcttttagaaaaagtgaattctatggaatgatgtactttatcgtctaagggagtgatcttaaactcatctaacatgtgggttttggattctttctgttttatacatgtgggatccacatatattaactaaaagtaacaaattataacattcttatgtacaccccttggatcaggagatagaaatagtcgtatgctatatctctgatgagtatttcttttttcccatcaccctttcaaatctgaaatcattcgacattttacaactttgaagcttagctgatctagtaggaaataggcagtctgattcctgactccgaacattataggctttcatggtagtttccctatctttcactaacttaactttggctcctctattcatgggacataggatatgatatggctccttaatttgaacctgaaattctttgacactttgatagtttaaaattttgatgccttggtaagcttggatgacctagttgggtattggtagtcttactcctggcaatgtaggcttccatgatacttgtctacatttcaataagggacattagcatgatttataacatgtattttatgcatgtgattcaataatttacattattttttttttttgaaggaaataatttacaccaattttatattaaccattgaatgtgataagtaattttggtcatttttgttatggtttatgttttttcaaaagatttgtctcagcttgacagaactaggaaacacgggtacttcaactgtctaagaaagctacattgattagctagttataattataaaagtaatgcatgtattcacaatctacactacctgttgtttggtcatcatatgatacttgagttgatggactaggatacctttttacttattttaactgttaccataaacttttacttgtgctagatgaagatgctgagggaagtaatttgaatcacgagactcaggacagcagttcctctgaggttgaggagagtaagttgtcattacagttagcgattgtaggaaggcccaatgttgggaaatcaacattgttgaattcattgttacgagaagagcgagttttggtgggtccagaagctggattgacaagagattctatcagagctgaattcaaatttgaagagagaactatatacctggtaaataattttttttttttaaaaatattattatcctttcttaatcaagtttggacctctttctgattccagtaatatggatccttccattcatcaatattttcacattgtgatattatatagtgctttgaggtgttcaatttctcttacaaactgcctgaacccaagtaaaccacaagaaccaaaccaaaaaaaccgacaaaagatgaaattcaaaccggaataacccaacgaaaacccaaaccctccaatgctggttgcatattatcctaatccgcccaatacaaactgctaaagatgaaactttctaataccttcctttttgggaccccatgaatattctaacttagtagtatttaagcatccgtacatgaaattttgatgaatttgaaagaaattgtattgagaagtaatctgtaatgaatgcgcgaggcatcaatttgtgttaaagagtcctgaatattgaactgctcaagatatcatcttcacatctttgtggaaattgttcttctttttgttgttgtagatgtgaagaggaaaaagaattgggaaaacctaaataggaatcgatttatttgtataggtaggactatacagactaatctacataaatgttaaaataaaaatctaatcctgtaaataaggaaaatatgtacaaatagaaataaacatctaatatcaaatctcattacatttcctatctctcaacaaaatgacatcatcaagcaagctgatttagcaattttttaaaataaaaatcattgaatattatagggattatttcacaaatacacaaaaataacaaaaagaaattacaaaaatacggtttcacgggattttaaacatttttacgatttttttgattgtatttacagaaaatacggtctttttatgttgtactcttgtnaatttattgttgattttttgttatatgtatgttattttttgttgttcttttgatgttatttagatgttattttcatattatttttatataatatttttgttgtttttataaaaaaccgtaaaaatgtaaanaaaattctttaaacgtaaaattgttattcttttacatggtgctttatgtaattattccaatttatataatttatattagagattaccagtataagattgtactttgccttggtccaccaaccccacagtcccataacaagccttgtaaaatcttttgtggctggccctccatgttaatgttggaattggtttttaaaatcatttttgaggtttttaattttattcttttagttgaaacgacttcaggattttccatttcataattgtagtattatttatccacataatacctcagggttttcaaaaattgtttatcaagttgaaggcgtgattttctcttttagaagctagatatccttactacaagcaatgtggaatactaactctattttatggcagggaattatttacttttttcccttctttttggatatagtgtctctatgccttacagttgtgagcaagtcatagttagaggattaaataaagttgttttgttctgttttaaagctaacataactgttaagacttgtaatgcatatttttacaagttttgcaaggtcgccaggaatccattgcactcaatcatatacttaaaagtgatgtagtcattgctcgttctgtttatgttctatcttccctgtctgaaacaggtctattagtttggatttagactgaatatgaatgtatctttccatatctaaatctaatttgaacaaaaaaagttgtatttaagtcttgttcatctgttgtggctttctgtccaggttgatactgcaggttggttgcagaggtcaaaagatgagaaaggaccttcatccttgagcattgtgcaaacaagaaagagtctaatgagagctcatgtagttgctttggtgcttgacgccgaagaggtttgttatgaatcttctttacatttgcagaatatggtgaactgacggtatttaaaagaacatacactcatgcaatcaatcttgtgataattatttcctctaactatgcaaaatggtcttgttggatggagtgtcaacatacgggatatgataaaagggaaatgtaccttaatggggacaattttttcaagtacggtcaagtattttcttttattttacttatgtttttcgtaaaacttttcaaggtacattttcaggcatttctatgagtaattggagaaaaaaacaaattacgttttagactttcttatttcaagtgcaagagaaaaccattagtagtttcccaagaataactccgataaaattatgagcaaagaagttgactaccatttactaattaatgctctatcaatgttctttagaaaacttgttctattctgatattcacatttgtcattgctataattaacagattgttaaatctaagagaagcatgactcatactgaagttgttatagcaagacgtgcagtagaagaagggcgtggtttagttgtaattgtgaacaaaatggatttgttgagagggcacaaaaattccaccttatataagaaagttatggaagctgttcctgaagaaattcagactgtcgtacctcaggtatgtccatacaacactttcaatggactaaatgttcttctttttcacaagcattagtaaaatttctagtgttgggaaagtcagggtcctcgttgaccttttgaacgttattagcatggccaagaccactgatgctgtcactattgtattaattcttgattataagattgtaaagattgagaagcattaactctttacatagatcattatgtagtagcataaaacatcataagacagaatgtttatcgtacactttaccagaacatgtatatgttgttcccagttttttcttgcatggtggactttgctttgaaaattttaaagccatgaactagggaattggtcggcaaatattagtcatacgaggaaaatagactttggcagggctaataatatctgacataagcacaactataaggtagaatacatgagcaatcaagaatttatttgtgttaaatattttatgcatgcacaaagaatccaaaactttacttatagtatgctaggaatgataaaaatagaaagagaatgatttagggttaacattgttttggaacaggtgaccggaatacccgttgtatttatagctgcagtggagggtaagggcaggatggctgtcatgcaccaagtcatcgatacatatgataaatggtgtttaaggttgtctacagctctcctcaaccgctggttgcgaaaggtcagctagaaactttcattttatttaaatctaaaatggttaaatgggtaatcaactgtgtctccataacatccctatttggccaggtcatgagcaggcattcttggaaagatcaggctgcacagcccaaggtcaaatattttacacaagtaaagtcgcgaccgcccacttttgtggccttcgtgagtgggaaaacgcggctttcagatacagataccaggttcttaacaaagtctttgaaggaagactttgatttaggtggaattcccatcaggatcatgcagagaattgttgaaagaaaagcttcagggagcaataacaagcctaccaagtcttatggcaaaatggcagacagaacctggtctgacaagagaaatgcttctacttaactaacattgttaggttaaacaagggcttatttttgctttccctcctgtgaagttttgaatatttttgtatgggagggttacagttattgtagttctcgtgtatgctgctgtaaggtagctttgttcaacattagtacaaaaaatcaatgcaaatgatatagttcttgtattgaaaatgtgtacattccaaagtgcaaagtagttgggtagaaacaacccaacggaacaaaatttggagtcccataatgttttactgtttatgtgatatggtttttttcctctgcattgatgatttgagtttattcgtgtgggttttcaatggtgtcaactagttattctctacaagatatcagcttgaaggataaggaaaatggaggaattgtctatgtttcggttgcggagatggacggagtaaatggttttggttgccattaagtatggaagagtagtaaccttttgaattttgattattttgcggctattattggtcattcgagaaagttttgtgatagagaagcttttgggtgtttggatgagataacagcacaattaatagttgaggcatggtggtttgaatttgcggcggtcaaaatattcaaaatattttgttgtttgtttttttactatagtatattttatacttttttttaacaattagtatttttacctactgaattttcgctactactttaatcatgttccttaaaatatacagcttgttaaaaaatctccttaaaatataatagttacataattatacattttctaggtttcgtttattttaccgttaaaaattaatatttttacaatctgaactttgacaaaaacaaaatttctctccttttattaaaaaaataattttaaaaatttaatgttctattaaaaaaattgataaaatattaaattaattaaaaaatattaagttcacttaaaaacctaaattattccttaaaaaaatatattttcaaatttattgtattcataaacatgtatcctaaaaatcaaaacaaaattattgaaaatccaataaataatttaaacaaattaagatttttttttttaagaaaaaaatcaactttatttatacttataaaatcatattttaaaaagtaaagaaaaataattaaaaattcaataaaaatataaaattgttttgaaagaaaattagaaattaaaataaaaaaaatgttatgtttacttatagaattgaatcccaactaactgcccctagcactcatacacagtaaaatagagttacagaatcaagaaattgcacgcttttggaaatnnnnnnnnnnnnnnnnnnnnnnnnnnnnntacctacgtccttctagggatatgctattcagatggctactgacattttaaatgttgtgttgttcccccctaagacacctttatttagaattatggaatggttgtatacccaatttacgccattacaaaatctgagggtgccctgctcatgtcttaagaaagaaagatggcaaactagaaaagtgaactgaagtttgcattgcatgtttgttaaaacttctattctaagaagagaagactaggggtggactattttatagttgtaaggatgataaagtgttcatttctacaaatgctactttccttnnnnnngactatattaagaacttcaagctgtaaagtaaagtagtattggaggacatgctttcagaaataactccaactaatgttccatcatcttctacttaatagaggataatcccacttcctcaattgaaccaatgcaagttgatacaaatgagaaatctcccactaatgttcctattcagaaggtcacgactcctcgtcgtagtgggagggtttccataaacccagctcgttatagcttggatggtgaaattaatacggtcgttagtgacgatattgataaacaggcaatggcaagtctggaactgaaataatggtcaggtggcatggtttaaaaaatagattccatgaaaaagagtaaagtctgggaatatgtagacgcacctgatgattatcatccaattggatgtaanngggtctacaagaagaaaagaggtgatggtgg

SEQ ID NO: 18060 - DNA, 2064 bp, Cannabis sativa
  modified_base (30)..(53): a, c, t, g, unknown or other
atgatagattttaaaaaagaaggtaaaaannnnnnnnnnnnnnnnnnnnnnnntatagagtgtaatttcctctatacttaggtttcaggagaaaaaaaagggaaatttacatgatatactaatttttgtcatttttttacaaaaatactgtcaggctattttttataagtttcatattaaatttttactggtgttccactggtgttttttagttgttctactgttgttttgagttattttgttttgtgttttactagtgttttataaaaccacaatatttttgaaaaaatttccgtggtaagtttcccaaaaaaaaaacatatatttaggtgtttttatattgccaagggagcatgtatgatcatgattcatctctttagtttgggataacagatactacatatatgcgcttaaaaaatagcttcatttttcactttcatatgataaaagaatttgcttgattattataatataaattttgattattataatataaattgtaattatatgtatggagaggaggcttgactcctttgctttctcttttggaggaatctctgaagagatctcttcatggaaagaccttgagaaccacatatctgagattgcaagcacactgatgatagtgccaattccaacccttctccatctcttccttcttccacctttttatttgcaaatagtagtatggctctagcctatattataatacaataagtaaaaaaaaatcagcaatttgtaattaatcatgaccagtacttaacctaattcttcttttctctcttaaaaaaaaaaaaaaacaaacaaattatcccagcaagtcatgtttatgaatttatacttgtctccgttagaaaccaatgggaaaggtctatactaacatagaaaacagagtactgataaaaaataatactcatatatgtaattatatacatcaattcatgtttagtggttttccaaaaaatatagtccttgttattgaaacagaaataaatattatcatatatatatatatatatatatacctggagttcagtcatgtcgcagacgaaagccctttcattgaaaaacacggtaactttttggttggcactcggtattggcttactgttcctgaaataatatataattattaagctacaacaatttctttcttcaaattaattaatctcctaattactcggatctgaaatacttgaatggcgattttcactcattccattctcttcaaatactactctatctgtaactcacgtgaacggtcaaattccctccatttatatatatataaataaaattttataatttctaataaaaagtaaagcaagaaaagaaaaaaaaaaaaaaaaaaaaacttacatttgtatattcaggcaatgaaacggtaatggtgaaaacttgaaagagggagcattaacgccaaattgcctcatatcaattaatacaaaaacttaattgtaaattgagtgtactataatatacatgaattaaacaaacgaatcttacatatataattacataagtattaagaaagattaaaggagcaagttattccagattttaagaaagtttcttccaacaatagagctttatatatttgaaagaaagcatagaaataaactagttattaattattattattatgttagttatttatcttttattagcacgtggaaaacgagtatctcatacatacgaaatttgaaacatacattaaactgataaactagttataagtttcctatataatttttgcacatgtggctaattcatttttgatatatgtagttttgaaaagaagaaaagttaccaaaattagaaactcgtacactttgtgaagatgtggctatgcatgtgcttatagtttagtacaaacttttgtcgtgttataattttcatctacacgtgactattatatatttatattaattttaatgccttggcgtatggtgtggtaggagtgcagaggagtttaacatgagttttctttgttagaaataattggggtcacaattgtatatataaaatgtgtgttgggtcatcaaataaataagtcaaatttat

SEQ ID NO: 18061 - DNA, 2681 bp, Cannabis sativa
  modified_base (525)..(527): a, c, t, g, unknown or other
cacatatatttttacataaaaatattgcataaaatagaatttaatataatacaatacaatacactacgacctaatacggcgttccaaacgagccctaaatgtatggaactatcattcttatatgacggaacaagcaattaaccaaaaacgataagggcctctttctatactaaattctttaaccttgtttcagactgatgccttagtccgcctgcttccgttaattggatcctcgagtatcaggtactttaagagggaggtgaacaatgagacattcccatcttatggcagagtcatactgatttaatgagttaaacattgccacatataaagctttaggataaagatattgatttaattgtattaatttttattgtagcactgcttgcttggtaggcatcacaggggttcttgctccaattcttgaggagaacgtgtttcgagggtttttcttggtgtccctgactaagtggtataattttttccatctctaatttgtaaattttctattattattattattannnttattattattataatttattttttggagacaaactattatagattgaaaacagaaagttaattttccattattgtatttgtactgtattcaacaagtataataagtcctcgtaacacatcattcccataaattatgtacctgtgccagtcgctttgtaattgctctagaaaagctaggagccactttggttaaattgggttgtagtttttaatatttgccacgcattaactaatatccattaattttccccacacagggtacctacaccagttgctgttcttattagtgcagctgtttttgcattggcgcatctaactcctggagagtttccacaactttttgtgcttggtaagaacactcccaacagtttttctactttatcctttaaaatacatcactaaaactctacgagcacttttacattgcaccatacatcatcttctttaattaaaccaccaaaaccctacttttttaaaattttattatgttttattcatttcaaatatataatattaatatatacatatatcccaatacaaaaataattattaatagttaaaacaattaataaaatatgtttagagcaatcaatagtattctataaatgtaaagcgtgtataataaattttaaagaaactttaaaataaagaaagattttggagcatctgctgtaacatatttttagtatgctttctttaaattttttaaagtttcttcatgttagagaagttattttgagtgctctaagcatgtttaatctgaaattgaacactaattttttgtacattgtcaacaagaagatttttctagaaagcttttaacaaaaaagttccttatcatagtattgttggttttctggatgactcttaaagctgtattggtcttctacattaatcgtatttgcaggcgctgctatgggattttcatatgctcaaactcgtaaccttctgactccaatcaccatacatgctttctggaactctggagttatattggttctgaccttcctccaggtattagccttactcatgttctataactttgtcccaacagggggggtaagcccacctacttttgtgctcaatgaacttgcttgcttttcatttccgggttttatatcaagtgcttagacttctttttctggttgactgattatgcagcttcaaggatatgatatcaaagaattgttgcagtccacctgacgatcttttaatttgataaagcagagcatatgtttcattggattagttattgaatatctggataacttatatcttggataagatgtctagatccagtgaacatagactggagttattcaatgtaaaaattagcaaaactaatgaagttttgaaacatgattacagtaattacattactgtttactctgttcaccatgccaactagccaattgtattcaactattcgtatagtgattaaactatatggttttatacgttttatgatgatcaatggcattttttctttgctttatcttttactacaactgacttggttccggagattattgtttaaaataatttaatgttcatgtgatttcatctatcatatgatattaaaataatatatctacctccacgtgagttattttgaatagggacgaaattctctttttgttttttaaacaaaggtcctatatataatatatgggatggatgccatgtgagcttataattttgagataactagttagttaagttgagctggttgaatgggttaagtatggattaagcataataattgacgagtgtagctgccaggggtttgaagtcaaagtgggtgttgggttagtagctgtcttccaatgaagtgtccatcatgatgtgttttagtattattttagagaacaggttatagtgtccaaaacgtgatgattgctgaaaatagatatctaaatgatggtggttggtttgaaaaacataacccaaatctgttgacatttgtgtgtaatatacataacaaatatatatatatatgcacaatccaagttcacttactattatgacaaaaataatgctaattgcagacatttttcttgtcatatataaatatacatatattttcttcttttattccggatgcaatgttgaagattaatacatgatatcatattacgactttttaaagactt

SEQ ID NO: 18062 - DNA, 4546 bp, Cannabis sativa
tatctacgtagatatatgtgaccagtgacctttacttatataagagaaaattattctgctgcatgcatgatattgatgatatttattcaatactaacttatacatcataaggcacacattaagaacttcaataaattctcagataataaatctgagagcaatataatagatgagagagaaagacagactagagagagcgccccatgcatcagaagtgattttttttttttttaagaaccgagagcagtactgttttatgggaattttttaaaagagtggcattaatattaaatgggggaagaaaaagggttactataggtagatgttgttgatgatgacgaaaagggtatggtatctctgttgagtttccctagtcccttcacttcacacaccactttttccctaacaaaaatgtaaaactgcatgcaacgacaacaacagtacatcaaaaagctctgtctatttcatcattcaaacccctctctatcttctctcttttctataattatttcttctcaaattcttctttctctctctggaacaaacatgatcaacacacaaacattttatacactaaattctcaaaacctaaaaactgtaaaaatgaacatgatcatcatccattcatatataaatatcgtcatgcataaaaattaagttgggtcctgagcattttcatgcatactagggggacgtgtagttagtcttggattacaaaaatatcggtagtttatttagtatgaaatcaatcacgatcactttcacttgaccccatttaagttttttttttttcttttcaataattcaaaagaaagaaaggaaatgaaaaaataacaaggaaattaatttggacgtgtactagtggtggtggggaggcgaagagaagaagcaccagcagcgttgacccaattctgggtcaacgagcttggcaagcctgggcgtgcttactgcaccaagcttcgataagtttcgcttctttgctctccgcttctctctgcaactcactgagttggtctctgtactcgttctcaattcgactcagtgacgccatctcttcctctctcaagctccttatcttggcttccgtttcctctattttctctctcctcttcctcgctttctctgactccagctgttgctgcagccggctcaaacgccacgtggcctctttcttgtgatgcagccagctcaaccgaccttcctccacctccttacagtactgaaccagactacccagttgctgaactggaaccaaccggttcatttccgggtcaataacgggttcggacggcgacagtgagagactcaccgaaggagacggtgtcgaagaagtgcaggatgaaagagacgacgtcgctgccgcagaagacgagttcatccacggcggaaccacggccgggacggtagaattcaccgacccgagtgataaaaccggatccggatcggtcaccaccatgttaggcatgaaagctgggctgacgcagccggtagcggcggctgcatacagcttgggctgtacgtatttctcggcgaaagtctccagaatgtggtcgtatggtccctgggcagcgttttccggcgatccaactccagttatgggaatattaccttctgggtataactgatgatgatgggattgcaagctattcgtagcactgatcagcagggaagaagatgatgatgaagatttgttgttcttattcaactgcttgagctgcttttccttaaagacctcccaccactttccgagtctcttggccgtacggcctgggacctcggcggcgatcttcttccacttgttgccgtacttagcctgaagagaaatgacgagagactgttcttctggggttagagagcctttcttgagaccgggctttaggtagtttttccagcgctcgaggcaagattttgggtcgcgttggagtggctttcccatgcgctgggagatgagattccagtctttggggccatattgcttaacgtaagctcgaaggagtgagtcttcttccggttgccaacgctgacgctccttcatttcatcaccattttcacacttgaaatcttcttcttattatgggtgttgtcgctgattatactcaacaacatcatcgtccatgataatgataataataataataataaaatggtcacattcacagagataagaaattgatagacattaataattttgaagacttataatctttatatataacatatatattatgtatttatggggcgaggggagaatgggatgttttggggcgtgtttttataagaagtggctttaggtggacacgcggtgcgagtagcgtgtagagggaaatttatgaaaagaataggtaaaaaaatcaagggagtgaatgtgcaataatgttttatttcaaggggtgtatattgtaaaattaataggggtagggatgggatttatcattagttttgtttttgttacagtgagagactgaacgttgaagagagtgagagatagaagagagtggtgtggtgtttgtggggtttggagtggcagattgagtcagatatggggtggacaagactggacctttgagcctcttttcccctcattttattatttggtggtatttttttttatttctgctcacttattactgcatgtagacattgaaagatgccaagagaaaaaaggaaaaaataaaaaaaaaataaaggagatatggagtatagtcctgctagggatttttcagtgagggaaaaagcatatgatggggaaatgtgcccttcaaaaagggagtattgtattaaacttagagctaaaactatgtgtgcatgttaattaggaatgtaatatgtacggactactctcggacctttggttatctttacttcctcttctcatttttttgggttatttgtcttttggatattagcaaaatcctagggtttttaaccactatatttggcctccttccacttattttaaggatcaaacaaaaatgagtaagaaagtagcaaaagggttttcttaatttttatttttcttctattgttatataatatataatattaaaaaaaaagttatatatatagtggtggaatttggtatgattgtttgaatagtttggggccacagctcatagctcatttttgaattgtacatttgtacagaagcaaaacgcaagacgcatcaacgcatttctcggatctgtgtgtgggggctaatttgtctttttgctgcactctcccttatcacatacacatagggctgccctgtttatgtgtgccaaccaaatagcttaagcctaaacatgtcacaaggactatagcctcctttagggacagtaaagaataaagatccctttcccttaacatctttttaatttttgattattttctattctatacatttttttatttataaaggcagcatctaacccaatctccatcttctccccaatctatacagattgaatttagtatttttttcctggtgtgaaacactgttgcccatgtaactaattgtctattttttcttcttaaatgaaaaagaaacattcataaaataaaagagaataaataaatacaagatccatacattgaccctttcaaaaaataaataaaaaagatccatgcattaaccatcccattgccatactttcataaattcaaggcaagaagtaagatagtgcccatcaaactcaatctaatgaccctaaaagaaatatataaaaaagagctttttcttaaaaataaataaataaataaaatgaacctcattcatttaaagattaaatgggacaaatgaaaacaaaattacacaaatttgtaatacatacataaataatttttttttactatcacaaattgtacatagataatggtggcataaagatttaaaattttaaatttgtaatcggtataaacttcataattttgtttagcaccataaatttaatattagtaaaactataatttttgtgcagttttatcaatagaaatttcattttgaatttattaatagaagaattagaagtaattagtactacatatttttgtccaaacccattgattaagattcgggtgttacatgtgtcttgtttaagacactcaccttgtaataccccaagattaaaagtcggaatagcaaaccctaactaggtaaatgtgtattaatgtggaaattatattattatataatttaataaatatgaactatactaagaaatgacatgttaagacctcgttagtgagccaggggcatttttgtaattttgacccaaaaagggtaaaatcgtaattttatggtttatcgtgcttacggactatattattatatagtatgtttattctgtctttctgtaggtattttctgacaagtcgacgcggtatagtcacaactgggtattttgagtcgaaccgagtttgggacccaaaatacatttttgggatttatttatggcatttatatgataaatgggaaaatatgacttatatgatttgtatgtgtcatgaaatgacgaccttgcccttagttatgtgtataagggtattttggacatttgaccatgtt

SEQ ID NO: 18063 - DNA, 3656 bp, Cannabis sativa
  modified_base (3622)..(3624): a, c, t, g, unknown or other
attatattttattaaaatttactttgtgagtgagttgctcaatatactctcacccgccctctacttaagtttagcatataatttatattaacatatagggtataacggagacatcatttataaaagtaggtatatcttaaaaatatatataaaaaaaaaggtaaaaattaagataagtaaagtaaagtaggtatacaatgtatctcaatacacttggtgaattttcggggtcaacaatttctaaactaaaaaatttccatgaaaatttattaaaataaattagataataattagttattaatgttttgttgcataaataatatttttacactttttatcatttttttataaaataaacataaatatatcatagttaaaccaattgtaattttctattttttttttaaccaattgtaatttttcaactgaaaatacaaaattatatgaaaaagactgtactagatttgatacaaacacctcttacccaaatacaacccaatcaattgaaaatacaaacattttacaatttttgaaaagaaagtgtgagaggaatttacaatattacccacctaaattgacaaaattacaattgtattttaatttttttttttttttttactaaaaataattactttttttcaagaagattaacgcttggtgacttgaaacaacagtgtacctcaacatacataacataaaaggaacctattattattttgtcttatttgaagtgtttcatccctcaaaaaataattgaggaattacataatttgccataattaatttgtaattaatttagtagccttgttattaattggttaattttgttataatcatatcacaattttattaagttattaatggatttctcttagtcatcattgttaaatattaatttttgattactaaatctattatattaagcttttacaatattatacaacaaaaattaatcacttattttttatttctttattttaaattaagttacttataaactttttatgtctgattcgtctaggggcccgccgcattgtttgcaagttgatatcctcactcatccttagcttcctgacaatgagaacccttttgtgacttcaattcatccttgccttattaatcaacctgtggcctctcttttcatggttgatagtaggacttgggatattgatctgattaaggatatgtttaaccagagagatatcaatttaattttgagcatgccaattagctttaatgctgatggtgattttttgtcttggagaggtgaaaacttaggtgaattctcaataagaagtgcctataaattacttgaagaccaacgagaaataaagtctggtgccagtaattctgggttttggattaaattgtggtagttaaagatacctcagaaagttaaaaatttcttgtggagagtttgttccgcgtgcctccccactcgggttcaattacatataaagcatgtccctctctctttggactgccccttttgtggccaagctcaagaaacagagtaccatctgtttgtttcttgtgattttgctactgcttgctgggctagagcagggatggatgttgtggagttggtaaatgccaacattgtatcctggttcgtgaagcagtttgaggagttagatgaggagttggtttgcagaattgttatgatctcttgggccatatggaaggctcgtaacagttgcatttggaaggataaacctctttcggttgtggaagtgatggccttagcaaacactactttacaccattggagaaaagctcagcacaaagatagtattccatcctgtgatttacagcacctggggatggtacggagcttggattaaaccggttgatagtgtaattaaagttaatgtggatgcaaccttttttgaagaagcaagtcggtttggttttggaatggtggacaaagattatacgggaaagctcctcgatgcttgctgtcagtcggctcatgggcacctgaatgttgcagcagctgaagcgttgggtgtcaaggaggccctcagctggattaaaggaaaacaatggcatcatgttgagatcgaaactgatagtaaattgactatgcaagcagttcgtagtccaataatcatgaaatcattttcggccttcttgttgaagattgtcgttgcttactccaagctatgtctaatgtcagtttatgttttgtgaaatggtctgccaaccgagttgctcattatgttgctaggcaatctcgattttctactgatcgtcgaatccttagttcaaatgtctctcctaaaatgcaggaattattgtatcacgattcttgttattaataaaagtttgcatatgctttcaaaaaaaaaaaaaccataatagaatgaataaaaaatatttattctttaataagaaaatatttattatgtttaattttataaaaaattattctaactctaaaataattttataaaattatttattttattttttataaacacgtaatattataaataatgtctaaaaaaaactatctaaaaaaattagtattattataaatatttattataataacataatatataacacacatttgaattttatttatttttgtattttttaattttaaataaatacacatttaaaatttttatactttaatatttataattttgatattttattttatttaaaagaattcttaaattataataattcatactaaaatatagtaaacatttactctttaataaaaaaaaatatttagtttgtctatttttataaaactgtttattatttatttaattaatttttacaaattatttattttaagttttaataaacatattttatgatatgaaaaaaaacatattttattattaataatttttttttgagaaattattattaataaattttaaaacattaatatagtaaacataagatattataaaataatattacaaacattaattatattaatctatttatagttattagtttagtcattaatgctttatattatttagtgattaaaatatatgattttatgtaataagttttcaaaatgtataagtttttaaaataatatttttttgcacattttttgtaattatattatttttgttgtacatttatgaaaaaaaaactctatatatattatattaaatataactataaacggaaattgttaatttaacgtttttattagttaacgttaaaattaacactggaataagaaattaaataatctatatataaatataaaggaaagcacaaagaattctacgtggcatcttacattttttttattgtatttttaaaattttatgacatttttaatattttgttaagaaataaactactacacatatccacttaaagtcccacatggtttagaaacaccttaggtgttatccatgtagattataaataacacttttgttatgcaactttccatgtccaataaatatttttctttatttatttatattttatccaataaattttaaatttttatttatcatagaattctttgtggtagtcctacatattatctatgtaggttataaataaaatttttattatgttactttcgtgcttaataaatattttttaagggtattgatttatgtattannntataaaattaaataatttattattcatatttt

SEQ ID NO: 18064 - DNA, 4009 bp, Cannabis sativa
agaagtagtacggtgtgtagatattgttttttaaaagaaaactcaaaaacacaccactgcagccaatacatccatccagctggactagaataaacagaatcccaatagttcaaatcaaggtacaaagaggtcgaccagtggcaaaacacaaggtaacaggaagaaaagcaagttcaatggaaactctaaataacatccttggtagaatgcctcaaagtttcacaatcttaacagaagacatagaggcaatctatgcaactaccaagtctatggcaaacacctctaccatgaaaaagggtatgagcaaacgggacaccaccaagtttaattattttcatgtagattacggacatgaaaaaaatgaatgcaacaacttgaaatgggaaatccaatttctcatccgattaaaaaaccaacgcttacaaaaatatgtcaaggccgagcaagaaaaaagggatgcccaaacagacactaaccagaacaagttgatgcctctactagtggacggatatcttcaagttttatcattggggcccccaccttgctggaaactcaggcaaagcaagagaaaggtatgttcgagccttacaatatgaataaaatgatgcaatcctgctcgtagaggagggaaaatctaaaatgccacatgttggagaaccagtgataacattcaccgaagcagaatatagctacgtcatttttttttcacaacacccctttggttgttgtggtgtagattgcaaataaaatggtggctcaaaccatggtggataatagagcttcctcaaacattctattcaaaatgacatatgagaaaatgggactctagcttaaagattttgttccttgtattgaattggtttattgattctttagctaaagcattgcaccatttggacaaatttgcctaccacttatagtaggagaagctctgacaagaacaatagtgatggcacaattcttagtgattgacgtcctttcaactttcaatatcatcttaggtcggccagccctatatgacttaagagttatcacattagtctttcacctgtgcattaagttcccaactaaaaatggagtaggttttataaagggaaatcagaggactagacgagaatgctaccaccttgctctatctaagggcaagaaagaggataattcaaaccttagtttagagaaggggaaaggcattttttaatgggaatttgccctaggaggggacgaagaaatggatccctgtcttaggggaaaaacacgaattttgggctagtagaagagcatgaagaagtggagattgatcgagctacactgaccagaatactaaaaatttgtaaaggtttgttgcttgaaataaagctagccttaataaaatttcgaagagcaaaccttgacatttttgcctagttacatgaggacatggtcggaattgatcccactatcatatctcatgccctaaatattgatccaaccttctgtctcgtccaacaaaaaaggagattgttggacaaagaacgtgcacaggcactaaaagaagcggtagaaaggctccatgtaaatatgtttattattgaagctttctacccagcttaggtggccaaccccgtactggtacccaagccaaataataaatggtgagtatgtatcaagtttactgacatcaataaggcatgtccaaaagactattttccactcccaagaattgatcaacttttggatgcaatagtcggtcatgaaatcttaagctttatggatgcctatttaaggtacaataagataagaatgcatccacctcaccaagaacacacaagcttctgaatagatattggtctatactgctataaagtcaggtcgtttagtctcaagaatgctggagctacccaccaaaggttagtgaataagatgttcaaagacaaaatcagacaaaacatggaagtaaatgttgatgacatgctctttaaatccaggaaggttgggaggcacatagaggatctagatgaatgcttcaaaatcctcaaaaaatacaacatgaaactcaattccttaaagtgttcctttgatgtcatcttgggttagtttcttggattcattgttaattcttgaagaatagaagctaatctagagaagaattaagccctctttaatatgaaattgccaaaaaaaattgagggaggtacagagcctaactggtcagatagtcgcactcaccagattcatttcaaaatcaacaaacaagtgtgttcccttcttcaacatcctttgagtttacaagacgttcaaatggatagagatgtgtgaaaatacttttcaaaaatttaaaaagcaactcgcatagcctcccatacactcaaaaccctcgaatagagaagatttagggatatacttagtagtcactaaatacactgtaagtgtcatgttgataagagaagaaaataattttaacatccaaattactacatcagctaaagattagttgaggtagagggtcagtaccccctaattggaatactaacttactgtctgatcttcgccacaagaaagttaccgaccaacctttacgctaagcttttcaaaagcccgatgctcctagacaactactcaaatgggctatagagttgggtcagtatgaaataacttatcaaccccacacagtagtaaaagggcaagcgtaggtatattttgtggctaaatacatgggcaaagaatcaaacagctcaaaagacaattctgacccaaacaaagggcaattataagatgcatccccaccaaaagaaaatgaaaaggacaagcttatttgaaagttgcatgtggatgggttagccagtgatcaactttttggtgcaagaatcactttcattacactggggcaacctttgcacgaagcaattaaatttggatataatgcctctaacaacaaagcagagtatgaagcactcattgttgggctaatgctttctcaagaggtacgtgctgagtacattaaagtctacggtgactcataattggtggtaaatcacatatcaggggaatatatggcttgtagggtgagaatggtggcttatctcaaaagatccatgacctgctcgcacaattcaagggttataccctcaagcagcttccatgagaaaaaaatacaactgctgatgcccttgcacgacttgtgagtagcacgatgacagataaggcaaacctagttccaattcaatttttgaaagaacccagtataacctgcacgaagcaaattaaaatgatagaaaacataccaaactggttgactaccataccatcctatctcaacattagagaacttccaagtaacatgaatgaggctcaaaaaattatgagaaaggctgcacaatacatcatagtagaaggtgtaatgtataaaaaaggtttctccatgctactattaaggtgtgtaacaaatgaagatgttgcatagctcttatccaaagttcatgaatgattttcttggtaatcatgctagggggagagtctatagaagaaaatactagggcaaggatacttctggcaaacaattattgaagatttaatggcctatgtgaaaaagtgcaacaaatgccagagattttccaaaatcccccatgtaccaccaaatgagttaatacagatgcaatgtccatgacccttcaccatatggggaatagacttgattgaatagtttcctaaaggaaaaggcggagtgctatgtagtggtagcattagattacttcacctagtggatgaaagtcgaaccattggcaaaaataatatccaagaaagtattgaattttgtagttaaaaacatcatatgccatacagacttgtaaaaaaattatgacaatggaaatatttcaataaccagattttcacagattttgtacgacacatgggatcatcaaaagtttctcaaaagtggcacacccccaaacaaaagggcaattcgaagtagtcaacaagacatgaaaggacaccattgacaagtggatcgaggaagcaaagaggaattggc

SEQ ID NO: 18065 - DNA, 4609 bp, Cannabis sativa
acacgtatcgaggcaaatgttatgataaaaaatgcctcaatcccaatgaaggacattaattactgacgtggtagattacctttgataaggtagatgagattgtaaggagtctaatattggtttttagggttaatatcagaatcatagcgaaagcataaaataagatttcggttttgaaaaaaaacttgttgaatcttataagaatcttaaaccttggatcccaatacaatataacataaattaaatttaactacttagaattaagattttacttcttcacgcctaagagggtgttgacccaaactcttaatctccttgtttacaaatatttgactttctcctaaacattgaatgattactttattgttcaatatttgtcataatttatactttatttgtaatacaaaaatagaaatgtaggtgactccaaggcatatcctagtgtttggcacttattattttaaacaaaaaatttaaaatctgctagctttctcgtttatactattaaaataatgtaagactagacttcagttatataattctgttttcttctttttactacatgaataaaatagtatataacttgtacaaacagctacaaaattagtatgtttatccctcttttaagtaatgtttttatcttttatatgttattaactaacttccggggacagcctatgactttttgagatctactccccacttagccataacgaaaactaagggaaaagaattgtactgaaaataaacaagaatagatcgaaaacattaaacaaaaacctttttatcttcaaatatatttattaacttgcaactttagttacctttctacaaaataataaattaacaccgaaaaagagtaataatatttttataacaaatgattaaaaacttgttacaacatggctaaaacatagaaaacacctcttattttttttttcttttcttttcttgttataatatatataaatatatttttatttatttagcaagtaaaaaaaaaacattgtatatttcaagctgtggcaattgggcccaaggtgaccttagcttcgacagctttcatggcctcaaatcttggctccttgggttggaacttgactgtagtgtagagcttcatgtaatcttcaaaaacaaattttgggtagacttggtttttctcttcagcttctttctccaccagagatggtgctgggtagataacagcatcacttccaggattgtagaatgaagctaaagacatacgagtaccatctgtttgtgcaattaccctgtgaagaacactcttgtatcttccattggtgatcacctgaaaagaagaagaaaaaaaaaacaaatgaattatattagtgttctaatcatgactatgctcaaaagggtcctaaataatggactcagtgattcattttagtggttgagagttgagatttgatattatatgctgaaatcgaaagggtcatatcatagttttagttgtcaattatgtcaatcaagcacagtgattttggaattgattttgaatttatattttatacctcaagttggtcaccaaggttgataacaatagagtggcgcataggaggcacatcaatccatttgtcatccttgaggagctggaggccgctgaccttgtcatcctgaaagaggagaatgatgccaccggcgtcggtgtgggccctgagacccttgatcagatcaggcttagggcaaggagggtagttgctgaccttggtcccaaaggttgggccttttgatccataaaatgcttttttcaggtaccctttttctagtccaagattctcacatagcagctctaacagatactctgctagtttctccaacttctgagcaaattccttcatgattttcctgcattattatttggaaattttgtcatgagatgtcatttctcataccccacttttttctaattttctttttcaactttatggtatttattgtacccaagtcagtgttactatttagtactaattcactcaaaatattacagaaaagaagaatagtcaatccaattaaattcaatgcccagtcagaggctttttgggagatttttttttctttcttttgtttttttctgagttttgagtcagaaatttttacctgtattcatcatcaagatctgggatctcagctatatttgagacaggaaggtggcgcaggaaaaaggtgctttcccaatcaatgtcattgacctctgcttgaacagcatcaaggcctttgcttttcacaagctccttgaacctttcctccatacactttctgtagtgttcttttgtcatcttttcaactgtgtccaagaactcatggggtatgccatgattcacaagctaaaaaaaccacataggtaaaacatgagtattgtattgtgcaagcaaactaatataagtccaaagaaaaaaatagaagaaagtactatcattttagtgtgtgtgtgtgtgtgtatctttacctcaaagaaaccccagttttcacaggcatcattgatttgccccattatggagttcctctcctcaccattgagcttctccaaattgataatagggaacttctccatctctataataactgttttggctgatgagttttgttttttttttttttttttcactttcctttctactactctctttgtgttttttctctctatctctttctttaacaaagttagtttgtgttgggttttggtgttgagtgttatgctatttatagaggtttgaagtggaatggggatacaaaattatttgactagctgtgaggaagggtggtgggtctaggttgagttgtagagatcctatttttttttttatatatttagttaaaagaaaaacaatgaaataaattcttaaaataaaaatgttcggtgtagtgggcccaaaattctttggtttttcaattaggcccacccaatccttggcaattgtcacatttgccttgcaaaaccacccctctattccactataccaggtgtttggcccaccatggtggctcacttctttgaagctttgaccaatcagagaaaatacaaatcatatttttcattttatgcatttgtaccattttttgttccacttgcacgccttgatgttgatgaaggttatatcttggaagatgccaatctatttggactcacaaatagcatttttaacccctaaattattgaaacttttatagcattgacatgttaggcatgccctactactatgtctttgtccctaacatgttacccttataccccttttgatatatttattttttctgaaaattatacccttttcatataatttaattgcttaaaatatagactagagagatgaaaaaaaaaacttatgatgtaggaagttgataattaagggtacttttgtaaattattaattggggtagacccaaaaaaaataatataacttttttttttgataacacaaaaaataagataactttggtctttaatgtgggagactaaaaagaaagaagcatttgtgaataccactgctttattatatggtgagtaagccctcccaaaaagaaggatctaggctaataatattgttctttcctttttctgaatgcagttactaaactaataataatatcaagagcacaaaaattaaaaatatattgctctcttttcttatttctttctttttaactgaatatagcctagaaattccttttttttttaaaaaaaaaacattaaataattgagttggctcccactccccccattctttttgctcttttttttttttttggcaatatgaaatgataggttttgcctaatttttgctttaacaaaagctgattgaacatgttatgatcttgaggagggtttaactttatttataagtattttttatttttatactttaaaatagtttttttatatatatatttttacgaaattacacataaaaactcctatagtaactaatggagcaatttaaatcgcaactaaaattcgtataacagcttacataaaaactaccggagtaactcaaaccgtaaatttaaaaataaaaaattaatatattgagtaattttcctttttagttattatgcactaaatatatttttaatatgtaacaaataacaatgttttcttgctatagagtttaagtagattaggatagtataatttgttgagagctaaaacgaagatacccaaaaatccaatgggaccttattgtttatcttttttattggagaaattaatcggaatgggaccttggttatttcatttttggtgataaaaacatgtaatatatatatatatatatatatatatttattgcatgagagtgggagtgattgggaatatgtatgttttgtccgtgtaaatcttagttaaatgataccccacacgtcaaaactaaagaagaggtaaaaaaatgttgatggaaaacaacagttcaagctatttatatacgtgtgtgtgtcggccagtaaacatccctatcccttccattttagatatattaatacttttaaataactaagaataaaaagtttataatattaatttattacaatgaaattcggagagcatttaattatatcccgcgtctttggttaagttttttttttttttttt

SEQ ID NO: 18066 - DNA, 4072 bp, Cannabis sativa
tgggccgactacgaacccaatactgttggcccagttagaataactttctactgaacgtggtcctatcttattccctcatcgacccttctcctcctcctcctctctctctccctctctctgcgctgctttgtgctcctccggaacaacccaccaccgtcgaaaaagagaatctcactctcacggggtcagctttcggttcaccatctcggccacgtaagtgaagtcctcctatatctattgattgttttcatgttagaaacttgtctgttttgatgatatgcatatggtatggttagtattgttcttgattggtatgtataacttatctatacatataaattgaactatcgcctctcggctttgtcttgtgagggacgagtgatatcatattctggttggattttttcttaaaactttttaggcgtaaaaatgtgtgaattacagtaattcatgatcattatgataattgtgtattagaactacatgaaggctcataatgataaccctactcatttcttaaatgtaatcaatgctaatgtaaaattctagcactatttgtgagatttcttattctaaaagcttcaattcaatgaagcatggaagctggtaaatggcaaataccaaatagaaatagtgtgagagcaaaagtagtaataacttccttcatttgcagaagagaaggggtatgaacaatctctaacctaatcctgaaaagtgaaaaccgaagaggcttcagagtccagactacacagattcaaacaatgttacttcgaaaccgcctcttaagtctccagttcacgtctctcatatccccgtcttcttcttatcctagaaaaactaaaccattctttctctcttttggaaatgcactctcgagctcagctcgtccgcacacgagcgagcatgtttcagcttcaaagacccccacaagctcttctatttcagaggccgccaagttcctccgtacctttatgtttgtaccacctggagttgatccagaggaggtgacggaggacatggtcctagcaggttctaatattgtaattggaccttatgccggcgattcaaagattaaggaggtagagttcgtcaaaagcagtggtaaagccaaggattgccctaaagataacagacctgaatttgcaattctgggtcgatccaatgttggaaagtcctcacttataaatgcccttgttcgcaaaaaagaagttgctcttacttctaaaaagccaggttttcattcccactttttatatattttattttttcaatgaaggtatatgtttaatgttaacagataatgaaaaatgagtttgacattgtgcagggaaaactcagcttatcaatcattttttggtgaacaaaagctggtacattgttgatttacctggttatgggtaatgccaagtctcattctttttaaattgttaagttgtgtttaatgcttatggtttgttatgtctttacttaagtttaaagcttggagtgagataattttatcgttggaccatttttttttactgactgcttctgtcagtatttgttaatagagaaaagagcacgttcactgtagattaagttactagttaaatttctagttgatttcatatttctcagttgagatagatgctacaaatttcatgtggaaaaattgaatggtgcaatttattttagtctgtaactggttaaaattggggcgggggaggggagtgggtgaaggatctgatagaccaagaagaggatgagaaagccactgaggctatctcagtagttggatggggaaagaataaagtggacgttggaggttgaactctcgacttctttgttaatgttcgtctagtgtattaaaacaacatgagaatgagattatgtaaaaagcacctagtgtgctgtaggttacttgaaatattccacagatatataacattgttgatcttatgtttatggcttgttagtttgtgacaaatctacatacggaattttctattgaatagctttattttttattttttgcttgtttaatacaaattgaaagaatgaaatgaaagggtgaagatcatctcaaaaatctccttaagatgatatccacaatgctttatgttcaaataaataaatttaaagaacaaaatccacactaaacaagtactttgcaagcatgtaaaccctttggttagagccaattcacccccttcttttctatgcaaacgtatatattgtcttctattttcacaatacttttcataatctaatagcctaatatgcttactttatttgtaggtttgccaaggtttcagaatcagctcgaacggattggtcatcattcaccaaagggtactttctgaacagagataatttggtcgctgtgctacttctcgttgatgcaagtgttccacctcaaaagattgacttggattgtgctaattggcttggacgcaacaaggtaatctgcttacttatcaccctttaactaagcacactagcgcttcctaaaacttcatttctaatggatttattgcctttgctgatgtcagatcccaatgacttttgtttttaccaagtgtgacaaaatgaaggtggggaaagggaaaaggcctgatgaaaacatccgaaattttcagcaattgattgcggagaactttccaaagcatcctccatggatcatgactagcagtgtcactggcttgggcagagatgagctcctccttcacatgtcacaactaagaaactactgggatcaatgaagctgaagttgattaacttaacacaaaaatcctgcttataaaactagtgacttgaacaactgcttgcataatttttcctcctttgattgttttttctcaaaaattgcattagttaaaagtttttgttgtaatttagatttatagcaaaatgtaatgattctctcttgtatatatatagatgattattaccgtttgaggtttactagtgcatttttgctctattatttcctagtcgttcttttaatcgagagttttctcgtctagttttacttcgattataattggacttcttattattagtggttggttataacttataatcgaattcttttgttttgtcaattttttaaaatatttttctcacactagacccggtttgatttgatggtgtggaatgaaatgaattataaatcaatttttatccatttcttatgtttatattaccaaatataccctgcaacagcaacatagtgtgttgtcttgcttagtttttcccccttgtctttctcaaacaaacaaacaaaataaacgtgtagatatcacaggaattatagaggttacggacaacaattttcaattttgtattagtgttaaccagctgacactcgccgcggcggctagctagctagctaggtccaccctctcatttctcaggttcacatcacaagattattttataacttataatgctaaaattttatattctcaacccatttaatttcaagataaaattgatctaaataatgacatctcattttgtctgctactgcattatctaatctactcaactccccctctcaataagttgctttcctatgataaatatgctcatgaacctcatagataatattaatatatcacattttgtatactatatataagaaaaatgggtgttatttattttcattttgttattaaaatgcaattacaatattgatattgagcagtattaaaatgactgtactcttcccatcgagcacattacaaactcccgttatacattaatctaacaactcttaaatcaaaatataaaaggaaatcacgaactaattaagatccataggaatatgatctgaacccaactctagtgtaattatacaataatgaacaattatatatgtgtgtgtaatatgatggtctaaagaactgtactctgccccagactggagagagttccggggctcaacagaaaagaacaccagttatgagaattagtagaaggcgataacgatatggatgatgatgatatagaagaggagtttagaccaagaaaactcgatccaacaacgttgttaatatcagctgatcccaatttattattattattatta

SEQ ID NO: 18067 - DNA, 4338 bp, Cannabis sativa
ttctatatagaattccgtaaaaaggcaaaaaaaaaaaaaatatattttaaagtgtaaaaatgaaaaagccccaaatacttaatatttacacataactaatggaaaaaataatattatttgacacattatttatatatatagtttataattatatatttacatacatagtttaggatcaacaatgatttctaatattcttatattctacattctatattatctatttttatttcattgtaatttttaaaacttcttaacatatgtatacaattacaaattacaaaataatgtataatagctctaaaaaataataattataattaattaatttattaagatacaatacaatacatgtatacacatatacattcttccgaaacaatataaattttaattaaaataaaataaaattaataattacacattactcttgaaagttcaaaagactaggtttgtaatgactacatgtttaagttatagattagggcagttagcattaattttttttttatcaagaaagaaactttcattaatcactgaacacaaaatacaacaaaaacaaaaggcaaaagagcaaacacactcctgctatcagtttctcaacatcctaaataatttgtgtaaataaaattgatcattagagctcatctttctcttagaaaagctatgtaatctatacagaagcagtctctttatttcagcaacaatgctggccgctgattgagcatagtttttgaacacacatctactcctatttctccaaattccatacagagcagtagccaaaatgaaattggtaacaactgcaatttgccgtaataaaattaagaatatgtttattatttatttttatatatgtttatatatttattatttatttttatcatacatactttatatataaaattaagaatatgtttctcatagttaataaaatatataataaattgtaaataaatttttatgcacatataatgtaattaagtattataaagtagataaagttataaatttttcttttaaaaaggtatttgctatggttgaaactttatgctatggtcagtcggttggcgataccggagctggagcggttgccaatgaggaagtggcagttagcagagaaagggaggacatgggtggaaagatcgtggatatggaagttacaaaagttatgggttgtggggggtctatgatgcacgtgcaacaaaaagaaggacaaggtactaatgtggggttgggcttacataatacgattgggcctgatttgagagtccatgaagttggaccaagacttaataaagctaatgggggagattaaagcagtaggcccaattcaaggcacttcacagaatatttccaaggaaaatgagagctctgaccatgagaagaaaaagagaaagaatggggtatctgatatttctttggaatctgaagctctccaatgtatgctgagcaaggggaagcaagtccaacaagtatctatagagattgaaggtattgacaattttacatttggggggacgaaagtggtgaaccggggtaattcaagtaaacagagccagcgtaagaagctttccattaaatctaaagctcatgcgaagggggggaaccgagggggtgtaacgggattatctgtgaagcctttgattgttgatagtggtgtttgtggggatgggcggtctttggaggatcaatatgttgataaagtttcgagccagatcaggtacggggaggaggaagttgcgtttactgtgtcgggggcgggtatttctagcaagcttgatttcccatctccatctactcatactgaagcggcgagccttgtgcagcaaggccgccgagcgcaatgaaactcttacgctggaatgtccaaggaattaggaacccttggacattgagagctttacaattccatatcaaagagtttgatccaagtattgtttttcttgctgagagtaaacttactaattatcaagctcaacgtttatgtgcaacattgcagtttggagagaatttctattcggtggatagagtgggactgagtgggggtctattgttgatgtggaaggaaggaattcagattagagtggactcgagttctgtgggacatattcttgcgagggtagcaggtaataattttctcccttggtctttaacttgtttttacggtaattcggatgcttcacaaagacggttttcttgggaattattacgaaacattaagcgggaaattcatgggccttggttgtgtgtgggagattttaacgaaattgttagtttggctgagaaggttgggggccgggtgcgtagtgctggggctatggaagagtttcgggaggtcattgatgattgtcgattgatttattttagctctaacaaatctgatcttacgtggtgcaatggacatgaatccaacactgttatggagcgcctggatagaggtttatgcaatgaagaatggttgttgagttttgatggggcagatatccaagtgctggattggtgggagtctgaccataagccactggttgttgacatgcctttggttaatgatgagaatggggaggctaagaacaccaaaaaaggtcggttccactttgaggaggcttggtgtgaagaggatcaatgtaaagaaatagtggaaaagaattggcgagagtgggatgtagttatttccggtggtgattacaaacgtaaaactggggaagtgggaagagctcttgatagttggaaccggaaaaagaagaaagttcttaatcagaagattaaaaagctgaaaacaactttgattgaattatcttccagttcagatccaggggcttgggtggaggtgaagaaaattgagaagcaattaaatgcagttttagaaaaggatgagaagtattggcgccaacgtagtagggctttatggttaaaatggggtgacttgaatacgaagttctttcatcgtaaggcatcgactcgccggaaaaaaaatgcgatcaaagggttgatggatgacatgggggtatggcacagtgaggcgggcatggttcagcggcttgtggaaaattattttcagaatattttttgctcttcctctatgccgcatgatgtgtttgaagaggtgataaatgtgattcctccgaaagtcacggatgatatgaatgaaatgctacttgaagactttactgctgaggaaattgttaaggcagttaaggatatgaatcccactaaagcaccagggtgtgatggtctcccagctctcttttatcagaagttttggagtaacttgaagcaggacgtgattggcatgtgtttgaaggttctaaatcatggtgctaatttggaatgcttaaatgaaactataattgcgcttatcccgaaggtagagaagccgaaaaaagtggaagagtttcgtcccatcagcctatgtaatgtgatatacaagatagtttcgaaatgtctagttgcccggttgagtggtgtgatggatttgattatctcggatacgcagagtgctttcattaaggataggcttattcatgataatgctatcatagggtatgaaagtctccactgtatgaggaagaatcgatttcaaaacgggggcaaaatggccctaaaacttgatatggcgaaagcatatgatagagtggaatggtcgtttctcagtgcggtgatgagccggttgggatttgctcaatgttgggttgacaagatcatgcgatgtgtgacttcaacaagtttctcttttttgattaatggggaaattaaagggaagttgatacctgagcgggatttgagacaaggggaccccctctccccctttctatttctgttctgtgcagaagcattatctagtctaatttagcaagaggagagtgcaggtaggcttcgagggattcggtttggtcgactgggagtctcggtttctcatctgttctttgcagatgatagtcttgtctttattgatgctgatatggatagttgtctacaatttcaacagatattgactaagtatacagctgcctctggacagattgtgaattatcataagtcagaagcttgttttgggtgcaatgtgtctgctgaaacccgattccagctggctggaatgatgggggttcgggaggttgacaaccatggtaaatatctgggtttgccctcttttgtgggaaggaacaagaaggaatttcttgatgagatcaagaataaggtgttgggaaagatgaagggttggaaaaactctatgttttctgtggcgaggaaggaagtcttaattaaagccattgttcaagcgattcctacttacaccatgacatgttttaagctgcccaaaaaaactatctcaagtct

SEQ ID NO: 18068 - DNA, 8283 bp, Cannabis sativa
tttatatccatgaattgagttttaaaaatatggaaagttattaaagtaactttgattttggtaagtaataagtggtgaccatttatggaatacggaaagttatttttttcaaccaaaagttaaaaacacaagcaatttgaatgaaataaatattgccataatacctagtagagcattttaatgatactacaatgataggattaccattctaagtagcattaattcatactactataataataataataatagtctaattaaaacatcttattaagtagcttaactatttctacattaatttttttaatacaattattttcacatttattgttaaaaaaataaattaaaatatataaaaagaaattgtgtaacaaatcttaatcccaagataaagtttaagtacttccataaatgctagtgtttgattaaaatttattaaaaatccttaaagggcaatatagtaattttacaaaatatttggacctcgaaccggggctccgactagaaagttccctaatgcaaacaatgaaaaggacagaagcacccctataagacaattctctatccgacatcggttttccacattgaccacagcttcccaaagaaactctttgaaggtcaaaaccgtcatttcacctaatcaccagccccaaaatggtcattccaaaaatttaacgtttcctaatcgggctaaactatcccacgtggcatatgacgtggcgtattgtttattttatggaccccacttggctttgataacatgccaggtgtaaccgtcaaccaagagccaacaactgcacccaacagaacaaataatatataaaataataaaagcaagagaggagtcagtgatttttcaacttaaatttaattttttattttttttttcaaggaaaaaagaaaagtctccctcgtttgcttttttttcatataaatattatttttaaaaaacttttttctctcttctaagagagcatttttcttaacttctgattggttgattttataaggtccacgggcttaaaatgggtggatgagtactttagcattttggtcgtttcttcttcttacttagggagtaatgtgttgtttaggagaaaaaatcatatgcggacaattgtattgtaagcaaacgaatcccaaccattgtatttcaagtcattaagatctaacggcttacgaaaacgatgctctcacttaacaaggaccctatatatatgtattttatatttttttaatttggaggtaactctctttgaacttttgccggaaaatcgagttgaaaattttcttggtggccaaacgccaaacgcagtgagagagagagaaagagaggagggtgaatcaaatgtgatgggaggtggaatctcgaccgcgttcccgtgcttcacaccggtgaaccggagcaggacgaaccaaccagaccatcatcagtctcaacacgacttgatcttcactgcctcagagcctttggacgaaaccctaggccactccttcgtctacgttcggagctcagctcgtttcctttcacctactcagtcggatcgctttgtttccccttctcagtcgcttcgattctcgcctcctcacgaaaccggtaccgggctcggaccagctccgagaacccgatccggacttccagagaccgggttcaggacaatctcaggggcttccgtcagcgccaacacttcaactcccagaactgtcctccagctcgacaatatttacgacgatgccactgagaccactctgggtggtggtggtgtgagggggagtatcgttaatgggtttgagagtacttcttcgttcagtgctttgcctcttcaaccggttcctagaggggaagagccctcaggtccaatggagcgcggcgggttcttcctttctggtccaattgagcgcggagctctctccggcccactggaccctaacgtcagtggtggtggagctggttcggacaactctggccgagttcatttctctgctccgctcggtaccgtttatgtaaagaagaagcggaggaagggcatttcggggtttccgaaggccttttacaggaacttttcggagaaaaaacggccatgggtggttccggtgcttaatttcgtgggtcgaaaggagagttccgccatgggaggagaagaagacgagtccgaagttaagaacgagagtaatgtccagtgggcacttgggaaagctggggaggatcgtgtacatgtggtcgtatcggaagaacagggctggttatttgttgggatttatgatgggtttaacggtcctgatgcgccggaattcctgatgggcaatctctatcgggctgtttacaatgaactacagggcttgttttgggaggttgacgaagtagacgaatctagcaatagcaatagcaatagcaacccacaaaatgtggctgcggtggagaatgtagtggtggtagaccaacccaacccatccgagcctagagatgattcgactcctccagttgttgcgaagagagtgacttttcatccggacgagacggaaagaactgagactagaaggcgccggctttgtgattttctagcagaggagatggctgaagaggggcttgatctatcgggttcgcagaggtttgcgttttctgtggatgatgctcttagtgtcagcaatggtggctctgccgtgagtaggaggtggcttctgttgtcaaagttgaaacagggattatctaaacatagggatggtcacggtaagaagcttttcccatggaattttggattagaggataaagaaaaggttgaggtagaggttgagaatagagtagaggagagctctaatcggacaggtcgaaggcggaaggagggtccggttgatcacgaattggttttaggagcattgtctaggggccttgaattgactgagcttgcttatttggacatgacggataaggttcttgatacgaatccggagctagctttgatgggttcatgtttattggctgtgttgatgagagacgaggatgtgtatgtaatgaatgttggggatagtcgggctatagttgcacagtacgaacagaacgataccggttcgagtgccgtggcaaaagggcagggagacaatggaagtacggagggcataactgaggaatctttggctgtaggtgaaagggaaatgaagcttgagaacgagacaactcctcctacacaggaaataggattgactgcattgcagctttccacagaccatagcaccaatattgaagatgtaagttttttagttcctatatataaaattttagctcttataatctgttgctgaaactgtttaaaagaatactgtttgttttgctttgcctgggtgaattttgttgcctaaaaagattgatatgtttaaagttggctttaacctctatgtacttcatgaaccaattttgaaacttgatacaagctagctactatggtagactactagactccaattatctgagaaattttgcctttataatttttttgttttgacgttttgaactctagcttcgcagaaacactggctttgtaatgctcttccttagttaatcctatctaaagtgggattttgttatgtctgaggaattattgattgttcttttaagtttttatttggtcatgtcctccatcctcactgaaattaatccaatgagaaaggtttgtgacttgtgagttgacattttattgctctgaatttcaaccactgtacatgctgtcatcagattctttgaaaggttttccttcatgatacattccttgaatctacattttctcaacaaaatcctgctacatgaagctttgttttttttattttttttggcttattacccttactgtttctctgcaactccttgggaattggatgcagaaaaacaaattcattgaatgaatcctggtctttggttatccatgatgtatgacaagttgttcaacaggatgtcgaagtacacatatttgtaactaccttttattcttcttcttggtaatcatgtcagttagaatttaacaggatacatatattaggaataaaaccaaattgacatacaagtacttttttttttctttgttagcttgtcagtttcatttttgttttgcctaaaaatgttggcgaggttaaagtaaggagaaaatgatgaaccttattctgacctctggtgggcccacttatgcaaattcaagcttgtatttacctttcttccagtgaacgaactttcgatatcttatcatgaatgtctctgtatagattgttgctctttcatagatctcttcctcttttgagaaaaaaagcagtgaagaatgatttggggtcatcatttttcatataatgagctgtgcattctaaaggcggtttaattatttatgatatttcatattcccaatgttcaatttcaacaatttaaaacaaggttacccttctagttgatgtaatcaaagttagtgcttcactcccttttgtctattggatataatcaataaataaggaagcttcctcttgcatacatttcacatgacaattccttttgtctctattttctttttcaacgaactaggaaattatgaggaagcttccttccaatttttcagtatcattttttatctaaaacgaaattttgagtacctcttttggctgttcttgcatggtttctcttctggatgaagaattgcttgtgtctctactctcaatgcatctatgaataattttaatggtgttttctgtcttatgttctctttttccttaacctagaaagaaaatgcaattatatcgttaagatcaggatgaaccaaaagacttggatcccttgtattttttctttttttatatattttaagttgtatatgatcatttttggcttttactgcttaagaaaaaaaacactgacctcagcttttaacaataagtagtcttttactcattttattgatggatatataaggtgttcttagattttcaatcgacattttgcaggaaatcattagaataaagaacgaacacccagacgacaaacactgtatagtaaatgatagagtgaaaggccgacttaaggtcaccagagcatttggggcaggatttctgaaacaggttcttcaaataaacttgatctgatatatacctcatttattattaaaatttaacataaaaagatgatacttgtctgatctggaattgctaatctggttcactgctgaatataaaaatacaaggttgtttgaaagataaaattaactcgtattctgcggatgaaattagttaacagattttgaagtcagtttgaatgcttctgaaagccacaatatctagtcattttaaatatgatttgccttcattttaaaatttcagacgattaagtcatgtcatgttacttgaatattttttaaaccaagtgagtagcgcttttgcaattattattatggaaaatttaaacttggtcaacactgttgtattcttttatcctcctgaaatatgactacctttacattgtttttcggatgtcaaattcttctgagaattattttgagcctctgcgaaattaaatataactttagattttaatgatcagtgccatttcaatatgttaagatacatcaatttgtaagatgttgattaattatcatctttcacataacaatgaaaaagaatttttacatgagacaaagtcagatgataacacagtgtatgtatgctggtgcagcccaagtggaatgatgcattattggaaatgtttcggaatgagtatatcgggactgctccgtacttatcttgttcaccttcgcttcgtcaccatagactatgtcctagagatcaattcttagtactctcatcagatggtctatatcagtattttagcaatgaggaagtggtttgtcatgtcgagaacttcatggaaaagttccctgatggagaccctgcacaacatctcattgaggagcttctataccgtgcagcaaagaaagcaggtatgcttttaggactatttgattatttttcaaaatttgtttgtgttgttttcatttgttgttacttattactgtgcttgcaagacccaatactcaatagaaagatgttagaatgtaaatgagaatttgtttccaaaaatgcatgtcaaatgtattgtataacactttacatgggcactgtaacggcatttgtctccatacttctccaaaatatttgattgcgtatttctttattagaaagttatccatccaagttgtttgaaacttcttttattgtgactcagtatgccgtgaccacacgtgatgatactattacatagaggttttaagatcttgaatggtgtactacacttttgccactccttttaagtcatgttagtcatcatttatttggaaacttccaagtaattttccttgttacttccagttcgggagaaattataaagctcacagcatgcataggttatagtaatagagtcgccttttggttaccgctgcagtgctgctaccatcaaaccaccctgttttgtacaaataagcaaatattttgaataggcaaactagggtttcattcatcctcttcttaattttctttttcttgatatttatttttttgctagctgtctttcccatccagactcattttgattgtgttctaacttctacttgaccatttttcggtaatcatttggacttgctcgaactggttttctttacgcaggaatgaatttccatgatttactggatattccacaaggagataggaggaagtaccatgatgatgttacagtaatgattatatcactagaaggaagaatttggaagtcatcaggaaagtacctttgaactagctcaatccaatcttctcaagtgataatatattggaagcggtaaggaaatctttactgctgatccattagggttttttttcgattatctattctcgccaccttacagcagcataagcatacagctaagtaggtgaggggcctcaggtgatgatggtaagggcgaaaagggctgatcttagatattataaaaaagaagaaaacttgaatagatgcaaaagatttggtttcaggatgaaaaattcagaacttgcaaatgggtttgatgggaaatgctctttaggtggaaaaagaaaaagaaagaaggaaaaaaaaaatcttttttttttggggggggggacctcattttaacttattctgttctaaaatagaaatatattgtgtaggttcctgccttttccatttcatcattgtcatttcttatattttgaagccaagaaagaaaaaaaagaaaatagtttgtaaaaattggtgggggtacaaatttacttactgaaaagttgagagcatttccttcttctcaatgttaactttgaaggtgggttttccaccattgcggattaaaagagttgaaatttttgccaaacatccatttctgcttgtggctggctttaaatttctatgttggctcgaagaaaatgaatggaatgcatcactttcacttccatgttttacttgtgaaaaaataatagagagatttccttctctttttcattgcaatggaaaaaggaaaaatgaggaatgtgcaacaattagtaaaggcaagtttgaaaacaaaagtacattttaagttacagaaaaataaaaaaggagagtacacttccaagttttgattttatgtgtatcttttgggaagtctacaattaactaattaaccattacatgtaagttcagactggatagacttgataggatttggaatgttaaaataaattaaattttaataatatggggtttgtgtttttagatgttaatctctttaacatttgggttttatattcttaagtttatttttttcaactcaaacatataataaataccccataagtgatgattagttgaaaggaataaaaacataactagaatagtcatgacattttaatattttaaaataaaattataatataatggaataaaaattgtttccattccatttaattttattacctaaaaccaaatatcaccttttttaagtcttacaaaaataattttatatccacattttttttaaacgaggatttcttagctagcactacctacatattagtattaccaacatgtaagtcaaatatgccacattcccttataaatcaatttgtttctcctataccatattttccaacatagtgtaggtatcttttccagctcttctttaggcagcacataaggaattcataagaagccatggaaaggtgtgttaacattgttatatgaagttagttacaccaactgtacatattcttactcactctttt

SEQ ID NO: 18069 - DNA, 9231 bp, Cannabis sativa
  modified_base (56)..(56): a, c, t, g, unknown or other
  modified_base (147)..(166): a, c, t, g, unknown or other
  modified_base (3013)..(3014): a, c, t, g, unknown or other
tagttttagtcacaacaagtattgttactaaatatacatttagtcacaacaaattntaatttttgtgactaataccttcagccacgaactttttagtcaaaacataggaaaaataatttatcattagtcacaatttttttacttttnnnnnnnnnnnnnnnnnnnnctaaaagtaagattttttgtagtcgacataacttaaacaaaaaccagataaaaagaatttcagattttagatttccagtttggggaaccccaaattcgaaattttctgacacgacgtcacttctcctcgaggttgactagaactatcaccccggttgcccaattacctctccagtccaagtttaaactcgtcaagatgcgaaggatagggacagagaaaacgagagagattgagagggggatttgggggttttggtatttcacggtcgatgagtgtggtggtgaggtctgtttggaccatccactgtcaaaattggacagcgacactgaagagtagagagagaggctcgggaaagtggcataaaggatgaaagaaactcattgcccaaactcacaactcccaattttgaagtcctagtagatctcgttgcagatgcgctgtctccagtcgagagagagaaagtcaggggaggagagagagagagagagagagagaaagagagagagaatcttgtgaacaataaaaaaagaaaaaaaaaataggctaaattttattctaaatattttatttatttttgttatttaaattgccaccttagccaaccacttaaggttatatggcattttttgtatggagaaatgctaaaaggaacaatggtgtctatcacctttttacatgtcaatatcattattggttaaattaagtattgtgtttcttatagtttaatataataaattttagagagtatcgctagtcaatcacaaggcgacacgttcagaagatactaggcacactattggtacccaataataatacctttttgtaaagtttgttgtgtatcaaaataggccatataccctttaaagggtgaattataaacaatactttaaatttactaacaaataagtgctttaagagattttacaactaaaattttttcttggccgattatgtgtaacaaaacttaaaagattataaagttttgctcctaataacccaaaattgaatgacaaaaatgatacttattcttttacatattaattaattatgggaattcgcaatttattttttctccaattggtgtgttctctgattgaaggtggagagttgcacgtgcaaaacatgtaaggcgtgaattaggtctaattaactaaagctcccacgtgctgaacatggtcactgaaattactgaattgtcagggcttctatatctagagactagagctgttacttagtcaaccctcattccaaatacaaattacgaataatgtataatatatgacaaaatattcttaattaataggctaagtttgtaacatgagaatttttttttttttttttttgaattcaataacatgagaaattaatgaaagaaagaaataaaaaattgaaatgtattatacacatagtttgtacgtataaatattctacatatttatttgataagttttatcatcaaattacattccaaaatattattattagaactttttagagggtcatcatcacagagttactcaaagcaatatgattattattattataaatttaagtaattttttttaagaaaattgtatatgcacaccatttatgcatgttttacattatcacttaaatcataatatacatgaagctcggggattattggatatagaattagcccaaatttttaaatgggattattttagcctccggaactatgtaggttatattggattaatgtttttacaattttttcttccaaacttcttaactgaatctgttaactcaaaaatttgttagcattaattgagatttgataattaatatttttaacaaatataattaattaaatgtagtgaatttaaataccgaatggtaaaagaatgatataaatttttatgtagttttgtagttaacttgtaaatttatttatgggtgtgtatgaatattgacatggatacaattcgacagaatttctctaagttgaaaatttggtcgttctttgtattaatgttactgctatttataagaagtatgataacaatttttttttttatcttatctagataacaaatatagaacatggatattccccacatttcatatatcttttaacatgcgggatatgtataagtacttctatttaaaataaggaaaacaactgattgttgactatagactctcaacacgttatggctgagttggtttacctttcttttttggggaaaacactgctggaaacatgcatgagtatagactcctcgtaggtcaccttggtccagattacaaaccttccaaggtgattactaggagtaggctttagataagtttgatctctccctgttaacatctagaccatgaatgttcttgaatgccttaacaagtttagcacatttagtttaagtcatgaatcttccgagtcgttcattataagctattttttagttatttcacgtaaccaaatcatttggcattttggacttaggcaaaacttatgattcttttttctcgtcaacggggtgtattatgcgagatgatcttccctgtattgtgccttcatcactcttttatttaggatgagaaaatattcatcttttattcgagccgatcttgagtactttaatctatcgctggtaaaatagaatttacttttgatgtgttggcaaacggggttggcaaatcaatattggtattagaacttttgtcagcacaagatgaaaagcgctggcaaaaatgacttttccaagttagattttagccactgcaaatatacgctggtaaaactttgacctttttgccagcgcaatttgcgaaatacgctgctaaagttacttttacccacgcagtagcgaactgtgctggtannagtgacatttcttgtagtgctagtcgctttagtcgtagcgaccgatactcacttaactagtattcttcaagatgtatatattaaatctgaattttttaatgagcgagctgaaccgtcagctcattaattgtgagatttaatacacatattatgcggctacacccatatttttttgaatggagactatacattattagaataaataatgtgtacgagcaagtacatctaaagaaattcttaatttgccttgaggtgatgttttgttgagaaaaataaaaacataagaatatagaatgagaataagaattaatggaataaaatcaaatttaaaattcataaaaaaaattcataaaaaagattattaaattttttctcatcttgcattagaatcattagaatgatctttctttcatttgcaaaatggaatagtattctactaagatgatggaaaagtctttctattggaatcacattccaatactttatgttaagggtaccaattcaatttatacagttagagatggtagttagtacttcagttagtttgttatagtttgttatggctctaactgattctcttctccttctctttctgttgtaacgtgtatataagctcatttggtactctttgtcaattgaatacaattcactctttccctttctttctctgtttgattctttctctttctttctctctcttttgtttctttgttctgctgcaatgtctaggaaagttaacatggtatcagagcttgagtttccgccattaatggccaatgtcgttactggcaatgagaaaagagttactgctggagatcactctcaacgtgctgcagaacaagaatcctccaatcagacacagagtcttcaacgtcctagaaggaaagatcctgatgatgcaaccccgatttacttcaatcatagcctttcgatcaagttaaatgatcacaacttcttgctttggaaacagcaagtcttagctgccatacgagggaatcgccttcaacacttcatcacagggtccgatcctccattgatgtacctcactgatgaagatcgaaccaggaaacgcttcaatccagcttatcttgattgggaagctcaagatcagctgttggtgtcatggctcttgtcttcaatgactccgagtcttcttactcgaatggtaggatgtaaatctgctagtcagatatggtctactcttgaaaagtacttcaccttgcaggtctctgctaaaattcttgagtttcagacgaggctacaaaatctcaagaaaggttctttatcccttaatgactatctgctcaaagtcaaagaaaccgtggatcttcttgcttatgttggtgacactctttctccacgggatcatgttcgtgcgatcttcaaaggcttaccaagtgaatatgacacttttgtcatatccactaacaccagacttgagcaatattcagtagcagagatcgaagctcttctattggcatccgagtccagaatcgagaaaacggattgagaaggtgatttgagtgctaatatggcttccatggagtcggatcctacttttgaagccaatctagcaaactatggtcgagggggctacaagccatatccaccacaattcaatcgattcaacaactatgcgaattctggcagaggtaacttacctattaatctcaacaacttcagtccttatggctatccttactttgctcatgctcgaggcaactttaattctggaagaggagttcgaatgccttccaccaacaataaactccaatgtcaactatgtctcaaacttggacatactgtccaaaattgtttctatagatttgacaagaactttccaggttcctcaacaactggcagtacacttcaacctcctgcagcacctcaagctaatgttcttaccactacaagtgactgggacatgacttggtatccggattcaggggccactaatcactgcaccccagaccctgcaaatcttgctcaaagctcggactacactggacaagaacaactctttgtaggtgatggctctggtctatccattcaacatataggtcagacctttctcacttctaatttgtcttcatagccacttgttcttaataatttgctccatgtccctactattactaagaatttactaagtgtatctacgtttgctaaagataacaaggttttctttgaatttcatcctgatacatgttgtgtaaaggaccagggcaccaagcaaattctgctgcaagggagacacatgaatggcctctatactcttgaaggtctcaacctccttccaacatcctctgtcactccaaagtctgcacacatagcaacacaggactccataaaatccccttccattcatagtacttccctagattcttgtattcattgcaataatcccaggcaattttctgagtttgatatatggcacaaccggttggggcacccctccaaaccagttgtccattctgtactcaaatcttgtaacctctctattgataataaaacttctagttttgtttgtcctgcttgttgtttaggcaagatacataagttgccatttcctaaggttaacaccactgtctacaatgcacctttacaactagttgtctctgatctatggggaccctctcacactttatctaacagtggctatcgatactacattcattttatggatgtctattccagattcatctggatttacatgctcaaagataagtctgaaacaatcaaagtctttcaaatgttcaaggcagaagctgaactccaattaggaacaaagattaaaatgattcaaacagattggggtggggagtttagaacatttcctaagtatcttcaacagtttgggattcaacatagacatccttgcccaactacccatgagcaaaatggcctagctgaaagaaagcataggcatatagttgaaaatgggttaaccttgctagcccaagcttccatgcctctcaagttctgggatgaggcatctaggactgctatgtttattcacaacaggcttcctacacctgtgctcaacaacaaaaccccattagagatactgtttcataaacaaccagattacacttggtttagaacctttggttgccaatgtttccctaacatccgaccttataacaagcataaaatgcaatttaggtctgaaccttgcacatttctgggatatagcctcaattacgaaggctataagtgtctctcttcaaatggcaggatgtatatttctagagatgtcatctttgatgaacatcaatttccatactccaaaaccaattcccaaactgaacctattgttcttgagaattggcacatacctgctaaaatccccactattagacagcaagacacctgtcccactgctccactcaccataaatgagtcatcatcccagaccacctgtccaaatgaaccactcacagttcatgagtcatcatctacacctggttcaccatccaacaactcacctgtgtccccaggatcaacacaagtctctgaaccagtccctggttcacacaccagtcagtcctctacatctaccatacctcctggttttgagcatgtaattcctgccaatgtacctcgaatatccaccagtgcctcccttgacccttcaccacaggaagtaatcactactcctcaaatttccaaagttcaaaacaatcataacacgactacaagagccaaggctggtgttcacaaacctagagtttttagtgtgtcatttgttcccactacagttactcaagcactacagatgccacaatggaaagatgcactacagatgaaattttagcccttgtcaggaacaaaacttacagtattgttcccttaccccctggtagacaagcaatagggtgcaaatgggtatacaaggagaaagaaaacacagatggtactctcaacaggtgcaaggcaaggttggttgctaaaggttttcaccagcaacctggattcgattttactgaaacatttagtccagtggtgaaaccaattaccatacgtgttgttctcactcttgctctttcacaaggttggcaaatttgacaactcgatgtcaataatgctttcctaaatggggttctacaagaggaggtctatatgacacagccacctggttttgaggttacaacaatgcctaaccttgtctgtaaacttcacaaagccctatatgggctcaaacaggctccaagagcctggtttgacaggctgcaactctctctttccaaatttggatttgtctcatcaaagtttgaccactctcttttcatacagcactcacccaagggtacaacattggtgctagtttatgtcgatgacattattattacaggcgacaacagtgaagttctgtctcaacttgtcactaatctaaacactgaattctctcttaaggaccttggttaactgaactattttttggggattgaagttcagcacactacagatggtttgcatctttctcaaggtaaatatattcgagacttgttggtcaagactcaaatgcaaggagccaagcctgcatctgcacccatgaccagtggcctcaaacttttagcctatgggagtgatcttgtcgaggatgttcaactctacaggtccactattggggctcttcagtatctcactataactcggcctgaaatctcatatagtgtaagcaaagtttgccagttcatacaccatcctttgcaagctcactgggtcgctgttaaacgaattctaaggtatctcagtggcaccatgagctacggtcttcatctcaaaaagcctccacacactgaaataacagcattctgtgatgctgattgggctgcaaatattgatgacaggcggtccacatcaggctatgcaatctattttggctcgaaccttgttgcttggtcctctaagaaacaacacactgtttccagatcaagcacagaggcagaattcaggtcccttgctaatgtcgttgcagaaataacatggctccattcactcctctttgagttgcatgttcctcttcccaggacccctgttgtgtggtgtgacaatttgagtactgtgttactcactgcaaatccagttttacatgccaggaccaagcacatagaactcgatttatactttgttcgagagaaaatttcgcagcatgttgttgacattaggcatgttccagcagtcgatcaaattgctgatggtcttacaaagtccatctctagcaacaggttcagcaattttcgacacaaacttaaaattgaagatgcttcacttctaagtttgagggggagtgttaagggtaccaattcagttaatacagttagagatggtagttagtacttcagttagtttgttacagtttgttatggctctaactgattctcttctccttctctttctgttgtaacgtgtatataagctcatttagtactctttgtcaattgaatacaattcactctttccctttctttctctgtttgattctttctctctcttttgtttctttattctgctgcaatgtctaggaaagttaacactttaaaatgcaactaaacaaaagaataaaataaaaattatttactttttatttcattacctccaatcaaacaccatctaaatctaaatgtatgtaacttatccataaaaagatatggagtaggaatacttactaaaaattagataataaacttgaaatatcaaataattgaaattcaaaatcaatacaaaaattagagaaagcatacaattgtaaacagttagaaagttcaaaatgagaatgaaaaccaagcgagactgctcaaaagctaacatcacatgaaatccattgctcaaatggctgtaagatctccaacgtcaaaaagctttcttcccattcaattatataacaacctataaaacacacatacaatataagaggattgaggtaagtatttaacttcatttttttttttttttgaaaaaaaataacaaataaagaaaataaaaagtaaatcaaattgaaaaagtaaaatttaaatatagcaatttaaagaaaaagaaaaacttactagccgtgagcttcaaagattaaccaataatttttaaagttctaaatctagataaattcacaaaaacataatacgtaacgcaacactacaataattaaatttaacaaaaatataacaataatattatcttttaggagaggaggtttcaatggttacatttttattgt

SEQ ID NO: 18070 - DNA, 6580 bp, Cannabis sativa
ttcttatctattgatccgaaaaccgatgtttttttttttttccaaaacaaaaaacctaaaaccataaacccctgacctttccctactctctctctcacacccacccagccccgccgttctcctctagccctccctcacgcgaactcggaccccaaccaccgaacgcagaccacgacggacctacgaagcttcatactcctcgcgcgccggagcctcctttcttctcgactgagattaaagctggtgatcatttctacccttcatttcatgcctccatattctctatatacatatatgtatatatgtaactatatagtgtagtgtacttcctagtactcatcagaaatcaaaagaaaaagaaaattaggagaagttttgaactaaaatgttatgtgttaagttagctaattgctttcattttgttgtatttggtttagttaagcgaataaattagctgctgtgttataggtttgatgattttcttctgtttttgatataatttcttccagaaaaattatgaactatcgattccaaaatcttcttggagctccttatagaggaggcaatgctatagtcaccaacaatactgagctaatctccccagttggtaaccgagtttctgttattgacctcatcaaatctcaaaccctaactttgccagttcaatcatcttcgaatatatgtcgaattgctgcctcgcccgatggtgtgttcctcctcaccgtcgacgagaatcgccgttgtctcttcataaaccttcggcgacgagttgtgcttcatcgtattaccttcaagcaccctgtaaatgctgtcaaattcagccccaacggtgcttatattgccgttgctatgggtaagttgatccaaatttggcgatcacctggcttcaaaaaggagttttttccatttgaattggttaaaactttcgctgattgtgatgataaagttactacattggactggagcccggactcgagttatttgcttgctgggtcaaaagatttgacagctagattgttttgtatggaaaaattaaaatcgagtcaggttagggataagccattcatgtttttgggtcatagagatacggttatgggtgtcttttttggtgttgataaaaaaaccaataaggcctgcaaagtttatacgattacacgcgattgttatatctttagttggggtttcaaggctaatgaagctgaatttgatgaaatggaggtggaagcttccgagccaccctcacctggtacccctgatagggatatagaagggaatttagtaggtgacaatactggtaatttgaagaagagagtggatcgtgatagaaaaagtagtaatctgggtgaagagagtgggtatttgcagaaagggaaatgggagttgttaaggaaggatagttttagtcaggccccatcaaagttgactgcctgtgactatcatcgagggcttgatatggtggttgtggggttctccaatggtgtatttgggttgtatcaaatgcctgattttgtatgcattcacttgttatctatatcaagggaaaagataacaactgcagtttttaatcagcttggtaattggttgacttttgggtgtgcgaagctaggacagttgcttgtatgggagtggcggtcggagacttacatactgaagcagcaggggcattattttgatgtaaattgccttgcatattcaccagattcacaacttttagctactggagcagatgataacaaagtgaaggtaaatgtgtattttgagcttgcaagctcttgcttcttatgtttatctatagtaggacctttaactcaaactcttatttagtcaatcattgttatccttgctttaacaccttaggccattaagtcataaatttccttgaactcaaactcccatatcatgtttgcttcatacaggtttggactgtttcctcaggcttttgctttgtaacgtttactgagcataccaatgctgtcactgctcttcatttcatgggcaataaccattgtcttttaagtgcttctctggatggatctgtccgtgcgtgggacttgttccgctatcgaaattttcgaacatttacaactccttctgccagacagtttgtttctttggcagcagatcagagcggagaagttatatgtgctggcactctggattcgtttgaggtgcttttctaattggtagagagttctcaagattattgggatgtcatgcctttccttatttttttttctttcccaatgacagatttgtgtatggtcaatgaagactggacgtttgttggacattcttagtggtcatgaaggtcctgttcatggtttgatgttctctccttcaagtgtgagtggctgagttctattatttattcatgctcttgttccctttaggtaatgttgtgcggtcgccacacaccaaattttcttggttatatatttgttttgaagtttatcaatgtttacattgtaggctgtcctagcttcatcttcatgggacaaaacagttcgcttatgggatgtttttgagggaaaaggtgcagttgaatcattcactcacacgcatgatgttctcactgtggtttatcgtccagatggaaggcagttggctagtagtacattagatgggcaaattaatttttgggacccaattgatggcgtactaatgtacaccatcgagggacgcagggatattgctggagggcgtcttatgaccgatcgtagatcagcagctaactcaagttctggaaaatgcttcacaaccttatgttactctgctgatgggagttacatatttgctgggggatgtagcaagtacatttgtatgtatgatgttgccgatcaggttagtgattacacctacacgctctttgtaaatgattccactgtcgggaaaaaaatgtgtgtataaattgattcctaattggaccccatgttgtgcaggtgttgcttcgtcggtttcaaataactcataacctctcgttggatggagtgcttgatttcttaaattcaaagaacatgacagaggctggaccacttgatcttattgaagatgacaacagtgatgtggaagaaggtgtagacaaacaaacccgagggaaactaggttatgacttgccaggatccatgcctaaccatggtaggccagttgtacgaacaaaatctctaagacttgcacccactggtcgaagctttgcagcatcaacaacggagggtgttcttgtttattcaattgatgatactttcatatttgacccaacagaccttgacatagacgttacacctgaggtatttagcagaaactagaactactacaaatcattgtcttatataactatatagcaataagacaatatccagtattttaaaattatagaccattctttattttttttattttttcaatgtggcataggcagttgaggcagcactgaatgaagatcagccaagcagagctctacttcttagtctccgtctaaatgaggacagtctaatcaagaaaagcatttttgctgtgaatccagttgatattgctgccattgccacgtcagtcccacaaagatatttgcagagattaatcgaggcactagctgatcttttagaaagttgcgcgcatctagaattcatactaaggtggtgtcaggtaaaaatatattctcattccatttttctttgtaacgtagatcataacttacattcgagtttccgacttaaatccaaacattgttttgtggcaggagctttgtaaggttcatggtaactctatacaacaaacttcccgaaatctgcttccttctttgaagtccttacagaaagcaatcactagaatacatcaggatttggcagagacttgttcttcaaatgaatatatgctaagatatttatgctcgtcaagctccaagaaatagtcggcataatttagagaaacatgaaccattttgatatctgagacccgtggccgtgcgttccaaccttgcacggcagcagaactctgtgcttgagatcatcatggagagaggtctcatatgagtttaaccgaaagagtcgggcggttttgttataattgcatttgtgctcagatttgcagtttgctgtatttcaaagaagggttgtattgagaatgaaaacctgaggaaaaattttgttctacaaattttgttgtgataccttgagtcttgagagatcatttagtacataaacaaatgatgtttgaataggggataacaagtgaaagtttttagagttaatcaagtaacaaaagttgacagcattgagaattagcttttgaccattatgacttagaatcaagaaagtaatctattgcaaaaaaatataaccgttttagctaaacatttaaaaaatttgacctgacctaatattactttttagctgaatattggcgtaatattacttttgatgtgcttgaattttgttgaaaaagacaattgatacacacaaattccatcttgatttacaatgtcttttgaaagattcttttcttttggtcctcaaacaacgagtgatatatttaaggataaagaaaaaacaaataaaacaaaaggcattagttttgacaaacatcaatatattttattattttcgatgccagtggccacacacatctcaatttcaaataaaaagttccatttaatcacaggaacaaataaaaagccaataattttgataaagatccaaaaagtgaactagagaaagaatcccataagtcctcaaacataattttcatattgcaactcaacaatgggacgttccaaactcttctgctaatatctaatccacattttaactttatctgcaacatctgaaaaaacagagaatcaatgttacaattaccacaaaaataaataaccctcttactataagtacaataaaaactacataatacattacattgtgtacacatatatatacataggtttagcttaatcttaaggtagctctaaactacgagccaagtaactcacaatgtgctagcaatcaccgctggttattgtggcttgaccatctctgattccgccagtgaagtcgtcgcccgtgatttgttctatctcgaaaagaataactgctcctccgagggaaaggagcagttccagccacatagtttgaatggatatctgaaactgtgtccacctcatagtttggttgtggtgtgcgccatcgcagccttctggcttggcgattactatcatgaaaattattgtttcgtctggtgccagagctgctagaaccaatatcttgatgtaacctaggcattctatctgatcttctataatgggattgctccctatctcttgaagcattcaaaacacgactgtaaagcacaatctcaatagaacgaaacatgttggagaaaaaagatgacatccaagaatcaacattgtctggtgggtcttcaaaactactcggttgcactacgctaaggacatcctccaaatctctttcccactccaaccttctccaatcgcgctgcctcattggatccacctctgatggcctctcaaaagggtgttcagatctcgcatgtttcctcagttctgtgtaggttccattaaaatcacaagtttcggaagagcaacttctaactttggtgttcatgaactgacgagcaggcattattaccatatagccaaagacatctcctcgacataaagggcagacaagatttccgtgcacaaggctcccacaaggcccggttaacccaggcagtgatggttcttcacttattctgcgagaggcattgcttgtgagtggaatttcttgcaacaatgctgttgaagggtaaggctcagatgacttacaaaactggtcaaggcagtttgagtgcctgtagcttgtattgcacatgtaaggccggcatccctgctcatgagacgaacatttcaaaagcacagcattatgtgggtgttccatgcatatagggcacctagcctcttcccattctttcatatcatcaactgagaccaatggactacaaaaattggttggattatcatccttagatgtagtacaagggtaaggagataccctagattgatcaaaagacaaggaccttacgcttctaacctttggcattttttaaattaagataccaccagaatactaaactctgcttttggcatatcaaagaatgatatcaggaggcattaaaacataacaagttagaaacaagtccttaaaatgaacaaaatgactagaacaagtacgcaaacaataaataggaaaacagagagaagtaaggatcacaattcacatatacaagaaatcaatagtttaaccggaaacaaaggaagtgctgtgtgcttgtgtatattttatgatacagtgagttgattcaagaagctcccctttccaaaaaaaatcaaattgttcaggcacatatttataagcctaaatagcaactagcacttctcaacaaactcttaaacaactaatcaaactataagaataacttaacagaagaaaatagtaacatgttcaggcattgagatagttatataaccctaaggaaagacaaccagaaaagctcaaaaatttaatgaaagttacaattcaaataaactccacca

SEQ ID NO: 18071 - DNA, 2240 bp, Cannabis sativa
cacgagcaaagcatgacacgaaaacatcaggcctacgggtcgtgtcgggcatactctttaaaaatattgacacgacacggtccatatttttctttggcaagacacagttcgatccatttttaaaaagtacggataaatacgggttgggcaagcgcgtcatgcatgaacttacatcactagatatgaacaaggcttatgatcagatagagtaaagtattctttagtctatcgtgttgaagatgggattccatagtcgtttggtgggattgattttgggtgttataaaattgtgcatgataggaaaagtttgggtcccatcattcctacgaggagcattttcaagatgatccactatctccatagctttttattatttgtgttgaggggctttgctagtttgatcaaaaaatatgaaatgcgaagatggttacatgggtgtaaagttgctcgaaagaccctaagggtttctcatatattgtttatcgacgacaactatctttactgcaaaggaaatgatttagaggtcaatactgttttagaactactatctatttttaaaagagtctcgagacaaaaagtgaatgttgctaaatcttctatattttttagtactaatatctttgcttataatcaaggtcggttcagaaggtgttaggcatgcaagtggggaatgtacatagtaaatatattggcttgcctagcactaaaggatgaaacaatatgacttttttgggctctttgaaagagagaaccaaaaagagatggagagttggaataggaaatggctttcaaggacagggaatgaagtttttctcaagtctattgctcaagatcttccaagttatgccatgaatatttttcttattcctacccaattatgtaatgaaatggaacaactcatgcgtaagtattggtgacggtcaagctctccaagtaagggaatccattggatatcttgggagaagttagtggttcacgaggataatggtggactaggtaattgcagtttacgagattttaatctttctatgcttgtaaaataagattggcggttgtcactccattgtaattctcttgttagatgaatctttcaagcttgatattatccttgtggttcttttctctctactacaatgggtcataatcaaaattttttttggtattctatcatggaatctcaaagtttgttaaaagaatagtgtcattggagcattgtcaatgggacttccattcatatcttgcatcaaccttggttggcgagcacggagaatccttttattactttgactcattctggtttggtcgattctaaggtggctcagcttatggccccaggctcttaggtttaggatgttgttttgctatctaatctttttaatgagcaggacaaatttcttattcagaatattgtgttcttaatgataggttaagagaggaccaatgacattggaataaggaggtttcgggtatagatagcgtgaagagtgcctactagtacctacaatatttgaatgggaagtaagatgagcaaaataattttggtttttggcaatctctttggaatcttaaaatcccaccaaaagttcagcaagtgttatggaaagcttgcttaagtatttttcccacatccacgcaattttgggggaaacatgtgggcgttctattgatgtgtcaagtgtgttgtgaagatgttaagtctattattcatatcatggttgaatatttatttgcttcactttgctagcaacattttgatacttcggttctgaggacacagtttcctattttttttttagttggtttctaatgttttgactattttctcgaagaccaaagctagtcaagtgtcaatagttttttgggctttgtgacgtgctcataatgggttagtttggaaaagtaaaagttttgttgctaatggattcatttcatctgttattacttatcttaagtaatggaagggtggtcaaaagatgacactaatgtagggaagtatacttcttcctctgatgttagtagcgagcattaaacattacttgttgaaaaaataattcagattaatgtgaatgcttctgttattagtagaaataataactttgggattggttggatagtgtatcaccatagaggacatgtcattgaagctgattcaaaggttttgcctaattgtgtacaattgactaggggtgaaaatcggtcggttatggtcggtttttacaatattataaccgaccggtcga

SEQ ID NO: 18072 - DNA, 3552 bp, Cannabis sativa
atatatttcaggtgtgcaacagttagtcctctgtttcggaaactagtcttcaaaattgccctactatggtcactcatgaacgataatgcaaattgcaaacctcttgacctgtgtaactggattcttgttctgttaatatgcagtttggctgtcaattcctgtgcttctgctatttatttatttatttttttgtttccttatgttttggaagtcttggacatgtggtaaatttgggtacaatgttctcagtcattggttgttgcttttgactacagggaaatcctgcaatctgaagtagttaagggattgcaggaaccatgttcagaggagttgtctttagctattgagcaggatgatggcgaatcagaattattattgcatttcctcgagtcattacaagtacagaagcagaaggatgcctataagttagtggaaagcatacagtgcttagaaggagatattgaagaaatcgtgagaagaaacccttccaaagaacacttggctcattcttgtttgcttgttgactcctttgtgcacggaaggacaaatgtatttactcacagagagtcttccagttcagataaactttttcaattgtccacactttctaacacaagtgaatcaagattgatgaaaaatattagtcagcttgaaaatgcgtacttctctatgaggtccaatgttcagcttcccgagactgatgcagcattgcgcgaagataatgagttattgaaaaatcgggataattggcatttggcacaaaaagatgaagaggagcagaatccaagttcaactgaccgcctgggagacttttttgatgggttgtgcaagtatgcccgttacagtaattttgaagtgcgtggagtcttgagaaatggggaatttagtaatgccttgaatgtgatatgctccttgagtttcgacagagatgaagactactttgcagctgctggagtttcaaagaaaataaagatatttgagtttaatgctctccttagcgattctgttgatattcattatccagtgattgagatgtcaaacaaatcaaagatcagctgtgtttcctggaaccactacatcaaaaactatatggcttcttctgattatgacggtgcagtcaaggtttgtatatcttgtgctataattatgagttaatgttactgcacatacacacacacacccggaggtaatattttaagggtgttcaagtaaagagcagatgtttgtgtgttttgtttctcttcttttagatattatagtgtggggatttaacaaatttgtttttgcttagtaatgcttgcaactttctcatgaaatagttggcttgaattttcagttatgggatgctagtactggtcaggttttctctcaattcaatgagcatgagaagagagcatggtccgtcgacttttcgaaagtataccccacaaaattagccagtggaagtgatgattgctgtgtgaaactgtggagcatcaatgaggtatgctctctctctctctctatatatatatattattgctttctctttctctctctttatgtgtgtgtgagagagaggtgagatagagagatgtttatgtaatgaggcatctagtttatttaattagtaaggtgtcaacaaacaaggataaagttcattgcctttggatctttttctttcacaccaaagtaaattttagcacctaatgaaattttgtgtttgtatgatatattcttcaggaattagaaaatgtttttactggagtcctttaacatgattatacgaatagacctttaatagaaaaaatgtattaggatactgttgtggccaaatatgcctgctttactttgtcacttttttcttttcttaccttaataaaaagatacatatttatttatgtgcagaaaaactgtttaggaacgattaggagccttgcaaatgtctgctgtgtccagttctctgctcattcgacccacttactggctttcgggtctgcagattacagaacctactgttacgatctaagatatgctaaaacaccgtggtgtgtattggctggtcacgacaaagctgtaagctatgtgaaattcttggactcagatacccttgtttctgcctccaccgacaacacgttaaagctatgggatctcaagagaagtcattctgcaaatgcttgcagcttaacccttaccggccacgataatgaaaaggttttatatatatgctagaatccttgtaatctttccctaatgtttgctactttgctttgacatcctaaacatatcttcctgagccatttgaaatgttttctttttcagaacttcgtgggtttgtcagttaatgacggttatataacatgcggttcagaaagtaacgaggtacttgaatagactttctcctagttaggaacatattaccttgaaaatattggtcaattgctaaatgcatcttcttacctgtatttctctttttactttcaccaggtttttgcttactatagatctctacctatgccgattacttctcaccagtttggttccattgatcccatttctggaaaggaaacaaacgacgacaatggccaattcgtttctagcgtctgttggagaaggaaatcaaacatggttgttgctgccaattcgactggatgtataaaagtgttagaattggtttaagggaaattaacaagttgtgaccaaccctgtttttgtggtttcgggctctttctttctcgagttgaaactaccaagttctgttgcaaaaatcgaagattgagttgacatgaatgaatgaactaaaaaccactatgatagtctcctcatccatgtcagacagaaaaaggtagaatcatctaaaaattccattgctgaaggaaaaacattagtcggtcagtcagtcgatcaaactcgactaaaatcgttcatcaaagtgaacgagagatgtttatgttggcaatgataaaaatggatctaaaagcttgctttgagattaggccggtgctacaaaatttcgaagcgaaactaacaaagatcaaagtgaaatcaagtgcgagacaatcgcaaacgaaaaaaaacaggattatgatgaaaatggtagtgtttagtagttgagttgaggatcaagttgcttgattttatagagaatattattatgatttttactagtttgggaccctatttggcaatgttctcatatcatcttgttgtagatggatgaggtgttcatattaaattaggttttttttttttaattgtttaccaagtttattctcaaggtttggaggtaaatcataaatgttagtgctcagcttgtgtaaatttttagaagttaagattaaatatatatttcatatctcttgtatttgtaagattataagaatttagaatttggatacatgctaaaagaatttttaagttttttttcttatacaatgtttatgattgctaacaatttctgttaaatgttatcttatctacctaatataactaatagtttaggagataaaaattctaaataatttcattaatttttcaaggatatatgtaatggcattcttccaatcaacaata

SEQ ID NO: 18073 - DNA, 1806 bp, Cannabis sativa
caaataacagtgataaagcagccttgggcaaaaaaaaaaaaaaacaatagtgacagacacctgggccacacgatgtgaaaatgatcatgaatcacctatttttcatcaatcaaaggcaaaggaaatcgagaagaacagaagaaaatccatggcaacttccaatgaaaataatccattatcagttgtggttgtaatggttccattcctagctcaaagccatttgaaccaactccttcaatttgcccatgtcgtttcttcctcatacgacatcccagtccactacatcagctcaaaaccccaaatttcacaggtaaaatctcgtgcctcaaaccctcttaaccaattaaccgaaatccatttccatggctatgaaattccactgcctcatgctcaaataactgatcttttctccaaaaccaataacgccgaggaagaaatttgcagggtcaaagccagcaaacacctccgcgaaccggttgaggttctcataaaatcactatcacaaaactcaaaacgacttgtcgttgtttacgatgtcttaatgagttgggtagttcaggatgtcgtttctctccaaaacgcagaatgttactctttccattgtgtctctgtgtttttcggcttagccgtaactcaaaaactcgatcatatgattcatattcctattcccactgtggaatcatgtttcccagctttgtttttagatttcttttcttcccaattgaaacttccaatatcagatttcaaatctgggtctcttcacaacacttgcagagccatcgaagggtcttcgatagagattttgggaaacgaagaaagaaagttaaaccgaaaggtatgggcaattgggcctttacataaaatgataataacagattgtaatgaagacaagagattaatggagtggcttgatgaacaagaggtaaacagtgttttgtatatttcttttgggtcgttgattagcttatctgatgagcagattagagagattgctattgggttggaagagagtggggtgaagttcatctgggttttgagagaaggagataagttagttgatttggggaagagattgagtcaagttccagatgggtttgaggaaagaatgaagggaatgggaatggtggtgagggaatgggtgccccaagtgaagattttggggcactcatctacaggtgggtttatgagtcactgtggttggaattcatgtatggagagcattggaatgggagtgcccttattgacttggccaatgcaatcagaccaacctttcaatgcattgttgattacaaaggttctgaaagtgggtgtggctgtaatggaatggagtcaaagaaatgagttggttacttcttccatgattagcagaggtgtgaggagaataatgggttcagattcagaagaaggagatgagataaggaagagggttgtggaaatgagtgaaggtgtgaaacaatctgttgaggaaggtggtgattgtcgtttggagtgggattctttcattggacatattaccagatagttgaagacactcgtagcagagttagaagtggttggttgagtaagttatgtttgttattctatgaagttggtattgttctgtgttttcttctctaaagtggtttatatttaataacaatttttactaataatatttatatatttatatataatatgtatgaaattgaaagtgagatgatgtaagagagctctagcaaacttctgtatggttttttttttttaaaaaaaaaaaaacttattatataaactatttcaaaaaaaaaaaaaaatttattttattttttt

SEQ ID NO: 18074 - DNA, 5364 bp, Cannabis sativa
agaaattgtggatacctttcttgataatgaaatctgtgaacaaccaaaacgagacggtcataataaagtttacaagtcctttttggatataattgatgacaaaaaggaaagatttcgtgcatgtattttaataactattatacaaaattgttaattgctaataaaatttcatctaatctcatgatagtgttgggtactattagaggctagctaataactatttttcttatgtattatttaggattcaaagattatcagaaaaaaataggattcaaagaatcaactaaacatgtgtgtacgtaattaattatttgaattttgttttcaacactctaaattatttgaaaattttcaaaaacaaatgagatacttcttttttttttcattatttttttaaaggataacaattttactatgaaacaggtaaaatctcaaatacccaaagggttaacaacatacatttagtattcttaacattgcatatcagcttttaccgagttttgagaaattaattataaaataaatagagcttaagaaatcaacaaaacaaagaagaagaaaactaagatttttacatgattgggacattagtgagtcttagtccacaagtcaatataattagctgaaaagctttgatgtattacacaaggataatgttcttacttgagcttataagaaacctaatttcaatattagtgtttgaatcacgattttctaaccctttgaatgaatatataatctcctatttataggctagggtttagactgttaggattttcttacgaagctagacccactaatagggtaaatacatttaatattaactttggataaattaggaaagacccaatttataagattacatcatccacaatcatggggtccatttaattttgacaattgttgcgcgctgtcagattcatacaatgaatgtcgtaggatatggtgcaaggtaaatccataatttagtgggttcctgtatcgaaggatctccacctaagcctttgtttctggatgtcttttagataatccttatgggaatacctcgtgagggtattcagatatgtaattttaggccttcttctggccgaaaaccctccttagacttagacggtctgtccttataatggatgaatttaatatattactgaacacaaagccatagaccgattcccttagtgggctgacccactcattttggctcgagattgggccttcttgaagtgggacaaatcttagaagtacacatgtcatcttttcgaaaagatggataacatttacacccaagcctttaggctcgagagttgtggaggtgtgcagcttcactttcggattcattgtggtacatggaaccatgtatacttttaggcttctggaatttcaaggtatcaggtcgtgaatactgataaacctgtgttttttccatgtggaatacatgtggcattagcttcttggtccgtgtggtctacacgtcttggaaagcaaatgccatgtttgggtttgcgagatgacaacgtctgatcacactagcaagtttctcgaggtaaatatcatcattattttgcctcgattccacataaggcatgaaatgaaacgtccccttcgcatgccctgattgttggatcgtgtttgtgtttttactggaatatggtctagatcgttgaatctgaagcacacgaatcccctatgtataaatagaattgaggttaaacagttaccactttttaccattttgaatttttgagctccaacttttccaatagataaaactttacccaaagccctaatttttctgtgaatgttcaaaagctgacgagatctataaccatctccttcgattacgttcaagattattgcccaacgcacccctagtcgtcaaaatagattctttaaagcccacttcatcgtcgaactttcaggctgacatcaacgagtttagagagtgacttaaagctttataggggaggcttaagcgtattgattgtatacctgctattacaccttcattatccatatggaagtacgtacttctgtccagagaggttgaagcatgacaaccaaagattagctccaacaccctcaccttccatacgtaagtattttactctgcacatttttgatccataatggtgtggttaggtcttatgtagggttgattatggatcaatcatattgcttagaatttttagcccctttatagtttgcatgtattgttttatctgtggtagcatttatggaaaaatctcgttaaaggaacttcacattgatgaagatagaaacatttgattattatttcttcgttgtagaataatttaggttatatgaatagtgcctttttctgcttaaaattattgtcaatttttttaactcaacagagtgtgaattgttgtgctaaattctttcgttcggaatccgtatggtgccagatgaattacttaaagatccttttctccatttctctagtgttcctaatctaatcatccaagtgtaatgttttcctgaggacattactcccgggtgtaggtttcggttggaatctctccaagaaattataagagaggactctcccgtgctgttgttgtatttgttagtgtgggatactagctgcttggcttctaattttgttccaacatctgatatggccaacataacccaatcttcggagaaagcgatggttgaccacgaaggaggcatggtttgggaagaaagagtttcagaaccggtaacagtaaccaatccatctctcttggagatggattattatactaataagttccacaattcttggattttttttggaacagactttcgttgtagggggagtcgccatgctcctgtatagatagtttcggtatttagagctggaatcatgtcgaagtcagagcacacctttcaattcgaagttactttgctcatttctgtgcgaaggtgggtgtggctccatttcaactcattctgcgggtgtacaaactactggcagaatggtacgtcttttgcaaggaccagttagtaaaagtctcgtctcctaatgaaatcctttacttttaccagttagattcgaatcccatgtggaaggacaaaactatagttagctttatacttgctgaagaagcgatctgacgtggtatgtccaaccagtacatgtaaataaactcaggacttccgagaatttcggttcctcacttccagatttccattaaaaagttattcgtctcttttgttggaattttgtgttgtgtgtgagcactaaacaattttccatccttcaaaattcatacttttatttttgtatgaagattaagcaatttgttataacctctcactattgatttcgtgtgaattgtacatcccaaaatgtagtgtttacttttgttgtgacaatttttcttcataagatcttaagctttgaaaataaatcataaaagattaattttcacactaactcaattttctcactaattttaataccaatcatattaaaattaaacactaatttagacatcaaacatatataaattatacaccaattattagacaccaaacatgcttaaatatcacattaaactaatttagacactaaatatgtacaagttacactttattttaagacaccaaacatgtctcaaatgtacatatttttagttttagacaccaaacttatctaaaattctcacattgcagtatcaccccgcactttcacatttcattatcaagatatccttttgtatctttattaaaaacatagaagaccaatttgtctctatagcccttttaatttcttccaagaaattattttcaacaaattttgacaccaaatatgtcaaaaaattttatatatgcacatagccaaaattgatttagaaatttcaattcaaaatcaaataacttcatcaataatatttcaactcattttgattaaatttgtatctcacccctacatttctactattaaatgaattttcaatttcactctaaaataaattatgtaactctcataagttatgcatacatcgagagactgagacctgctcgaggctcaaagtgtgtaaaaggcatgttgcctgagagagacatgctttttgtgagcagcctactgcctacaagaggcatattgcttgggagttgcctaccccatgcaaaaggcatgctgcctgctgcttgcgaaacggcctgctctctacgaggggcatgctgcttgcgagaggcatgatgtctgcgagtggcatgttgcctgcgagatagatgcatgaggcctacgagtggcctcaacgattgggcatgttgtcaaacgatcccactatggacaattcatggagtgagcttcatcatcccctcgaattagcctggacaaatcctgagttaaaagggctaatttttgagattaacacttgcaagtaaacaagcttcacgaaatgcttgccttcatgcaagcacttcatgacttgattaatctcaaaacataggcctgttaattttcaaggttaatatagataacaaaagtaaatatagaaatttattaattttcttaataatactatttatgtataatacccattaaaaatacattgtactaaatttatgagtgtcttacccaaaaacaacaacaatttatgagtgtcttaattactattattttttttttttgaagggaaattaatataatttaagcgcatctccaactgtaccaagtaattattataaaattgggatctttagctgaacagaaatacagttgagtggatcttgccattaaagatcgatcttgacaatgctcatacattatttttcttagtttctcttttattaatgatcggtccctttaattgatccaaatataatatttaattttatcataatttatggctatgatctatttatatagtccctttgatcatgattgtcacagatttaaattacatacaccatttatatacaaatgaccactcttatatttattacacatattcataaattaatagagaaaataccacagaataaataaaaataattaaaattaatatttgtaatatattgtttactaaaattatttgaaaattgagtgatagtgtaatttaacttgtttacattgtcaggaaatataatcggaatacttaaattaattatttttttttctttttgagttaaactataatatatgatagttatgttataagaaatatttttttaaaaaacaaatttgcattatatatttaatattaaaaaataaaataaaataaataaaaattattacccttaatgacattctttaaaaaaattggtgggagacactattgacatgacagtggcatttgtgcgtgtgttgttggttttgagaaggacaatatcagtgtagtgggtgttgaa

SEQ ID NO: 18075 - DNA, 5407 bp, Cannabis sativa
atagaaacaatagtttttttttttaatttttctctaatgaaatattaaccgatccaataataatttatcattgaaaaaattaaccgatccaatccgcactattgttgattgaatttaaactgttatgcaaatcgaattggatccaaaatataaaatccgcacttagtgcggattggatgttgtttgacaaaaaaaagtggggattgaatctgatgaacgtctctattcgatggtgttccaaaactaaaatggaataatagatcccatcaattcattggacttgaactagtatatatatttggtgttgattttattattttactgctttaattatttttaattttttgttcatccctattttttattaattactattgattattaatcttgtttttgctagttgtttgattgtataaattttagttgatttgatttagttgtaattttcccacatatgacaacaggatggggctctgagtggatcttcaacagatttcggtgagatcagatctatttacactcctatgtatggacataagcaactactgcaaagagaaagaagttactactaaacacagagttagattaatagagacaatgcatatattagagagagaaagagaaaggagaagatcgagagctttgtatacaaaacgacaaagatatactaaaacgaaataaattgttatcaatgaaaatatataaaaggagcattgaattcacataataaaaacacaaaaagacaaacagagacacactatatataaagcaggagtcaatacccgaaccacacccccttgctgactggtgaggccccataatgcatgaatactaatttttcttttttttttttttgtaaaattatttttttttaacaatattcaaacagaattgttgtttcttgagccttaccagaaaccaagggtcatagttggtgcgctcttgactccccctctttaaaactcccatcttgaaattaaaaccacacctttcgtaatctcaacaaacaccaacccaccacctacccaaaatatttaatacccatctcaaaaaacttacgcaacctcaaagtaattcaaacccacttatttaccaaaaggatcatcattcatcactaactcactctactactgcatacgtactcatagcttatagtactatagtccactcaaggctccactactaccatttcatccaaatgctcacacccacccaaacctatagtcacaataaacttaaaaaaaactaaacgaatgaagtactacagatagatagagagttccatttctaccctttttccaaaccctaagtgagtatgtcaaagtaaaggtagaaaagaaactcatagaaaaccctcctccaaaactctctattggctggggccatcagcggtagtagcagtgccatggtcaacaccagaggagctccctgagccaccattattgtcagcacaagtagtagcagcagcagtgctgccgagagcagccatgatctgtcgaatagtgttgctgagatggttgttgatggcattgacactagggaggctgagcttggccgtgggatctgggctagcaaggacttggaggccaattgtaagaagacagccagatttattaccagtggcgttgttgttttctgatgcgagttcaaccggaacaatgacaaagcccgatggaaggatagggatgaaggatggatccttgccctgcatagccagcttgattgcgtctacatccatagtggagtagactacaacactgcctgatttgtccgtacaactctcttgcagcatcagctccatgggttgtgctgagttgctggccacctgcatcaataaatatatatttatataagcatacataaaaaaaataacaatgaagttggactaggtacaatgacatatatatatacaacacaaattgaccgaaaaggtacgagaaatatgcatacattaattcgaagaagagaaatacagtttcctgggtcggaaccattggcaatgtgatctattttttgtaaagaattcccatttgaaagtacttcaagctgccaaacaacaatgtattagttagaatgtaagtcgaaagtaaataaaaaaagaaaaagaaatagcatatatataataatacatgtataaaagaactataattagtaaataagattgttatggatgatcacctgggatctacggccttcatccctcaatagattaaagacttggtaatcagggaatggtagaaaagtagttgaaacggcgctaagaataagaccattgggttggccaggctgaggctcagtaacttttcttgtggttattctaactgtgtcctccggattatcagataaagctgtccataactgtccgccagaggtgcttatgttcacacaaaaagtcctaaacattctctgtgatagattcatcatgttcttccttgcatcagtagaatgcatcactgtgcaacacaaaattaatatcataatccgtaaatttaacaacaaaagagtaaacatgcaaacatataagatgcaaaagaaaatatgtatatttcaataaaatgtgtgaattgtagtatgcaattgcttcttattatgtgtgtatgcattgacaaaatatacacagaatcacattctaattaaacatggtattatttttagttgtacggtacatatacgattaattagaatgttatacatgtaatatttatataaatgttaagagttacctccaagatcagtaatatttctagccatgagacttgcaatcctttcacactgtctcttcaagagagctaaccagcggggagctccaaaggccattccactttggacaaagtgactgaaagtttgatgaactgtcttctcctggtctatctcagcatgttcaacccatgtgacctgtatatatgtacgtaaataattataataaactcatgaaacaaaataaattacctatcttatcatgaaattacttctagcattcaacttcagttttatttagcaaggttattatatgttagaatttaggatgagagtgagtgtgttagaattcaggaaaaaaaatgagtgtgtagggtaagttgaaccaggtttaaaaatgaattggtaatgagagtagaattatctttctaacatgtacctcgagagtcaagatagtgaaattacctaacatgttcttcaagataatagccattttttacgcactaatcttggtctgctagaatacaaatagctcttttgtcttattattcccaaaacacaagtaactaaaatttaggatgaaattcggtaccatgcatgaggcactacaaatttttttacttttagttacaacaaaatttatgaaaaaattgcgactaattataaataattatttttatgttttgattaaaaatttagtcaaaaagattacaatttttgtgagtaaatgtgtatttagtcacattagttattactgtaaaaattaaattagtgataacttgtatataaataatatgttttagtcacagatactttttaattgtaactaaaagattattactaaaaataattttttttggtagtggaattctatctccaaacgaattgataattagctagatatgtaatttatggatcttatataggtgttatctttttcatatgctaaagactctcgatcaaacattataagataacataacagtgtaaatatattgtaatatttagttaattaattactatatgtacgtacacttgagtatccatttggcatatcttggatgatacagccagaggggcgtctcctatatctgggaagtgaaggttgatattgaaggatatcgtgaaagctgtcaactggaaagtcaacgatgaaccaagttctttcgtggtcagggctttgctggcaatatcggagaaaatgagcttccctagtgggaaccagtggagaaagatattgtagctcagcaaacacctgtacaagtaaatcaataatttagaaatgtgccaatattattgaacatttcgtacgtagaaatttttgacgaaatgaaaatacgactagttaatgttgattattgtaccagctgaagtgaaccattgattggctggccagaagcatcggttgtgattacttgaagggttttagctcttgagaccatagaagggaacaagtccatccacttactctacaaaagttaccaaaacaacacttcaatccatatcaagacgaattaataataaaaaatatatatacatagaagaacatgagtttgggagttgagaaagaaaaaagttaaaaacctacacaatcaaggaaagattcaatcagagtgatgctattcatgataacaacatcagtatcacgagttgcttcagtcttgaaaccgctcgagtcattattttgcttgaggttcatggcccatgggaacatccttgcatgctcttcaacgttaagaacttccttcccattttcagagtctcgaatccagagaggcgagcccgactggcacatcttcaccagctcgttaacagaagaggtggcgagttcaatggcaagtgatttttcttcttcgaggagaagaccattgtctgggaagggttcctgatgaggcaacattggaactactggaaccatgttgtgaccgtttccagttgccatttggtcagggaagtgcctagagtagatgctaatgtccaagtccaaagatggtggcattagaggatgatgaggacctccaccaattgtccggctactaaatctcggagtcatgcagtaatatcgatccaactgatggttttcatatgataacaactaaattaatttttatagttgaacaataaatattgttaataataaaagatcagttttgctatttggtagtatatagccagtgtccaaggccacatgcctataaatttaaagtgaaaacataaatttattaagaaaaaaaaatagcatataacatgttttctattttatataaatatttacatcagatatagtaagcaggaatattcattactctttaagtttttgttttttttaaatacattactcttaaacttaatttattagttctttaaaatttaaattatttttttttgtgtataagttaatattatatatctaaaataaatacaatattaaaaaaatagaaaaaaaaattaatgtaaaatagatattttaataatttattttaaatgataggaaaaagaaattattgggtgctcttatcttagcgatactcaaaacaaatattcccataaatataacaatttttcgatggctttatatgtactagtacttatataataagacaccatactacgctttgagataattaatgaccaaaattaaagtttgtaaaaacctatatagctaataaacctgagcacactaaaattaacaatgttatattattaatta

SEQ ID NO: 18076 - DNA, 7215 bp, Cannabis sativa
gagagagagagagagagagcttctatttttctaactttggtatttttgtaaaaatgaaatatataaaaaagttttattaactaataacaatctataatcagcctattaatcttactaatgtccactaaatgacaaaataataacttaggcaaaatgaccattttgtccttcccataactaactaatcataaaatcacctaggggtatttcggtcacttctagaattccgactattcccgacattcctaatgtctaactatattgccccattgtaataaatatactaagatgtgataatagccaaccattgcgttccactattttcaggcacaaaacatgcaaaattataaaattccatatatgacatataatatgcattctgaattcaaataaatctccataaatagataatttcaaactaatatgcaagtttcataattaaattctaattatatgctaatttccaaattaaagttaagtggactttacagttaaaatctcccataacaaaccaaggcattagaggggccgtgtctcgaagtttcttcaacaattcccaagtaagaggtctttgcaaagcattgggagctccataagaactaaaaaagtggcatgagggaccatcatcaaaagccatatagcagtcaataaagtttattccataattttgaaatagttacatttacattagatttccaaaaaaaaagtaaacccccactaagacctattctaggaacttctacaccactaggaaacttaaatgcattacgaaatttagtaatagcactagcactaagttagattccataataaaaattacatcaagattattttgagaaatgagtaggcgaagttgacgaaatgctctcagattgttcaagccccgagcattctaactaacaataatcatggtgagcggcgaggctgaacaccagcctgcgctaaagaagcaccactgccatccgctaccagtgagaaattagacaactcagaggaaggattaggttgttggtgtagattatggtttgtagagtcaacaagaggagtggctttaatgcaacaacgtttaaggacatttcgaacattgcctcccaaggtaaccaattgtcttttaccaaatagtgaaggcattctattctctttcacagaatctgattcaacattaaaactaggtggcatcaggttaacttcagtagatgtaacagtgttagttgttacaatattagaactagcaatcactgcttctatttgagagcctgaggtgttggaatgaagagaggatgaagtatgaagatatgctggagggattgctatgggaaaagcaactaatttaatcagatttgcggaggaagttggactcaaattgtcaaagtattccttagatttattgtgtgaaaaatctgcagttggtgagtggaggtgagtatgctttgatctagacgactaaccaaaatcagaagaaaattttggttggtcggcaccataatttctactgttaacattctcagttggaggagaattagaggaaatgaatttctcttttggaagtagatcaatggagaattgaggaatactattttttagcaccagatctcgagtacaatgggtgtcaatggagtgattgggagactcaacaatgctttttcctttctcacgattggttattgagggtggaaggacaggaggttgtctagagtgagagatgattggggtaatggtgttccgagcgaggcgcataatgaaaggccatggtcctgctattgaaaagtcttgcctgtatcgattgtaaccagcattaggtagagccgaaccttccatccatggtccataaggggagatccggttcttctccttcatcaagttttactaaaaactgagaatatttatcaagaacatgtccaattatgacacattcattgctgaaatccgataatcgtgcataacgatactcaagccataattcatcaaacatccatgggaaggtgactgtttgtcctctaagtaaaggcttggaaacatcaacaaccactctaatacgtaagaaaggaccccaaccctcattaagagacttttcatggacatcaatgaaagttccaatgagattaccaataacacgtgcaagagtttcagatttacttaaaaatggtaacctgaaaacttgaatccaaaaagggattgtggtataagaatccattggagcattctgcagattacttgagaggcatagaatcatatgttggttatgaaattgccatggttctttagacaacactctcttgaggtctcctttacagccaaaagagaccatatacgaatcaaattcgtagtttgaaattgtgacatcgaatcttcctttccagtttgtaatgatgaagttgttgaattgctttgggttgtatcctttgcgagagaaaactttacatatgagacggtgagtagtaggacgtggtggaggagcagcaatgttagtcaaatttattacttcttgctctctaacaaataaggccttggaaatgtcagggtgaaacaaatccatgatgaaattaaaaggtaaaccagagaaagaacacactaagcaattgaacaaatatgtaggaagagaaaaaactgagaaaaaataggggaaaaggatatgcagaggaagtttattaacagcggaggaaggaggctagagtagttattgatagaaaaagtggaaaaaaactgacttgaaacagttaaaatgaaaaaagggaacatctgccacagagcaaacatgaaggggcagacaatgaaattctatttttttttaattattataaatattatcaatataaaatataaacataatgtttatacataatttcatatttggttatagtttcgtttattaaaacaaaacaaaataaacataaatttttatttttaaacttatttataaacttttaataaaaaaattatattgattctattaaaacattatcataatatatatattagatcaatgatagcattataagtattaataataatcaaatatttaataaaatgtatacacgtcatttataaaacataaacaaaatttttaaatatgtttgtatatatataattttgtattaaattttagtaatatataaaaatataaatattgacttatgtattttttatatttagctttatgcgttttttttaataattaaaaataatcaaacatgttaaaatcgtaaatatttatgtttatttttattatataatgtgaatatgatgattatttgtaaatatttataaaattgtatagaattgtgtaattatgtttttttttttttgcacattttttgtaatataattattttacttgtatataattgaaaatttctctttgtaatatgtataatgtatgattaattattctttactgttaaaatactaattagttacatattgtttttttttaaaaggaattagctacatattattgttagtcatttcactgtaaaattatttttagttacactatatataatttataactctgtccaactagtaacattattttagttaaatttccatactattcattagaccttcaactaataggatgagaatgtaaggatgatgagcataagccattatttccatgttacaaacgaaagaagtccaaactaaatgtctcacacctcttcatgctaaaatgtagcaatgatacatttccattttcctctaactttacagatgaaacagaaaaaaatcattcaccaaccaaaagtcttgaacttaaatattcgacaagtcgatggtacgttaaagaaaatcactcgggccgaagctatcctcaattgacaaacaaaacatgctagcccaaaataagaccctccaacggatagaagagaaactttctacggtcacccacagactcccttatgactagtgttattataatttaggataacatgaatgtggttccatctcaaaatcaattgactatgggataagtagctaattcacctaatatattctattatctttccacactttaacaatgtgggactctctaacatcctctctgaagatggtagctattttatttgctcaccatcttggacaactcgatcataaccaggttttttttttggctcactatccctaatcacaggtggctcttttgctctactttttggattggtatttttggatctttgttggctcttttttttagctcactattcccaaattacaagtgcctttttattttatttttggctcttggatcagttttttttttttttttttgtggctccttttttttggctctacttcgatcgattttttttggtcagattgtcgttagtggtttttttgtttgtttatttttgctctgataccatgttagaatttgggataatgtgaatatggttccatctcaaaactaattggcaatgagaggagtagctcattcatcttatatattctattatctttcaacacattagcaatgtgggactctttaacatcccccctcaaaatggaagctattttatttgctcactatccctaatgacaagtggttcttttgctctactttttagatcggtatttttggatctttggtggctctttttttggctattcccgaatcacaagtgtttttttattatttttggctcttggataagttttttttttgctggctcctttttttggatctacttcgattgggtttttttttgtgcgaattgtcgttagaggtttttttgtttgtttgttttttgctctgataccatgttagaatttgggataaggtgaatggggttccatttcaaaaccaattggcaataagagtagtggctcattcatcttatatattctattatctttcaacacattagcaatgtgagactctctaacaactagactcgtctacgaaatttcacaagtgcacgaagaactactatagctggtcaaatccagataagttccccaagagatttttctcgcgaaagaagtagagctaaagggtttgaagagctagcacatctctatacaaactcaaactcaatctaaagaaagatcacctctcactccaggcttagactctacaccatgggtattttcaacattaccaaaatttgcgcaaccgttagcatcacccccataaatagcagaccgaatttttcatctaaaaagaattcaagatgaagataaccttaaaagaaagaagaaacaaaaaaaaataatcaaggccaatacagtactcaattcatgatcaaaaagagaaatgacattacaaacatcatccaccagcactatctaaataatctcacaaaaatcaatcataatgcagagatggaaaatttagatgacaacaatctgtcatcatcttctagccaatctgatgattggaaaactgaagaccaaagcagcaatgatgatgaaaaaatttcgcctcttcatgacaactaacctgtaatgaccgcataattaattcggaaattagtagaacattatctacttaataatttatgattatatgtgcattagcagaaagtagtcctattattagaaataggcaatagtaatataatttctcagttatggagattttattaggttcgagatgtgttatgcatgtcatatatgaattttagcatttttatattttatgctcggtaatagtagaaatcaatgttttggccaattatgtcacttagatgcggttaattattttagcattagttgtgcaagaattatgaatagttaaaatgtcaggattgattggggttatagttttggatcattttatccctagagtataagcttatttcatagtgaagaaaatgggcaaaatggtaattttgcttggatatttattagaacctttaagtgtattttctagtgaattctatatgataattaagaattataagttgaaataaaaataagtgtaatagggataatatcaatttataaaccaaacacccttctttgcatctctctctttctctttgggttggccacaaggagacaccaagggaaaactagacttttgttgtgagttcagcccaaaaactagggatttttcagctgagaatttagtagggaagttaagagaatcttaaaggtaacctagtctaactcttctcttggttatttttaagaaaagtttaggttttacatgtgtaattgtggaactcggttccgttggaagttggggatgttagagcttgtattgggagttaaattaagattatttaagctttcataggaggcttattgcagtcgtgttagttggaaccaagttttgagttttggaagctcaaagccttgtctccaatggtggattttcattcagtgagtttttgttgtgtttatttgttgggatttgtttattatgcaataattaagtgatctagaaagtttggttgaacttgggagagttttgagcaagatttcaaagttttgtgaaaactacagagaaaaatggttcaccattttctcataaacagtgaactagtttttctagcagaaccccaaaaaatggttaatcgtttggggttttggttcactagatttttcaaaagagccttatttttaacattttatcgatatttaatgtattttcacgctatctatcaataaggaaacttttagatttaagtttaagtccccgaaagtgatatagcgggtcacttaccagttttatgtgcatgtgacttaggacccctaaacgtctagcaattgtccactcagtttaactgacacacttgattatgtaatcaaggtaagattaatataattgtttcttatttatatacatgtttatcatgcatgtcagttgccgtcaaaataacatattagggtatcagtgaggtgtacatagagttgcacagagataccaacagatatatgttaggcaaatcaataagtcatcagattaacatatcagcaaatcaatgaggtgtacatagagttgcaccgagataccaacaaatatgtgctagggttttagagagtatgagttattgttatcactttgatgcgactagagtgttaagtataggcttatattatggtcaatcgtactttatcaagaatgttcctgacctagtcttagacctgtaggtaggtgtatgggcgcctggttacaggttgattatggttgtacatcgatcggtttgggcggtttatcctatatattttctaacccaatctaaagttcgggttgctaaaatttaagtg

SEQ ID NO: 18077 - DNA, 6581 bp, Cannabis sativa
tgttagtgtgctttcctagtaaatgctaattatatattatctatatatatcagttatatatataatttgataattataaataacatatatatgccgaaatttaactcaccatattatatatacatatcatatgatcatgattaatagtaaatactaattaataacttttatttctcattatatatatagctgataacgcaattaatataattaaacaaaatcaaataatacagaacaagaacaagccatattaaggcatatatgtaagaaaagaaattaagtacatagatttaatttgctacataataagttcgttgccattaaaggcattcgctatatcatgatacatcaagaaattgctacagaaactatccctctcatcttcctgaagtagtagttgttgttgttgttgtagtgcttccactattcaaattattataagtattcactggtactgaacttgacgacgaaggcgttgacagaagtgatgatctaccaaaagtactcattgtattattaatattattgtttggtatcatcatattcatatgagtagtgatctgaccaataccattattaccggtgccggaataatcaagtcccggccgttggctttttaccggcgaagagtttagaatcaataatgttgtggaagaggacgaagatcgagctgaaatatatccgctatgatcaatcaattccataggagcaacagtagtggtaatagtagaactctctacacctgtggctagaccctgatttgaaatatgatataaatcatggttttgttgagattgatcatcatgaatagttctttgagggaattgctccattttggattgcatgaatggggtttcgcttagaaatgggagctgaccacaatattgagaatgatcatcattattatcatagatttggttttggttttgaacaatgttttgtggcacaatattttgctggttagatgatgataagagagctgaggccaagctaagcaagttttcgttattcacaagaggtggtcccatgtttccaagcagattattgttgttgttatgattattattataattattaattaagtaactgaggtgagagttgtagagtgttgagttgaggagtgaagacagctccagaagatcaaggcgtggggtgtgagtcactggatcaattcccatcttcagtagcctctttctgatgtgagtattccaataattctttatttcattgtcagttcttccaggcaatcgagctgcaattgcagaccacctaaagatatataaaaaatatgtgtttatattaggtataacaagttaatcatgaagaagaatattggaggttattttttttttcatgttacaatgctggtcattcattatttgaacttaaaataattgacaagacagctaatacatttgactttcgcgaacaattaaatataatcaaattttagtgtgtgtgtccctacaaaaaagaataataaaaattatagtgtgtgtgtgaaacaaaaacatatacatatatatataaatatatttgaattagctagctagttatatatagttaagtagtccttgtacaaaattatatcctatattttaaataattgtatggaaagtatggaaaaggataagtcttcatgatgtttctacaattatataggataaaataaaatatatatgttaccacatacttgtttcccaagacactgtgtaattgaattatggtctcttcttcttcaaatgagaaccttcctcgcttaatgtctggtctcaaatagttagtccaccgaagtcgacaactctttccacatcttttcagtcctgtatataataattaatatattataatcaactaaatcaatacataacttacacaccacatgaattaataaacatattaatgaaaaagtgcttgtgattaatcatagtatatagagataaataacaaactataatcgaacttatatatatatgtctacctgcatttttgggaagggttctccatctaccatggccattccttttaatgtgatcaatcaaagcctgatcttcttctggtgtccatggaccctttttcagtccatttttttcacaacatgttatttttcccatactaaattcttaacttgattatatatatcgaaaaatatgagtgattcacaaaaaagtggatagtgatcacaagagatacaacaataggaagagtaatgaattagatagctagttaatttgttgtgttagaaaagtgttttttgagctctgtgatatatgtgaaaggaaaaaatgacagaagttttagcttggaatacgtgtgaagctgcgtttgtgtatttatagaagagaaaaacaactatttgtcaatgatatttggaaccggccttaattttcttcacccctataggaagacgtgtcttcatatcagggaaacttttaaaatttaataattattaagaagagaaattaaaggaaaaaaaaaaaagaaaaacaaagaaaagaacagtggcaatattctctctcttaatatcgatgtcaaatgaggtcacgtaagccgcatgcaaagatattactacgtaaaatattcagtggggtaaaaattgacagtgatggctgttaggttatttcacactgatgttatatatgatattgaaaaatgcttagctttcttcgtgttaatttgacttaaatggctactattactgctaccgctggcacgttttgattgattccaatttgtgaaaccaaggtcaaatattaatttttgtactttgactaaaatttatccacttttggggttttccgtaatttatttaatgtgggtaacatttttatctttaaattttttaatcaaaaataaaagtaaaattttttacttttaaattatttttttttaaaaaataataatatgttctatttttcaattttaaaaataaaaaacaaaagtgtgttttataaattttattttcatttattacttttatttatgtcggatataggattcgggtaaaggatctaggtctggggctaggtgcaggaccgagaggttcgagttcagggtcagagttggggtcaggtttcgggtccgaagtctgaggtccgggtcaggttctaggtctcggtctagggtctgggtcgagggtttgactcggggggtctgggtctgggtgggtctggggccggggtcggggtccagggtccgagttcgaggtctgggttggggtccgagtctggggtcagggccaagggcccgggtctgaggtttgggtcgggagtccagtttggggttaggctaaaaatccaattccaggtctggggtcgggatctagtccgagtctggggtcgaacttcgggtccaggtcttgggttcagcttcggggtccgcgtcgggattcgagtctggagtctaggtcgggatttgggtttgggcttggggtcgggctccggttctgggtttaaaggtctaagtttggactggagtccaaaatattaattaagaaccaaaaaaacaaaaaaaaaaagttttaaaatatttaaaagtagtttttttttttcacaactttgaatgttttgattcccaattaaaaaattaaaaagtgaaaacaattttatagaacatgattttgaaaaatattttcacttttgatctaatttataaaataaaaaactgattaaaaaacagttaccaaacacactctaattaactctaattataattgtttcacattactaataataaaataattatttgcccctaataattatgtatggcgcaatactttggcttgtggttgtgggttaagaaaaatgttaacgggatacctcaagcactacaactaagtcgatgtatttttatttgtgtattttaatatcgaacttcacacaatttaattggtgtgttttaatatttctctttaatttgataaataatattaagaattactaaaatacaatacaacatatcctccaagatagacggatcagtatatgactactatggggctatagcctcaaaaacaaattatacataaaaagttaattttttattttattttattattagataattaaaactaaaaaaagtaaaaaagtcccacaattatatttgataattaattaagtcattgtcaaattaattaaatatattaaagtacttattttttttttaatatagggataaatatgtttttataacaattagtcccataaaataaaaattttaggttcatcaccatatattattatgtattaaataattaaggtacctaatatcaatacttattttttaaatatcaaaattcactttaaatagcaaattttacttcgtcttctttttagtataatacattattgacttgatcatattatttgtatgatttgatttcttatttttattttagaaagagaatatggagtataattatagatgaaaactatagtaacagtactaattaataataaattttagaattagaagattataacatcaatatatagaacatcaatatatagattgatgttataataaaacaaatacaaacagtttgtccttgtcaaataatttttttcttatatatacttttttgctttttttgtttttttatgtattattttttggtaaataatttcttacaacttgttgttgatactttaacttatttaatgtcatatcgatatgatactaagtaattagttagtaattttttttatcttttgtattttattatttttttttatgaatgatttgtagtattattttttataaataattttttgtactattattttttcggtgtgataccttaaaatgttcaataccatatttattcaaatacacaataattggttggtatttttctaaatcatattaaattaaaattggtggcaactcatattaaaatgcatcaataacaatatattaccttgtgttttgtaccttaacgtatcccttaacattttcgttattaatatatacatatatttattaacttctattagaattttattttttattattattagatataaatttacaatagcatctttaataaaatatgtaaaaaaatgtaccatattttgccaaaaaaaataacttgtgatattttgcattaatttttagtattatacataattgtgaaaattgatttaaaagttatttttttttacttttttttttgttatgaataattttaaataagtaaacctacactatgtcttgtctcaatataatttctttattcaacaattatttaattataatttataaaagtaaaatgtatgattataacacataacttttttttttttttatagaaattagctgaggcttgtcctccacacgcctagtttttatatatatatgtgtataaaagatgtgaatatttaatagttgtgccacctgacggtgatgaattggttaattatcggacaaagtaacatgtaaatggagaataggcatattgctttatttcttgtttgtggtggacaaattccaacgtatacgctgtcgccacacacaatatataactctatgtgttatcaaatgacccttccgtagaccgagctacagtcaaatccctgtgatctttatatgcatgtatatacaattaaacaacaagctgattcttcttttcctttgcttttataaatcaagtatgtagattacgcacaaaagcaaatccaatctaacagcacaaaaatatttggcttgattagctcttacaacttatttctatacaaaaatgctatattccttcgttacaatttatcataactcctaatgtttcttttttctaggtaaaataaaagaaattctaactttgatatcttacttaataaatttgattagtattggaaaacaataaactaccttttgtgacaaaaaaatatgataaatatcaatttgtctcttaaaaggagaaagtcttgctcgggaaatgcttctctggctgcattgaattatacctttagatttccagcccatccaatgtgttttttctcatttaaacaaatctcactacagcagtacttaaaaaatgctcaacagtttacccttattcactacacactaaaagaggctatcaaggcatacattaaaccgaaagaacctctcctttatttgaaatctattcttcctagccaagcacaagataaatcgatgtttaggaattaatattaaactgtaattagttaaattagttaatgctttgttattgtgtttgtctttactgttaataagttggtaatctgttatttaactaactaattggttagttaatcctcaccgacttaactcttgtaaactaagtaccataaaagcacttcctctgtttttttattcaattgaatttgagaaataaaatcaattcttttctctctcgttttctctcttggtttatctcatggtatcagaagacgcaacttcctccatggccagaccatctaccagatcacaagatggaattcttccatcaaatcttgagcatcatcagtccgagactccacctgaagacatccctgcttcgattcctccctcttccgctgcccctagtcgatctacacggcctcgatcgcagcttggtcctg

SEQ ID NO: 18078 - DNA, 10567 bp, Cannabis sativa
gtgacaatatttagaatgaagatggtggatggggattacatgtaggaggccaaagttcaatgttcggtacagcttttaactacatttgtctgcgaattctcggagaagaattacctaaaaatggtgaagaaaataatgcttgtgcaagagcaagaaaatggatcctcgatcatggtagtgtaacaaaaatactctcttggggaaagacttggctttcggtatgcaaaagttacattaaattgctataattttttttttggtaaatgagttaatatattgttcaacatatcaaatgtacaaaactattacaacatgtacaaattagttgagaattctcaacttatcaaactaatctaaatcctctttactaattttctcttttttgaaaagagaaaacctatcataaatttcaatcttaactctgtttattgaaactttatacatcttcacctcccaaagagcaatattcctagtttccaaattttatacatctctcttgaactttgaaatatctacacctttttatccactttaagctggtgtttagccttggatttttgaccatgattccttcctgtccattcaaacaactcttggttgacttctttactataccaacaaccaaaaaaattgacaagagacaagtatcatcagaaatgatactaaattaggagaattatatctatttcatataaagtaattaattgttataaattaagataatgcataatcatttatctttattttcttttttgtagatattaggagtctttgattggattggttgcaacccaatgccaccagaattttggattctcccatccttttctcctatacatccatgtttgtatatttatatatttcaataaactttaaatacctatattttgtttgacatatttgtgttaattgatagttttttgttttcttacaaaattgtagctaaaatatggtgttattgtcgattggtttatatgcctatgtcatatttatatggaaaaagatttgttggtcccatcacaccacttattctacaattgagagatgagctttatgctcaaccttataatcaaatcaattggaagaatgtacgtcatcaatgttctaaggtatgtaattcattaacatgcagatataatattttagattctgtgttttgtaaaaagttatttgttagactttgttcaaaatacgtatttttcaaaatagtatcatgaattgattttttgttcaaaataaaagttaataatgacctgatccagtgttgtttattaattatgacaaaatggatacattttctgtatctttttatactataaattgtcttcaagttcgttatattaaaaaaatcaaaaaattgagttcagggtatattttgtactattttagaaaatagagagtccaatttattattttacaaattaaagagtttagtcgctaatttttgtaaaacgcagggtctaaaatattattaactttaaatactaaagattgagcatcttaattagaatgtctaaacccctttattacttcgttattgttataaataattatcgaatcttacttacgacagatcgttcttattaaaagttacttgctacataaatatatgtaataagtttgtgtatattttatctgtatacacatatcaatactctttaacacacaactaaaacatctattgtacatcacttaataggttggtatttatatttctatcttcataagttaatattgtacatgactttattatataatattgtaggaggatctttattatccacctcattggatacaagattttgtatgggatagtctttacctatgcaccgagcctttcttaagtcgttggccgctgaaaaaatttataagagaaaaagctcttcaaataacgatgaagcatattcattatgaagatgagaatagtcgatatattactattgggtgtgttgaaaaggtgatagaaatattcaagtatcattgagatattgtttattatgatcatgtttcaaaaataagattctacttattgcatagaatacaatttgataattcagaaattttcttatctttgaaatttacatgacttatatgctataaaaatttaaccaccatgcaactgtttttagtattttgggagattacaatacaataatgtgaataaatgttgaaattagagttaaaatagttcattttccattcttataaaagaacatatcaaacacacatgtaacaatttattttcagaatattagctaaatacatactacaagtatagtgtacaactgtataccatcatataaaaatattgagttattatttctctgtatacttaaaaattctcgtatattttataaagttactcacacttcttatttaaaacagacattatgtatgctggcttgttgggttgaagatccaaacggagactatttcaaaaaacatcttgctagggttccagacttcatatggattggtgatgatggattgaagatacaagttagtatttatacttattataaagcaaattaaaacataattattttagataagcatcaaaaaatttgaaaacacacataaaatttcaccattcatattgtttacgaattaatgaataaaaatatagagagagagagagatttatgtgatatttaccatatgataaatattattttggatcttatattttgtaaaagttattgattggaccatctattttgttaaatgacaaaaaaaaatttgtattttttaaatagtacaaataggaccctaagctcaatttttgacaattttttttaatataaacaatttgaagacactttttaacatgaacatgtatagaaaaagtaactagatttgtcataatacctctatatattatcgagttattattaagttttattttgatataaaattagttacgagtactattttaaaaaatacagggtccaatttatcattttacaaaaacagaaaattcaatctaacatatacataatttttcattttattatgaacaaaataaaatctaacatatatataatttacacctttgtttgtagagctttggtagccaattgtgggatgctacatttgcagttcaagctcttcttgcaagtaaccttgctgatgaaattggaccaattctaactaaaggtcatgacttcattaaaaaatctcaggttagtggtaattcaaaagtttagtgtacttattatctcttcaaaactattacctatcaataagtattattagaaaatttttaatttttataattaattttgctatttaattaaaaaaaaaaggaattacccatatactattttttttttaactttttttttaatttacggtttagatttctaaagtggttgcaggcttgcagcgctagttgcaatatgagtttctgtacgattttttgttgcaatttaggttgcaatgctagttgcaataggagtttctatatagaattccgtaaaaatacaaaaaaaattgtttagaagtgtaaaaatgaaaaagacccaaaaaaaaaaaaaacccttttaattttacattatatggttgaggttgttccatcggaccaagaaagagattttatatttttaatttgagttagagaaaaagatgaaagtaatgttaaatataaatatatttttaatatattgtaaaaaagatgagatttttttaattaaatatatagtaaaattaagcatagaaaccttttgattagttgtaattttaaactatataattttgcggctcataatatagttaagtggacttttccgtcctccataccagataacttattatgtaatgatggcccatgagatctaattttatttagttctaatatatttacacattttattcaaaagcaagggtagaagggaaaggggtggaaggagaattaccaaaatcttttgtttaatgaaagggaaaggaaagattgagggaaatgctattcctccaaatcctcaacactcaatccttctaaaaagtgaaggattctataataagacaaatcatttatataaaattacatatatacccttccataaaaataaaatatatattatataataaataatttagcaattttacatttaaatttttaaatatattattatctctttcttttgaacaccaaacaacatgaatgaaagtaataattcattccatccattgccctcatctttaaactctctatctttccaacattatttccttcttaccaaacatagtgcaaatgtaatttgtgagaatacaaatcactaaatatattttttcttgtggaatttattaatttttttgacgatatttatttacacaataattgtaaattaggtcaaagacaatccttcacgtgatttcaaaagcatgtatcgccacatatcgaaaggatcatggacattctcagatcaagatcatggatggcaactttctgattgtactgccgaaggtttaaaggttaattatttagcttaattaatttcatcaccaaattaattctattttttattaatattattaggataaatataattttgaaccttgtgtttttgtaaaagttactgattggaccatctgttttgttaaatgacaattcaaaccatgtatttgactcatttttttgtcaattttcttttttatataatcaacttgaatctaatatttagcacgagcctgatcataacacattcatttaagttttaatgtgacaaaaattaaactcaaggtctattatactattttgaaaaatacagagtttaaattgtcatttaacaaaacagatggtccaactgataagagcctattctttactcatatgattattcactttacatatttcactgtaatcattatgtcttcgttttacacgctacagtgttacttattgatgtccatgatgccaccagaaattgttggagaaactatggaagttgagaaattatatgattctgttaacattttactttcattacaggtgagattattctattaacatcttaattaataaaattaaatgtaattagtcaatatataatctagttgactttgacttattttagagtaaaaatggtggtgaggcagcttgggagcctgctagatcaccagcttggttggaggtaattaattagtgtatatagttcaatataaaacatatgattgcaaataataataataataataataacgtttgaattaattgaaattcagatgttgaatcccgtcgaatttcttgaagaaattgttatcgagcacgagtatgtagaatgcacttcggctacaattcaagctttagtactattcaaaaagttgtaccctaagcatagggaacaagaaattcagatgttcataacaagagcggtgaaatatctagaaaacatacaaagacatgacggttcatggtttgcgtcatcatcatcattatttataagtgttttcttcgataaacaaatgaaatattggaataattaatatattattgttgatattgtgtaaatataggtatggaaattggggaatttgtttcacatatgcatcgtggtttgccctaggagcactagccgcggtcggtaaaacatacaacaacagttcaactatgcgtaagggagtagaattcctactcgaaaaacaaactatcgatggcggttggggagaaagctatctttcatgttcaaaaaaggtatcattttcaacattcctaatatcgagtcttcatcttttgaatttataaacactttctttcaaaaaaaaaataataataataatatcgagtcttgatcttgaattaacaaaacaattcgcgtcaccactaatactagaaaatggttcaggtcgatgttattgggttctgccttttcatttcattctttcttgaaagatttacataaattattatttgagattatttcacatatacccaaaaacaataaaaaaatttcaaaaaataaggtttcacggaattttaaatatttttacgatttttttattttatttacagaaaatacaatatttttatgttgtactcttgttaatttgttgttgattttttgctatatatatgttattttttgttgttgttttgatgttattttcatgtaattttcttgttgtttttgtattgtttctaaaaaccccgtaaaaatgtaaaaaaaaaaaaatctttaaatgtaaaaatataatatttttataaaaaaaaatgatatcttatataattatccctaattatttttggtaaaaatttacatatatggtgtattattctccatcttcaaatagatacttttttttaatcataattcatttttgtataattgtgagtctataaatattataggaatatgtagcattgccagaaaatagatcaaatttagtacaaacttcatgggctatgatggctttgattcatgctggacaagctgaaagagacccaacacctcttcatcatgctgcgaagctcattatcaattctcaactggaaaatggtgattttccagagcaggtattatttttttcgaggaatttttatttttatgatttttaaagtataattatacaaaaatatcaatttttcttgaaaagaaaaagttattttgtgaaaaaaaatttagaaaaaaaattaaaattatgaaaaaaaaggtacttagttacccttatggtaactggttactcttatatgattttcccatattttttaatttttcaacaaaataactttagaaaaaaactatatttttgcataaaaaatataaaaactcatcaaaatttttatttcttctattttcatttctaagaattttttctagatagtaagttctcattaatacaacaaaaattacataaaattgaagtctcaattctttttatttaaatttctataaaaagtttaggttaatattattttggactttgtattttataaaagtaaccgattggaccctttatttacaaaataacaaattacaccatgtattttcaaaataatacaaaatagtaccataaactcattttttgataatttttttaatataactaacttgaagagtttcaaaaaaaaaaaaaacttgaagattatttttagcacgaacatatacaaaaaatatattcaattttgtcataacaattatagatcaggttatatactattaacttttattttgataaaaaatcagttcagggtattattttagaaaatacaaggtttaatttgtcatttaataaaacagatggcaataaaaaacttttgcaaaacagaattcaaaatgatatttatccaatttttttaactaataaagtcttttaaaaaaaattctcctaaaagtcaagttccagttttttttgtctaacaaataaatattttttttttatgtattgtatatattatatgaaacagagcttagttggagttttcaagatgaattgcgcactacattttccattgtatagaaactgttttccattatgggcgcttgcagaataccgcaatcgagttttattgtcatgcaaagaccaaaagccttaattttacaagagggtgtgagatcatatcagcacgtttattatacagtattcagaatcaaaataaattagtgaaaaaataaagaataatcagaatcaatatttgtaatatgttgtttactaaaattgtttggaaattgaagaataacaataatttatcttgtttaatttatcacgaagtgtaattagaatacttaaattgattaaattgtccttttaaatgacaaaattgtcattatatatttaatattaaaaaataaaataaaaataaataaattattactcttaatgacattccttaaaattttaataaggaaagtattctttttcttttatcccttatttaatcaatttctcctttttttttttattttaataaagtaaacaaatgtaaggaataactaccgtatcattaatttttattatttatcagtaaatatgtcattatattagattatatcataattctgtagttaagcgtgtttagatgcaataaaattctcatttggatgtgactatcctcaaaattaataatcctcttattctaaaacttttcatataaatttagtaataagtaaaaaatgtgtagaatgtatggttgaaaccaactaaagagttcattaaataggaaagtatgtaattcattcaaagcctaattaagccaataataatacactaaacatttctcattattagttcttaaaatagaagttcatgatatcatcacacacttcattatttgcaaaaaacgacactgagaacttaaaaacgacaacaataatttaaaaggggaaagggaaaattcaaagcctagattgtgtcaacttagggtgatgaacaacaatattgttataggcatcaagagtgagaaaatcatcaagtgttgaggtagtgcattgcctagtgaagatcttagaagcctctttatacattcccttcttgtacttctctttcccaacttctttttcgattcgagccatctcttcttccacaactctaccaaacaactccttattaaccctaacaccgagcccatctccattcaactcggctccatacttgagccattgccagttctgaaccctactaatctcggctgttgcagcatcttccattaggttatagagaggcactgagcccgagccagttagccatgctgctaggtattggattccaaccctagtgttgagtcttaaaccttccatggttctaactcctctcggcctttgcaagaggtcttcttcagttagatttgcagcctcttcatgctttgcggtcttgatttggtttggagaattgcccattgtgttgttgaaaacctccatacaagccgggattagtcccgggtgtgctgcccatgtcccgtcatgccctgctctcacttctcttaacttgtctttctttaccaaatcaagggctgcctcattggcttctttgtcatcctttattggaatttgagctgcctattttaccaaaaaagatacatttagtaaaataaattatttaattttattattccacaataaacacaatccaaattttgcttaattattttaaaatgtgacacatattttttttaaaagaaaaatctattttcaattaatttttagttcaaaaatttctagttacaacaaaaactatacgtaaaatgcattttagagttttttttttaatatatattaaaaaaaatatttaggaataattttcattaattactcaatttaaaaataaaaaataaaaacaaaaaattagtacttttcacataccataccgcccatggcgtggacaccgcgcctatggcaagtccaaatgaggcgatcggagtagctcttcatgaaatgttgacccataccaaccaaaaaccgatcgggcaaaaggcgatcgggatgaccttgaaaggttttaacataactaaaaatataatcccatcttccacaattcaacccaacagagtgatccctcaactcatagagtatttcatccatttgaaaagcagccggaagtgtctcaatcaaaacagttgccctaatactccctttttcgatccccaccattttctccgccttctcaaacacacaattccatattttcgcctctctgccaaaacaaaacaaacaattataacacaaacatctcaaaacttatctcggtattgatgcacatagattatctaaacatgcccttagaataaataatgaactttttggttgtaacatttattaccttaattattttaacttaaaaaaaaccctaaaactcgattttctattttagtaccttgagtgctccattttggggagatagaaaaaggggccgaaccccgccccttggccccggcgaaaaggggcataattatggaaaaagtagagaccgaaatcgacaagacaagcggtggccggctcaccgtctatgaggatgtgagattcgggtaaatgccaacctcttggcctaacaaaaagcttggcaatttggtcattgagtttgtaaactctgtttcttgctttgtcatgaaaacttatggtaccattaacagcatcttttagattaatatgaccattcattagattttcccagcttggtgaaagtgcatcttcaaaatcagcctataattcaaaacaaaacaaaaaaaataataattaattatcactagatataaataataatttgttgtaacattaataaaaacacaaaaaatgaataaagaattacactagcaattaaataaaaaattctgtgattttatattgtaaatattatgttctctcaacaaatttatattatcgttaattatatatatacattattatctccatgttttaactaaaaataaataaataagagtattttttgcaaatagaaaataataataataaccacacactatattttttttatatactaataatctttttaagaaattacataataacactatatattattatatgttacataaattatatctataatttttttcgaacaaaatttatatatatagtctgaatcagcaattatactctgttttagtagttgctctgttttt

SEQ ID NO: 18079 - DNA, 5613 bp, Cannabis sativa
agcccaaaatttcgtattatataattatcaatttataatttgattaattatttaattgaatgtggaataataataataatggaactgaaatagttattctgtagctacagaacaaaactttgtaactgaagaatagaacaaaaaattaaaaatgtagaaaaataaaaacatatgaggttttaatacatgatatcaaaaatccatacatattgttactagtccactggactatgcagacccgaccctgggcataggcgggctaggcctgtgcctagggcccacttaacctaggggccaaaaaaaatcctccttttaacattacacattttttttattgattttgaaaataccacattttactctaaataagggccaaaaaaatattttatttcctatgacccactaaatttcagaccggccttgggggataagattcattagatagatctcaagaacgcaaagtaattgacttatgcgtaaatagactccctcttattatatgctgcaagcttaatgtattacacattctcaaatgaatattgttaaaacttcaagtgctcgaactcctttcgatttgcttgagagtcctttcttcctcccgaggcaagacttgagaaacttttttccgaaagcttgaagaatcttctcccgaaggttgcactattgttcttcttctttgtaaacttgattacaaacttaagacaatacaaaagacataaacaatgaggtagagtcgaatacactctcctctacacaacaaagataaccttttctaataataggaataaaatttaaggtaaacaaattaaagagatactaaacttagctgctaattatttatttataatcaatatacacatcttagacagcttatactcggtatgtacacgaccacaactcacaagaaaattctctaaaatagatcttcaatcatcttaggaaaatctacttctgtacctacaatttcgtgagcagaatgtgcaactttccttttatagaaaagaaaactttaattttaattttctttaaacatgcctgatcaaattaattttagaaactcaaatataatcagaccacatagaaaatccagctgaataaataaagagttaatttattcataaaacttaccaattatgtgtaactttttcaaaataaaaaagctagacacctaatatgcttttaatgagataaatcaatacaaattatataaatgcacaataataaaattttgtcaattaaatatgccaaaatgaatttaacgatctctcattttgacaatttgattcacaaaatattttataagaagaaaatccacctaaaatgttagaaacaaaaacaaagagtataaaaatacttcccttgcatgaaagcatagtaacacataaaataaatcaactttttaaataaaaaagttcaacaaactgtaaataaatcgctcgccctaaaaatagggtcaagaattgtaaccaaaaaatacaaaagaaatactactatattcccttttttttgttatcaagaagccaaatacgacaaaaaaagttaaaaaaaagtcataaaaggtttaacaaaacatggaaattaattaaaaattaaaaaataaatcacttaagcatcatcattggattgaaagaacttcatgatgctatccatctttctaagaagaattccttgattggtgtccaatttgcccaaacaaacattgaattctgccaattgtgtagttgcagaagtaaaagctaaggcaacaagtgcctcatctagtgaactagaggatgctaaatgagcctttagctttgatgacttaccttgaggaggttttttaggactttgaaggtaggaacaacaagtactgcatcaatggactcattctcaaggatcaattccctttggtcatataaaatcttataaatcaaatgaaaaataagattaatccttgatttttttccttttcaagggacactatttgagaaaatcatataagccaaatcaattttagtactagttgaaattttaaacaaaaagaatataagttcattagaaacatttaccagattgaagcatgggaaccaaatggacaaggaaaacttcatgagcatgacatgatgataggtgagttgagaaatatgcatggtgttcaagagctcgacatccttatcactagtgagaaccccaaacactttttggcaatcaaacctagcaatcaacataatcattaacaagatcgaccttcaacaaattttccaagtcatgttgatactcatgctggaaaatcaggagatcaagatttctcatctcaatgtcagaaactcatggctatgctaccatagaaagttcaagaaacaacaccatcatctcagtctgctgatcaacttgtagtgtcaaacatttctgtaataacttctatgtccctaaatctacttggatgattgatactggtgctactcaccatgtatggtgtgatccctctttgtttcatacaattcaaaacaattataaaattaccagtgttggattattagaggtcgtaatgcaatttttcttttgtttgaactatacatatatcaagccttatcctcactaatgttctttgggttccaaaatttcattgcaatttgttatcagttacttcattgtccaactcttctaactgttcttttctttttcttccaaacaaatttgtgatttaggatatttcaagaatcaagtgattgggatggatgaatgagttgggcaactctacttcttgaaacataatacattacctactattttctcaataattgattccaaaataagtgatgatactatatgtcattatagacttgttcatgcctcttgtgtaaaaactcattcattgaataaaaatttacaattacaatgttcttgttgttcatatttttattgctcaatatgttatttttcgaagcaaagaaagctaccctttctgtctaatcatcatattgccaaggcttattttgatatgatccatatagatatttggggtccttatcatgttccaactattgagggttttagatacttcataaccatcgtagatgattattccaggtacacttagattcatcatattaagaacaaatctgatgcccaaaatattatcccagcctttatccaacttatcaaaacccaatacaatgttcacataaatgagttagatcagataatgtcaaaaaacttcaattccctaaactgtacacttattttggaatcatatatcaccattcttgtgttcaaactcctcaacaaaactctgttattgagagaaaccatcaacatttttttaatgtcgctggagctcttctttgttagtcttacattcatttgccttacttgggagaatgtgtgaatatagccacttacctcataaaaagaacaccaacttcaaatctccaacacaagtcaccatttgaaattctgaattgatctaaagtgcccaattatgatcatcttagagcctttggatgtttggcctatgtttctacgttgggggctgttagaactaagttctctcctagagttgtagcttttgttttgatcttagggcattatatgggtatgaaagcttataaatttcttgatttgaacaccaataggattttctgttctagggatgttgtgtttcatgaacatgttttcccttttgtctctgctggaaacatgtcaccaaaatcctttgatttctttcctatttctgcaccccatcatcatgcatatacttctatatctgaccctcctgttgctatttcatctgaacttgaaattcatgacaatactaagttaaatccttctgctcatagactgttcgaaatacaaaaaatccatcctatctaaatgactatcattattttttgtcttctaacagtatgcattctcaagttttcgttactattaatgaatatcccttgtctaaatttcttgattacagtaggatgttttctaagtttcgagctactgcgctattaatctcaagtgtttatgagcatgagttctataatcaagctaagggtattctagattggggcaatacaatggcttctgaaattatagctctagaggccaacaagacttggatcattgttactctacctactcatcaacatgctattagatgtagatgggtttacaaagtgaaatataatgcagatgggactgttgaaagatacaaagccaaacttgtggctaaaggatacaatcaacaagaaggagttgattacacagaaacttttgctccagttgttaagttggtttttgtcaaattaattttcgctcctgctactatcaaaggttggtttttacacaaattagatgcgaataatgcattctttcatgatgatttacatgaggatgtgtttatgactatacctcaaggatatagtcctaagggagagctactacctcaagttgtttgtaaacttcaaaaattcttatttggtctcaaacaagcttcaaggcaatggtttaaaaaattctcaacaactctcattgaggaaggtttcaagcattctaccatagatcaatccttgtttattagacataatggagtgcatttaatattgatactagtctatgtggatgatgttattttagctagtaacaatatcaaggatttagaagctttgaaagtaaagctaaatgataggttcaagatgaagaatcttggagaactcaaatactttcttagcctgcaaggtcaaacaaatgaatttttgtttctcaaagaccttataccttgtaatttttggaagacttaggatacttgggatgtaaatccgcaagtacacctatggagattaatttaaaattgagccaggatggtgatgataagcttgctgatcctactatctacatgaagatcgttggtaagttgcaatacttaacgataataagacctgatcttgcttattttgttaataagctcagtcagttcctaacttcacctaggaccaatcacttaaatgtagctcaaagggttctccaatatgtgaaaggaaaacttggataggggttgttttgctctgtcagcttagaaattaagcttgaagcttacatggatgcggattgggcatcttgtattgataccagaagatctactattggtttttatttatttcttggaaattctcttgtgttctggaagagtaagaagcaacacattgtgtctcgatcctctgcagagatagagtatagagccatggctaacaccacatgcgaattaagtttggttgttgtcattacttaatgaattgagaattgagcacaatggacttttgcactgtgataacaagacaactcaaatagttgcaaattcagtttttcataaacgagcaaagcatattgaaatcgattgtcacctagttagacaaaaaattcaagaagaaataattaagacaagtcacatctcaaataagaatcatattacagacatatgtactaaagcctaacttccaactcagtttcacactctcaaagacaaaatagagttatacgatatatacactccgtctcaaggggtattagattgtaagatattgtgtgttagttagcttagctattagtgagctgttaacagagttagtttttcagttactgcta

SEQ ID NO: 18080 - DNA, 4113 bp, Cannabis sativa
attccagtttagtaaacgcgccataaaggtatatttaatgttaaagtttgtagattaaactttctagctcaattctagatttgcaaatatttgtaataattagcgacttcatgcatataaaaattataaactatatgaattacatatacagcatgcttgaattcttcaactaagaaaaaaattgatcaagagatactgatcaaatgcacgcagaatttacagagatataaggtatgccttttctacccatacaatatactactacatatatgtaattggctcccttgatgattttcattcttcccaacgcatcacttaaatatatcatatatatatattataaatttatgatctaaatccatacaataattatataattactgtcaagccatagaggttggattatctttgtcatcataacagtctgccacaaccaccttttgaacattcttgtaagagtaacgacgagccaagagcacgtaaaagcacaagttaactgctaccataatagccagtagcccataaaacttgtctaaacggctgctgttcaagtccttaccaaaccaactcttcccactcttctcagtgatgtggtcaagaattgttatcagaatactgctgagaaaactagatgccccaatcacactcaagtaaaatgcaatccccaaacttcgcatggaatcaggaacttggtcataaaagtactcttgcaagcccactagagcaaacccatctccaaaaccaacgatcacaaactggggtgccaaccaaaacacactcatgggaacaaaagtatttgttgcaacattttgtcgaacagtttccagtctttttttctcgaccagagctgaaactaccattgtgactatcgaacagaacattccaattccaatcctttggaggatgttgatacctctctcatttcctgtaatcttcctcataactgggactaaaactttctcgtagagggtgacagagattatcattccaatggctgcgagggcataaattgatgccggaggaatttcgaagccattgatctttctatccatggtgacaccttgtttgatgaagaaggttgaagactgagcaatacatatgccaaatggtaaagtggctacccaaatggggatcatgttgagaactagcttcatttcctcaacctttgtcactgtcgccaatctccatggatcttctttctcagctgagtcgttgcttatgtcttctactatggctgctttgtccaaaaatctaaaatatccaattcataagactgttaaattactattggtttaactcaaaaattattacaagttaaaatagtaaaatgacatactacaaatattattttagtttctaaaatttagatatttttcattttaattcttaaactaatcaaattcttttatgtgaatactcaagcaattattatttttttctcatctttcattgtaatagttttttattattattattattattattgttttaaaatagaatagccatttcattaaaatgataaaaaaaatattctattagaatgatgttttaatactttaaaatacaacaaacaaaataataaaagaaaaactatttcatttctattctattaagttacctctaaccaaactccacaatcttaaatttatattttctctagttaaaggaaaatcatttactaagggaaattgataagtacaattaattatttgaatgtctatacatgtttaacatattattgtaaatcataatcatggtgagccttagtatataggcgggttatatatctcaaatgtctatatatgtcgtgtttatggcttccacttaataatttttttaaaaaaaatactagtttgtagacaattaaataacaaattttgtattatattagacctcactcgccagcccttatgataatttatgacgaattaaaaatttactccataaaaaattaggcttaaagtgtgttaacttacttgagatttttggtgtgacacaaaagcctgccatgtgacctatctaacttgggagcttcatacaattgaaatgctgggttggcagggtagggaagagccctctttcgaatggcagccacaagaacttgcaacattggcgtcaaagggctcccggtcggtctccggtaacggtagaccggccttccaatgatgaatatggccaaagaaattgccataaccgctgttagtacaatgtcagccacaccccaactcacatggtcttgcaaatacacaatcacagttacaccaatgaggagtccagagcaaaggccaaagttccaccaattaaaatatgacatcttttgttttctttctttgggattttcttcatcaaattggtcagctccaaagctctccaaagctggtttatggcctccagttccaatggatatgaggtatatggccaggaagaatattattacatggattttccttggctcttggcatgtttcaccatgtttacaagctcttaggctaggtgcaaaccatgacatggtcagcagtattaagccctgtatttttccatgtgtaaacaagaatttcattaattgatcatgaccaagtatagaatagaaattgaaaagattaaaaatgtagtataccaaatttgttaatgaactgaccaatacaacttaattatctagttaaaaaagaatcttactacttttgaaaaataatgatttttcctacttttgctaaaatttgaatgagaaatttaacttaactatatatagtactaatagcaaaaagtggaatgaagcactccagctaagttttcaacttttttatttgcttgtaaatttaaaaaagaaattataaattacaaaattattgataacgcgcagtttgtacgtaacagttatgtaatagcttgtaataataccattttgaactttttgttttccaaaatttatcaattagattttctgttttgttaaataataatatggaccctgtaaattccgaaatggtaaaaataaaactctgagcttaatttttgataacttttttttaataccaacttgaaaaataattcttaacgcgaatagatacagaaaatataaatagtttgtcataatacttttaaattggattattattatatttttttgacaaaaaattaattcaggattctatttgtaccattttgaaaaatacagagtaagttcatttaacaaaacagaagatccaattaataaattttgcaaaacacaagtccaaaatagcatttacactttatttatagtctataaatattgtttataaaattgtaacatatagttatgaactaacttaattttgtttacaaattgtggaaaacttcagttccaaaaaaaaaaaaaagaacatgttccaaattggtgaaaaaaaaattgcagagaattaaagattatacttctctatatgtttgtaattcttttcgaattccataattttaataatttttatttatttctcaaaatctttgcattttttgtttcccaaatataattgatattatattttgcaaattatattttctaaattcttaaagaatgttggtgatgatcactattaaaactttaacaaaaatatgtatattataacttaattaagactaaaataacatgtcgactttagtaggtttaataggaagttaattattaatgaaataattaccaaaaggtatacgatggtagaagcaaagacgatatagaagcgacccaaataagagtcagcaatgaatcctccaaacaaaggcatcaatgtagtaacaccagaccaataattaacactctttgctgctgtctttagatcttcatgcattacttttgttaagtatatgattaagcttgttgctatcccaaagtaactcaatctctcactgaactcaattgctgcacacaataaatattaattgataaatattaatttgttggatcatcatcatctacattaaatttatttatttataataatttcataatttaatgaaaaatataggtttaaaagaaaaaaacacaacatcacagttttttttcttttaaagaatctacaactcattatacctaaacaatccttagtatctaccctgtatatgtacatacaaaaattagtg

SEQ ID NO: 18081 - DNA, 2228 bp, Cannabis sativa
ttttaaattttaattattatttagaccaataatacttagacatgtggtagttttgactaacttaacggacttgttaaaataaagattaacatacttacagaaaagatgagcttttaggattattgtcactatttttaaaggttagggactaatctgcatcaaagtgaacttttgtaggacttttgcctcaaatttcgctaaaattaatagctttgtttgttccttcgagtgggtagttgcaatgttgggacagattgctccatcttcctaccatgtagagctagaaggtgtttttttgatggcaattgataagggaagttacacactcattttatacataaattcacatcaaacacattcaagagaagatcaatccatacaggtgtctcttgccatgtggctatggtagtaaacaacacaaaatgaccataagtactatccactcacatacacaacacaagttattgatgagattattgttaaccaggtgagaagtatgggctttcatattcttctggtttttggggattttatcctctaccctattcatgggaatgtgcactctaattcaatggcagtgaagcattgtaaatccataagttgtggtccactccctgagctgagcttggttattctgctatgaacccatagggcccttttacatgtagaataatagtgattagaacagtaaaggaggggccatagtgtgagttatgggcccttaatttcttgtccatcctgggattgtgtcttttaaccttttgtgcagccattatcagaagtgcttgtgtgttgtggggcttctattttacttactcacacccttggaattttattgtcatttccaacttcaacttttcatttctattattattttttatttttattttttgcaactgaaacatttatgcttttttaagttaaaaagtcctttccttttctgtttattcctaaacccacttgggaattttgattgctaaactattctagttacccctcaaagttaagaatatttataacccaaaatatacacaataaaagtagtattgtgtttggattgaacagagatggattagtttcctgacttttattgttcatttattcccttctttcttaagcaaaatttgattatatgaataaatggcattaaatttagaagtggtatcatcatttatgattaagaaggatatatataattgtataatataatccaggttgtggtgatggagtgaaaggaaaaatatgtgttgtcaacatggattggtatggttaagtctaggacacgagattatcaaaccatgaatgaagaaagacatgagagaaaaaggtaaggttggccacaaacttaaaaataaaaaaaatatatatttatataattactaattaacatttataaataatacatttttattgtaaatatgtgagtgtgtagttccaacattaggtactcaagttttcttttcaatttcctatatgacattatgaattgcaatgatagtgagtaaagaaagagaaaaaagaaaatgcgtaatcacatgttttatcttcttaatattgatagcgattgatgcatattggtgtctctctcaccattggttgtgcccagcaaaaagtatacaatttgtggaagcaataaatgtaagtgccaatacatatcctttggctgaaaataggtacacaacaccctttagttttctgcctaggaatgcaaagatgtacaactcaaataatgtttcaatacacaacaattctatcaatcttcttttattattattattttcttttcaatttttggctagtattatatttattttttggtgagtggttctttcgttctccctggaagattctttttaccctttaatttattattgtttacccacatgtcagctcattggactgcaaattattgttcacaaatcacaaaacccattttactgaataaaaaaggagggtacgagatccgtaatttggagtcaaaatctccattttttaattagtaaaacgaaaaaaataaaaatccacacccaaaccattttgttggatattgagaaaaagagaagttattcctcttagaaacaataataacaataattagagtgtcaataatttctaaaaaaaataatataatattattagtacaatttaatattaaattttacatatttaaatttaataaataatataattttttgtaattactttgttataacttatatcattatggt

SEQ ID NO: 18082 - DNA, 2724 bp, Cannabis sativa
agagagagagagagagagagcgatgaggagaagaagcatatgggcatgggtagttgccatcgtctgcttcgtagtcctaatgatcgtcactcctgccatacctcagtctcaagaataccatgattttgccgatcaacgccgattctttggttattttcctctctctcttttccccctttcctttatatttttatatgtgtatgtatctgccaagcatgtctattttaataaatatgtcttttttttttttgttcttattatcacaaatatttgggttgattggtttaagtctgcattttgttgcttcgattgtttatccttatttaatttgtatttaattattgtttttgagaagtggcagtttggtttaacttcaatttcaattgggtatgaatgagtttcttttcgttttggatgtagatgatcaacattcatttttatttttattgaatgttagagaaaagaaatacacaattatgggaaatcgagtgtttgttgtgtggaaattgttggtagtgcatgaaaattgaagtgaactggctacatgtgtgttcttaagcagttttgatctttagtttctctgtaattattagaagctttaggattttcccttgagtttagttagaagggatctacgtcagtgatttaatttttaatgtaggtgtaagtaaggtgttgaattggcatcttagtgggattctatgatttaattcttattttcagtgctgaccttcctacggatgtgttttaaaggggtaaattatatatccttctctctttctcaacacaaaatgtgtaggaacatgttgactatatttaactatccctatctatttctccacagtgaatttttgggtttttggtgtagatcccttgtggtagataatttgggtgggttatttccataaagggtaggctgcgggaggaccacacaggggtgggatagactagagagtggctcttgcatggtgagcttctcgggattttcggttgtaatatttcatgtgttcactcttgcccctgaatctataagcggactttcaagtgttattgtagactctttgctatatcatcctcttgatatatatatatgtaacatgcatattacacccaaaattcacttggcttggttcttcataagacaagcatgttgttgtgaagatttttctttcaagttctttacagttcgtcaatttcttacttacatttaaattttctgacctaacttggttgctgagttttcaccttcaacactatcgtggttgtttcaaattttacttatgtctttgtcgtgctatttcttaggctttattatcattcatagttttccttatctacactcccttctcctctctccctctcttttcctgtagtttgattgagtactttatttcatttgcaggagttccaaatgcacttaatgtgatttcaaatttcccgttccttgttattggtctcatcgggctggtgctttgctattaccggaattattttaagcttaggtagtgcattttttactttgtttaactgaaagatatctatcatcccttttacttttagattttgttgtttgacaaatgataatggttcaatgccaataactagcttggaaggcgagcttttgggctggacatttttttatgttggtgttgctgctgttgcttttggatcttcatactaccatctagaaccgaatgatgctcgtcttgtgtgggatcgcctgccggtgaatttcctctctcttaaagacactttattataattgacacttcttagttgatgttgtttttgacataaagttcttcttggaaagcatagatgactgtcgcattcacttcgatcatatcaatctttatcattgaaaggattgatgagcgaaaaggaacagtatccatcataccactacttttggctggtctatttagtatattgtactggaggcaagcacttcacttttctagtgtgaattatttgaacttatggtctaatatactttattggaaaattaatttgtcagtgaagtactgggagaactgtttagttaggtaaaatttgcagtatgaagagctatgtgaatgatggtttgagtatggaatcatatttattttcagcagacatacttaaagctagaattgtggttgtatcgcaacttgctaacttgcaatgccagcatgtttttctcctcacttctgtccatgaaacagctagtgcaaatctaaactatatacatagaatttagaaacttaccaattccatgttctagtctgaaatgattgttttgtgtattgtttgaaggttttttgatgaccttcgaccgtatgctctagtccagtttgttccttgtattgccattcctttgatggctattttgttgccaccaatgtacacacactcaacgtactggctttgggcagcaggtacatgtttaccatatatgtatagctcctttgtttcattctgaactcttttacaactttgttggtcacattctttttcccgtgattgcaggattttatcttttggcaaaggtggaagaagcttgtgataaggtcatttatgattggacatatcacattgttagtgggcatacacttaagcatttatgtgctgcgatggttcctgttttcctgacactcatgcttgcaaagaggactattgaaacagacaggtaaatttattggcctaatgtgatgctgccttgttgaccataattctttcgctgtt

SEQ ID NO: 18083 - DNA, 3212 bp, Cannabis sativa
  modified_base (33)..(42): a, c, t, g, unknown or other
ttaagcgtgcttgacttggggtaatttcaggannnnnnnnnncctgggaagttttcccaagaagcatgcgagtgaggacaaagtacgctggaaacgctcgtgttttggtttgtagagtcaatcttcagtctaagaagcagccatagtgacgaactcgtgtataagagctataattctatgggtgtaagggtccaatagaggcttgaagcatgaacgttacaaaatcaaagttatcaacacttgaccaattacctttttgagcttgtaggggttataagcatatttgatagaaaaatcacatgtacgttcaccacaccaggaccaacaatcaacagtagcattggaactcagaagaatgcctaagattagaacatcatcacgagagttaaacatgtccttgactaaatcaatattccaattgcgatgatcaacaggaaatagagaattaaccggttgattaactgcaagcttgttggtgcacaaccaaactctcccaagccatccatataatgcctctatccttattggaagttgttttctactaaaaccaagccatgtgcttctctatttcttgacaaatttcatccgagctaatatttactttttagattagttacattattttcttccatataaattttatactagtagctaattatgaaacatttttactataattaatagttttaaaaaggtttgctttatcgtttctaggcgctcaatgaaatcaacttctaacaataagcctcctctaaaaataattttttagcgaggacttgtcctcgttgtatcgttttaccgaggacatgtgaagttctaataaatgtcctcgttatagacccttctttttgtagtgaaagaaacaagtccccacataaaggcatatgtcttcaattatttctaataaccgaagacataggcttccgcgtggagtgagacctatgtcttcgattattccctaataattgaaaacttaagtctttggttagccatatgagataaaatttaacaaaatttctatatttcatcactgcgaatatagtttgagaaaattttttaacgaacaaaaaattcaaggaaaatttgatagttattttttttttttatgaataagatgatttcattactccaaacaaccaaatatacaaccaaagagcatcctcaaataaaatatgaggacctcacttctatactatgtacaaattacaagaatgcaaatcacacttttacaatgaatcaaaccacattttgtcactattagagactttctttggccatatacatgaaactctattcttagttacattttgcacaagttgaaaaatcaccctacagttattttctttaccttcccaaagtctgttgtttcggcagctccagatttggtaaatcaatgcaacaagagcagctgcgtgcacccctctcttgagcttgctcatcctagctttttcaagccacaacacgaccctttcaacagtttgcacactagtcttccatctcaatcagtttttaaccaaatcaaagcattctcgggagaaagaacaagcaaaaaagaggtgatcaacactctcttcttcattactgctgcataaatggcagcaactgtcaatctcaggtctatacaccttcattcgattctttgtcttcaatctttgaagcatggagagccataaaataaaactatgtttgggacaattcaatctactccacaccacagatgtccactgttttttcacaccagcaagtttcaactttgtatagccgagagatatattatactgagtacaacacttttgtctttcattttcatcaaaaagttccatgaccttacccttcaaagcaactaattttctccaataccagctatcatttgtgttagcactatattgccaccaatctgcctctttaatatacacacaatgaacccgtttagtgggtatacacttctaaatagcttaatttttattatgctatactatcatttttgcagcacatatattaaatttcaaattgtaatattttacataaaatattttcaaaagttatatatatacataaagtgtggattgaattataaattggctactttaatattaaaagtgtattcaatccacaatttataaattagattaaatctgttaaattttaaacactctaataactagaccagttttatttttagttgctctcgtatattatacatatcactatttcgtgttgatgttttaagtttttttttttaatattggagggaattttgacattaaaacctactttttgtgaggagaaatgtaaaacaaaccattgtttttagtttcttaaaatcaagatttgtcacttttttttctttcaattacactaattatttatttattattaatgtaagtgaataaataaataaaataaacatatctatgttttagtcaaaatgatggagtagctatagctagccacttgaccggccacaaagtaatccttaagcactaatgaaaaccaaactaaaaaattatatacaacaagcttcatgtgaatgtatgcatatttataattaatcataggtggtcttgaatcttgatatgataataataagccatttataacctagtactaagcatagtatatgtatacatgcatagatgatatttatgttatgagagcatagaattaagtagagatatacacaattatttaatgtgcagagttataatgaaggcagcttattatatacccatgctttcgttcactatctgccaagtggcataacaatatataattaagcattgcatattagggcttaatacatatgagtctatataaatgggtagcagttttttataatttttattaaagaaaaatgagtgaaaaataatattaaattatattaatagcaattaaaggtaggcatctaatccaatttatttttattaaacctattcaatttaatagtaattgaacttgaaaaaacatcatcaaatttaaattaattagacttaaaaatttgattcatcaattacacaattttatattttaactaaaaaaatataaaaaaaagcacataaaaactaaactacacataagttctaagagttatttttatgaagtatttaagaaggtgtactaagatccaaaattaataaacaagtataaaagaaatttaaatattattattttattatgtataaataaatataagatggttttaatgtatatta

SEQ ID NO: 18084 - DNA, 2595 bp, Cannabis sativa
  modified_base (1609)..(1610): a, c, t, g, unknown or other
tgtcttttttaaacttctcttaactaatccaaacattacaatcgcttgaatgcttcttactgaacatatatcattcatgtccatctagttacttgatttctgttttaatgaaaatttcttttattcttccattgcttgtacccttaatagaccgcgaaaactcatactctaagttggggaagtgatgcataatatcgtctttataaaagtaaaatgtaaaactccacagttatacaagttacaggttcagaaatattcacaccttccacaatttaattgtcttgttattggtggaaaggataaagagtgagccgttgggcgtagcacaccatcttactttgtttatcttctcttcgatttccaaactcttcaaatagtcaaactgtgttgttcaaaaaccaaataaaaatataatcaccactcaacaggcatagaaatgcacaacaaatgttatttaaaggattacaaaatgaaaagcatacctcaggctcatggctctgaaactcagtcttgtactgaaattcaggattccaagtaggggtaaaatccagtttctccaacttagtgcgaggctggtactgattcgaagtctaagaagccaataattaatcgtaaaaaacacatcataaacccacttttttattccaacattagatgccaaaccaataaaccaacacgattgccatcctaacaaagaaattagcccaaaatgaattcacaaacttcttagctttgaaaaataaataaaaactctgtaaacaaaatcctcacatgtttcccatcttttctttcgaatatcacaacacgaccacctctatctccaacggcaaggtaatcaccgctagcgtcgaatcccatagcagtgatgatatcaactaagaagaaaaaacagaaaagacccatttagcaaagtagtttcagtaaccaaattaacttcattaacaaattaaccacaaactatactttgtttaccgaataaccaccatgaacctacacattgttgtactgtagtagtttcactttcactagcaattttctcagcataacaaccaaaggaaaacaaaaactaacaaacaaaaagctatcgtttcaagttaaggtaaaggaaaccaagaacatactaaccttcctcaacatcctctcccggagctcgttcgccgaaaacctgagagaagttccactccataggggcacaactaaaaaccggagcttaaagtcaaaagtggatttagcttcaaatttcaattacatgagagagttcaccattggagggaactgaagttgtaatggagatttataccaatgaattttctgagctttttccactctacttccttacaccactcgattttttattttattttccgggaaaatgccttcttctacttcaagatatgcgccaaaataactttctcggcctctgttctatgactgcttcgtgggccgatctcatcgtgggcctggcctagaatgcttgcattgtagtaagttgaaaaatgcctcttttattacttaattaattaaatttacctctatttttttttaattgaaacatacctctttttatatgtattgtaccaaaaatattctgacataagagagtcacatnnagagtatcttgaagtgaaaggggtaaaattggtacaatgtttaaaaaaagaggcaaaaataatagactttaaaaaagagggtaaaaataaaagagtacaatataaaaagaatatagaatctaatttcctcttgacgataattacaatagtaaccttactagaaaaagcttcctgaattttatatttttaaaattaaaatctcaaataattaatttcttatactaaggtatgatatgatataatgttgagtaaactcctagcaaaaataaaagaggaatgatattatcaaataaaaattttgggttgagtcgcggactaagttgctctttttaagacgttcgtgacactgcttaggagtatgcaagtagtcgaaatttgctggtcgtccccaggataaaacagcccagtcgtactgtatcggaacccaactgtaccgtaaagcaccgtcgaatacacccaaaagattttttatatcgcagatggtatttaatttttgtgaaaactgtaattttttcatatgaaaaatatgtattcttcccatcagttcaatcgcattatatagacgaatggattgaaaaattataatgggaagaagaacgttttttgaatcgtggggtgtagttggttgaacgtgtctcattaacatatacgactaagtaatcagttccaattaaacacgtttctcaattaaattaaaaataaaaaataattattttattaaataatttttctgtaaaaataatagagtgtcacaccaacccaacttggccctgatcggacggacggacggcgcgcgtggtggatcaagtgtgtgagttttcacctattcgcacaaaactgggtaccccttggggctcaaacccaaatgccagttgcactttatattcccttgtaaataagggttcatattgttgggttttatgccctaaataaaactttttacaatctgattagttatcaatataagaaatttgaagtgatttat

SEQ ID NO: 18085 - DNA, 6659 bp, Cannabis sativa
atatagttttacataaaaatattgcataaaatacaattcaatacaatacaatacaatacgacctaatacagcgttccaaacgaaccccacgagtaagtcacctcagtgacacgttagcatttctcaaaatgtagtcactacatacgtcacaaacattttttaaatatttatgaagataaagatttgaaaaagctaaaccaccaattattttttaatgagctaaactactaaaacttgaagactaggaatcacgttgctttcttttcgaaatgatgaagctatagctagccaagtcaaacaagagtctgtgtagagacaaatcatttgtacaacaaataaacagtaatagatatgacataggaaattgcgagcattcctattatgacaaatcagtatactcataagtaggccccgattatgtatataaatatgtgaagaagtaatgaaaccataaccacttcaaaaagctaaaagaccatggataagaaaacccacatagccattttccctagccctggtgttagtcacctaattccctttgttgagttcgccaaacgtcttgttcttctccacaactttcacgttacatgcttcattctcaccactaccgacgattacagtgctccatctccagccaaaaaggcaattcttgactctctaccggccaccatcgacatcatctatcttcctccagctgtcaacttcgacgaccttcctaaagattccaaacctgcatccaaactttccctcatcataactcactccctctcttctcttcaaaccctgttaaactctttactaataagtagtgctactaattctaccccattgactgctttctttgcggacccttttggtgtaaaagccttagaagtcgccaggggattaaacatttctacttttatattcttccctacaaatgccgctgtattgtccttgctcttccacttgcccatgctggacaagtcattctcttgtcgattcatgagagacctacccgacctgatcaaactacctggctgtgcaccccttcatggtaaggatgtgttagaaccgatccaagatcgccaaagtgagacttacaagtcatttctgaacacgtccaaagaggtgtacttgacggagggtatcatcatcaatagcttttcgggtattgaatccgaagcaataaaagctttgcaagcaaatgaaggaatgcttcctatctttccagtggggccaatcgtgcaaattggcccaactaattctaatacgaatgggtcagagtattgtttgagctggttggacaagcaaccaagtcgctctgttctatacgtttctttcggtagcggtgggacactgtctagtgatcagatgacagagctggcatttggattggaaatgagtggccagaagtttttatgggtggtgaggaagccagacaatgaatctgccaacgctgcatatctcaaagacagtcaaagccaatttgaggctattgatgtcttacctcaggggtttttggagagaaccaaaggacgaggtttggttgtgcaatcttgggccccacaaactctggtgctgagccatggctcgacaggagggtttttaagccactgtggttggagctcgacccttgagagcatcgtggaagggataccactgattgcgtggccactttttgcagagcaaaaaatgaatgcagttatgcttgtagatggcctagaagttgcgttgcgaccaataacggttgaaaatggcatcgttggacgagatgaaattgctagagttgtgaaggtgctgatggatccaagttgtgaattgggtaaaaaagttagagaccgtatgaatgagcttaaagatgcagctgctaaagcactcagtcacgatgggtcttccaccagagcactctcggacttggcatttactttgagaagtaaggcatccaattagttaggctaaaatataaccttctccctttgttcttatgatatttattgttgtaggggagaatggttagtttttcctttaaactttttgatatttcattttgtatgggaagctttcactcatggatgcacacgatagccatcttaacaagttgttgcattgtgtgattgtgcctcgtgggagcaacattggcccctctctcaatattttttttctctcaaatcttcttagctttcacgctaactgcggtgcccagctcacctttgcaagcgtccttaacataagagtctctatgcaaagggaaattacttagggagtagagaaagaaatactctcagtaaatcataataactagtaattaggtctttctatagaaaaaggaatcactttcagcagtaaataataatcagccatgtgtcttaaatagaaataacataaaccgatcataagattcatagaatataataagtgatactaacgactttttctttgcacaaaactaagtgaattcaaagttttgattaaaaaaaaacctgtttgtgcttcaaaatggtgtgttagttataataattagcaaacaaccgtctcagtagccaatgcagtgttctcattgacttccaacacattaatgtctgctgttgcagtgtgatttgatcattagaatttaataagtacgagataaataattcaaaaaatgaagagactaaccttcattaggggatgcaagcgcagactcaggcaacattaaagacagagtagtctttggttggatagggaactttggaattggtaaagaagttgggagtggtgagtttgagtaggaaggtccagccgtaacacttttactttttcagtcagtatttcttcttgctgttggaaactctagtgcgcgtttttctatcagctgaatgaacatgtacaattgaaggtgtttcaggagatgaaatcctttaggtacaaattcacagttaggatgggagtataccagtggctgattggaaactacgcccgccaaagcctttggagggtcgaacaagtcctcggctgcaatacttcctattaggactaggaaccatctcatctctacggagacactccattgcacaacttaaaagtaaatacatgatgagacaacatacattacttgtccaactacttttttttttcattatttgattaaattaatctatagtgaatgaattcaaattataaaaatataataaaaataatcaattttaattaaaacgaaaaacatgattaaagtatctttaagaaaaatggctctctaattaacaatttaaataaaaaataaatagtaccttggagatgatcagacatacttttgccctgtttaacaatgcatccatgctcaaatttctctatagtttgtcccaaaaaagaaaatgaaaaaaaaaagcacgtgtaatgctcactcgcttctatactctattttgatcaagaggatttatattctttaaaagacaatgaaaaaagaaaaaaacacaaattcattatatatctcagtaaagcacaaaatattcatctggtttctttttggaactcagaaccatttacatttttactaggacatgtcctaatgttgtgtccaacttgttggcacaatcgacacttgtattttctgctttcagaacccaaagggcctttctttacactagaattacttgactctgtaccaataacttcggggcaagtcctacggttatggcctcttccacggcatatgctgcagtgaaaatgttttctaacagttcttttgtgactatgcagcaaccttgtctttggacaagttcttctgttatgtcccttttttccacatatccggcatttgaactgcctaccagttaaaccctttagttctggacagtagtgtcttctgtgcccctcgcgtccacagtttttgcagaagaacttcacccctgcattaggcaagaatggcttacacattacaatagaaaaagtcaattatgaaatacttttggtgtcttgggctgcccatgctatgatactttcaagctcggattaactatttgattatcaagtatttcgtgcaagcaaaacatggttttgtggattgggaagaagcttgtgaatagaaactgacctttcatggcaatgctcctcttccgacgattttctgggtcactaaagaaagcttttaatgcttcggaagcatgctttctagcagcagcagttcctttcgctttctgcattagacaaaagtgaattgattgtagctctccctctcttttttatttaaagttagaaaataacgagttaggaggttatgagtatcttgaattggaacttgccccagccaacgacaaaatctactttaaaatttcctgcatcatggttaaatttacacatgatatggaatacaactgctaattaagcaatcaatatttgttattggaccatgaatgctaccgcatcaaagacactagaaacatagtaattttaccaaatataaagcaaagtaatgtaactcgtgaataatatcatcatttctcgaaagtagcttgtttagttcacaatactgaaatagtgaacttcacctaagaagggttgctcaaatggtcagacatgtgggttgttctcacaaggtttgaggtttgactcctcctacatgcttccatagcaattgctatagtttattggtctccaaatattgtagagttaaggcatgatttcaaataaaataaaacaatgaactacactaccaaagagcaatgagaattccaaccttaattgcagccactctttgagcgtgaagccttggatcacgatgaataatcttcattcttttactaaaaagaccagtcttggcattgagactctgcaatcatccaaactagacaaagaataaatttatgatatggccaccatctggtcattttcataaaagagaacatttcaagcaaaaaaacatgcaaacaatatttgagcagaactaactaaaaccatcaaatgatttcacgaaataattataaatttattccctcagagccttccttctccaggagagagaagcagacataacatatagaaatatatgttatgtcttatactaaaagggggtagtgtgtttccttcaaagttaagttagtgaggataagtaactcatatctaacataagagtgatacagagaactaacttttagagatcgactgatcttcagtccaacttcaggagggggtgattgatacacacgttttgattttcttgtcatgtccaacttgatgtctaagttatcaacttcatcatcctccacttttagaggagaactgggacgtgaaaataaagggttttaacatagtccaatttgcatcaaaatatcaaaagaaaaaaagcctaaataggaaagaatgttaagataataatttacatggagcgtgctttctcccatggtcgctcgtcaattgattcttcccatgtgacgcattctcccaagcactgatgacaagtcattataccctgtttcaaaacattaagatcataaattattatacaagttagataggagcaccaaaaagaaagaaacaaataaagaagaaaaaatggctgttgttatacctttcccttacattttgaacagtctggtctggacctttcgataccacactctagacatggagtatatcccctaccacggcaagttgggcaaggcagttctctaatatactgaccatttggaccaacccaggacctttgtttgtcacttcctaaatcaccattcctacaaatcaatacaaaacatacaatccaaaattgtttagtggaaagcctagaaatatgaaacaaaattccacatgaaaagttttgaccagtcttcaattcataagctaacataataatacaaatgactatactaacaagtaatttaagggtaaaaaagaagaccttggctttagattggcctcgaggccaaataactcctcagaaggatcataacccaactgtcatatcaaaaacccacatcgattttataacataacaaggtaaatttatatgaaaaaaagaagttgaataagggagaatgagagttcacctgggtttgtttcggagtggaagcagagtcgtcgttggaggctagtagtcggggaatgaaaatggcattgtttcggtttcgcttggagtggataagaagcaagaaacgaccgttgctttggctccaaaggggtggcagtactcgaaacgacgagctgaacgacgacatgaatgaatactaatgtaatcgcaccaagccaatgccaccagacagagagacacagagatacattattacatagtagtacaggactaatagagagagagagagataggggtgagagacttacagggagatgaggaagggggctccgattacccgccggaggtggaggtcgtcaggtgagaacgagagtgcgactgggcgagagggagcggtagagattttaaggattttttaggcttatctgaaatgaaatgaaaagaaaaaaacaacaaaacaaaacaatagcacgctaacattaacctgttatttctggtaaaaatttaagttcaaattatatatatatatatattttttttctaatcggtatttaataaaataaaataaaataaatagtaatttgcggtcaactttaatttttaaacacttaattcttttatttttttttttttggtaaaacccccttatattttaacttttatacacttaactcttttt

SEQ ID NO: 18086 - DNA, 8106 bp, Cannabis sativa
agttgattccaaaaggcaatgtattgagaaagttccttaatattgttttgtttatcagagggatcttcaattcaaggattttgtcttgattttagattttagattttagatgacaaccctttcatatgtgagtgctcaaatttatctttcttgaattacttctacagttttttcattgaatggaactgttgagagaaagtgcacgagcacaaactttgttcacctgtcctatactttgattccattttgaaatattggccctattgcaacgtacaacggcaaaactatgccaaaaatatacctaaaaaaaagcaccctttgatttttatgttttgagtcttgtctatcgttagataattttatatttatataagagaaaaaacttatcagcgtggcttccatagcatagtggtagtgcgttcccttcgtaagggaaaggtcgcgagttcgatcctcgctgggagctttcagacattatttgaacttttgtttttatttgttttcaaaaatcaaattggacttttcacttccagcactgttaaacttgcatttcctattcaggtggtgcagaatctgagtgaggcattttagcgaacacattgcgtggggcgattgactattgctttcatctactctcaaaccgaaagctcatacaacggtgagttatcattaacagtctaacaccaattctatgttatttcttatggatttcttaaaatgggttttaggttttcaatattgttaattcactcccccctttgtttgaaaagtttgtcgctatacgattatattccagagcgtgaacagtggaacggccacaaactacaatttcttactatgttatagattagtcgctaatttattgaagagtttgaagaagagagattgagttgagtgaaacggtggcgtatagtgtgagagaattcagatggtattggtatctgatagataattcttgtttagactctcacctgttttataagaggacataggtttcttactctttctcttttctcttttaacattttcatggcactgtatctctgttacccaccgccattttttctttttttcaattaaggaaaattgggtgtggctaagttaaatttggctgcatgcattattgtaccttaattacccttgcagttatcatcctagcactgtgggatttaagcaatatgatgccataaatgtacttagtttaaaaataattggatttaatctgtggttgcctaggtccctaggactgggatttttaaatcccatgcatttttttagcttaagtaaaatgggggttatttgtggcatttcctgagtttttgttgttttttcatcttttgaaaattttgattatattgctattatagctcttcccaacttccttgttgtatcatggagataggaactcatctttaactaatccttttttttttgtttattggctattaatgaaaatggctcctgtggtttatgccttgacttcagtttggtttcactaattttcagctcttctgaatatgcaaagcattaaaaatgccatcttgtggcatgtcagagcagggagatcagctgatacactgctctctgcaaataggaatatgctgaaacggctaacctatcagatgtccacatcaaccgcaaccaacactgatcaagtaatgggtcgagtgattgtacttgttaagaaatttgataaaattgatgcctctaaggtatgatttcaatttacatctacttttgctgtccatgttatactatcgtgaaataacagtccttcagttgcttcctttaaatttaaactaacatggaatgttgatcactcactcacttgactaaatcaggttaccgaaacagctgattttcaaaaggacttgaacctagacagcttagatcgggttgagcttgtcatggcttttgaacaagaattttccattgaaattcctgatgagagggcagacaagttgacttgctgtgctgatgttgctaaattcttagttaaaggggctgagcagaaatcttgattagcattttaaatggaatgtttttcactagcaatgcaacccttttaggattttgtttgcctggttttctgtcactaatctaagctttctaaaatttatttattggctgtcctctttgtttgacttgtatcctttcatatttaacttgtaaggttttttcaatatgcagaaccctctgattaagagagaactcatcatctaataataatggtttgttgcgtaatagcttgcgctgaagaacttttagtactgtttagataccttattaggaatatatcacacaaagcatatatattataaaaagaagattgtatacacgcattcataactacatttgcgttgcgtcatatgtaatattttctctcgtgtttctatttctcttttcttacacatctgcagctaaattgatgggattgaacctctgtaactcaatgttgtgactgaagcgccatcttctgagctgtggtgctgctactgcatcccaagtaagctaacagatgatctccctacaatatcatctttcagctgttctgttttccaacgcatccttgttttgttgtagatgtcaaatgttggaacctaactgttccggcatcataggttcgaattccattaccgacagacgacaaactcaggctcttgtgcctcttcacataagccggtttgcataaggagttctttggtatcctaagaattttaactgaacattttctgtccaagtggggaatagcatgcaagtgagaaggaaggtcaatggtgaaatctccatattcatctgtcacaccttttatccaacttgatttacccttttgtccatttatatggcaggtaacgccaacaagagcacctgtagaatatgatgaaatgaatgatcagtctctcatgcataaaagattatgtcaagaaacttcttgctttgaattcaattctagacatgtcaatattttatttataagttgaatccttatcagattaaggaatataaggttttacaacgatgtttcgctatgcatttaagtccacatttatttgtagtataaataaaaacaaatcttgtttcatgatgtggttttcccttcccatgttttgatctactctaagtcttaagcaagcaaagagagttaaattatttccaaagaaaataacatatgtccaaatcatattaggagctataatgattttcacctgtccaacttgaatattaaatttctgcctattgcttcaaaaaggtcttttcttcatatgaagaaatcagaaataaagaatccaaaagtttatttattggaggatgagattttatttgtctaattagatggtttgttaattattataacacacactcatagaaatatatattgattttaatatattggtaaaatctccacatcaaattaaattaatcattggatgataaataactcaaatcaccattaattagaatgtcataatgaatacatatataatcaaacaaaagtgaacaagaatatttattttatcgtatacacaattatcagttaatcatcacagccatgataaaattaaaaaaaataatcatcatatagaaatgataaaaaacaaacattatcgtgcgatcactttattatttcattttattgttacatgtacatatttgtcgataaagctataatgaaaaaagacaggcagcatgaatgaaacgaaaagactgtaataaaagatataaaaatgtcttaaaaatagtttaatctatgtacgatcgacgtgcgtttcatcttaattttgctaatataacatttaatttatatatttcattaactatttaatttcgttcgaaataatatataaatggtacagagtagtggtcaaagttaggcaaactagcaatatatatgaagcaaagtaaactttgatctttcaactctctctaagaattaatgaaacgtggtctatacatcgaagactttatttattattaatttacaaaacataatcaataataactttatgaaaaataacactaattaattaataataacaaaaatgaatataatgaagaaattataatatattattattactgacctgaaactggccatgcatggagatgagctgcatgaagacaagtctcacaaagaactgagcccgtaacaagaacggtggaaagcttctcttccccatatccggctatggacgataactcttcaccgttatacgccccaaataactggttttcttgatcatgatggtactcggcagcggccattgaaataataatcccagagaggaagaagaaggagagattgaacctcatgatggtcttcattttcttatgttattacgttttttctccttctaattcttgtgctagttatatatatttatagaactaacaataagaagacaatatatttacaagaggtcactctgtcttggtttttataggcaataaaagaagttgtaatatgcatggtttattatatgatcataagatatgcctttttctatggcttgtatgtactaccaaaattgcagcctctgaagttgactcgattgagttaaatgactattttgccctttggccccatacgtctctctctcaaatatttattaaacttaaacataaagatatgtatattaatggtatttttatctttattaatacatgatttagcttaagtaattcaactttctttttcttatttcattggtaactaatatgatggaaatttaataacgtagagtaatgtatattgaaaatgaggggtatttaagtgaaagcataaaaagggtggtgaagggcgcaggagttgggaagtttgacaggaagttaatttgttggtgggtagcctactcttatcttctacgtatattgggtctcttcaaactttttcctattattaaaaagaagttaatgaattaattaggctctaaaacattaatcagtttaccaaagcctttacacgaagacacgtttatcttactctttggtcatgaagaagtatatatgtacataataatacatagcattctctctctctacacaaatttctagcctgcctcaaccatccccatctacacaattaattctacacctatatatatatgtacttttttaaaataaataaataaataaaataattgctttctttttgctcatgtttggacacttctcttctctacacaaattgttttccctttattttaagatctcacttttaccatcggtaattttaaaatggctatctcttttctgtattttttttcagttatataactatagtatggagttattatgtggggcattttctcattttagagaaattatatatttttattttattataacttaaatatgattattattctaatttttatcataaatattatttaagtttaattctggattgtaaataaatatttaaatttaattttttataataataattaagttatatttttaaaactagtgtagatagttatcggttaaatgttaagttattatctatgtgttattttcttattgatatatttaaattaatatttctttaaaaaataaaattttaatgattttaaccaatcaaaaatttcacatgataatttacttaaaagtaccagaattataattatttatattcttcaaagttgacatactgagaaaacggttatgtctttctctcctaatactggtttggctttacaagacagattccgcaatgttttgggtatgccaatctgtgatcttcatgaaaagtacctaggattaccttcttatgcgggacgggataagtcagaactcttcagcaacattaaggatagaatttggaagctcatgaactcttggcacgccaaacttttttccataggtggtcgtgaagttttacttaaagcggtggtgcaatccattcctacctacgccatgagttgcttcagtctgccaaagaaattttgtcgacaattggaagctatgatggcaaacttttggtggggatcgaacacaaacaaatctaaggtgcattggaaaaaatggagcatgctttgtcaatcaaaagcagagggaggtttgggatttagatctttccttcactttaatcaagctcttctagctaaacaggcatggcgaatcttagatgatccccaatctttgctggctcaagttttaaaggctcgatactttaagaatgggaattttctaaatgcttccaagggtactcttccttctcttacatggcaaagtatttgtgatggtcgggatctcttaattaaaggactgagatggaaaattggtgttggcaaccaagttaaatgtgcaattgatccttggcttccgggtaatacaacttttcttccattcacataccatgcggaccctcaattcacagtcaatcattatatcactcaggatcgccaatgggatattagcttactccagcaacactttgggcaaattgatatagatagaattctctctatctcgattagtccaaatccaagagaggataggctgatttggcaccattcggattctggttcttatactgtgaagtcgggttatcatgtcgctgaagcaatggacaagataaatgatacctcagcttcaacctctaaccgcaaatggtggaatcgtctttgggctctaaagcttccgaaaaaggtcaaaatttttgcttggagagtgattaatgatgctttgcctactgatgtcaatcttatgcatcggaaaatactcccaaatgctgcttgttctttgtgtaactgtcatagagaatccttgggccatgccatcttcttatgtactagagccaaacaggtttggtcaatagccaaggttcatatggctactgctattcctaatatataccagctgaacgggtttgacattttctcttctctggctgctgttcataccgatacagagttagagcgaatcctttgtattatgtggagtatttggaccgaaaggaacaaggaaatccatggaactaagccgaaatcggcttctattatttgttcttttgctgaccattatgttaatcaatatattaactccactttgcagctccagggattcgactcaaatggtctccctcatcctcaacctactggtgtgaactctatctctaccactcaaacagaaccgactaagtggactcctcctcctgctggttgcttgaaattgaatgtggatgctgcttttgatgaggatggatctgttataggcgtgggagcagtggtccgagactattttggggatgttgttggtgccttttccaaatcattgccaggttgttattcaccaaaagaaatggaggctatggggcttattcacagtttacaatggatccttagcaatcaaatgcacattgactatattgagacggattcactcattgttgctaatgccattaacaaacatccttctgtaggccaagtttctcttttttatgatcttattgatgacatttctcttttattatcctcttttcctagagtttcaatttcgcatgtaaaacgtgacgctaataaagcggcacatgggttagcgagatttgctcttcgattggataatacttgcttttggttgggggaaattccttctccaatccacactgttattgttatggattccattcagtaataataataatagtgtttacaaaaaaaaaaaaaaagttgacatatttacaaaagattagagaataatcgaaaactttaaactatatatcaaaattcagaagtatgtttcgacccggaaataccgatattgtatagaaaggtcaggtttagtaatttttttgaaaatataaattataacgtacacgtttgcagatacttataataaacttatttatacaacttaactaattcagtgaatatattataagtaaagcgtcagtcattgttttaagtgaaggaatggttagatactcttatcatgatattccaaaacagttagacaatttcactacgaaaatttcaaacaataactaataagcatgtgattttctcacttcatcaatatgcaagcaataaagttcgtaccccttaagcgaatgatatattaaagaagggagcttgcagagtggtaagatactaatatttaaaggat

SEQ ID NO: 18087 - DNA, 4455 bp, Cannabis sativa
ctcctaacttttacaaagaagtaagaagatatatagataggtacaaaacctgttcctctggcacgattgaaaagacagtagatatcgataagattaatcattcctccacttttctcaagaggaattttgacaaaatctgccaactgaatgacacaaagaaaaagaaaaaaatcctttctaagagatatgtgaatgaataatcagtagaaattaacatcagactttccaagatcacaacattacaacaacatgaagtgtttacctaatatttttctatttaccaatagtaccatattagaaactatttatatcacaggtatgtgtaaatttttcagtgacacctgtcagtaggagagattgaaagctctaaaaaccattaaagctaatgttgaattgttttcacattgaactatctatatgtacaacaaattatgaatttagataattttgagatatgcatcttatattggcttgcttatctttagggctatttggtaaaagaaacattcccaaaaatgatgatttataagctcaataattcatatataatgagatataaaaatacaagtaaccaaaatctgttatgtggtaagtcatcaatatacaaatctgtaggacattataattaaaaaaaaatacatatcagtatgagcaatataaacataaacatatcacagttttcattcttctaaataaagagaaggtgctatgaacttcttagttccataaatattacattatggtttttccttggggatgcagttctacttgcttagaaagtatgagttttcgaacaaggacaaaagcacagtatggtatgatgattgttacttgtataagttatggagctgtgttatgatgattgttttgttttgggatgaatgtatgatattaatgggaaatttatacaaatagaaggaacttagtttcgggaatacgttaaatttcacttgaaatttggctttctcctgaagaattcaaggatgctccagttttctttgtagatttgtctaggaacaaaattcagggatcccttatgtaatttttatcacctagacatcctagtcatactctactcttaaataatattttctgtttctattaacaatgaggataaacaaaagctaccaccataaattgtgaaaaaattcaggaaagaagaacaaaagaagagtaagagcaacctgacgagctaattgttggtggtacaaagcaccggcagactctttagtaacaggagaaataataccaatactcaacatccaatcttgcatctcttgtttggagcccatttcctcatcatttgatgcaccagtttgagagtttgagccagataagagtttctgtctcatcttctctgctagcatcaccatctctttggccttactctgttatagaacatgatcataaaatattagctactgattaacttaagaaactttcacattgaacaattatcttatacatggtgccattgcaatatatgaaacagggtaattgcaacccagtctcctcccaatataacacaaaagtgtacattataacctaatttatccagacgtttgctttttctctcttccaagttttgggacaaaaacctatgaatacaatcaattgtcattttccaccattctcaacaagtcatatcaaacttctctatcagtctatgaagattcaataccatgtaaacgaaacagacctcaggaactgtcaaattatggttattttggcaagttttcacaaaatcaaatcaaaagagaacaataataattaccataagggcattcaaatcctgaaaagcatcctgcaagctcttatcagtactctcccacatctcctgctctttcctcagtattcccgacacacccaccattctcaccgtcccttcactagaatacaacccgctagaactcggaccaggctgagaattggagactggaccagaaccagagctcgaaacggcactctgactctcccacgccctacctctccagctctcccagaacttagccagaaacgcgtcgatatctcccttcccacgcactactaaggtaaccaccaccgatctcgaacccgcaccagaacttgaacccaaaccgatgacccggccatcggatgagaccgagacctggaagcggactctcggtgaggaccacatggcgcggagtgatttcttgggagagaatatgtgcgtgatggcggcaagagggatggctgagggcgaagcggcagcggcaatggattccgggagccatagaagacggtgagttgtgagagagaggagacctgacttgaggattgggaaattggggagttcttcgcattcaaggtcgactgaggagagaaggtaggactcgatttcgtccggaaggagaacaggtcgaccgctttccgttacctgggccggcgggaggcagttggcggccattgaatcaatgttagggtaatcaaaatcaaaaaatgtgggtgaattaattcaggtacgtgatcgtcttggtgttcatattgtggttaggcaaattttactgagcccagaccagaccagcttcagccttgaagtgaaacatcattgtttttcacagacatattaaggtgtaattgactctattgtcaccggaaaataacagatgtttttctttttttttcaatagtgatggaaatattattatgatatgagtagtatattgataaaagtaaaagtatctttgtatttattttgtatttggcaaagtggtaaacctcctccaatcaagataattgattgtctaatcatacatcatattttactgttggctgcaaaattcttattgcaagtaagattaaataaaaatgaatttgaaaatttagacaataaaattataacgtcttcaaaaaatatcacgtgacattaaaaaagttttcaaggtcacttttggaattacatgagataagtttttttttatttttctttgcttactccaatagttagtttatgtaataacttattttttattttattattaatatagggaaatttttagttatttcgatggaattattagattggtctctcttgtttgttggagcttttttattcatttttagagtctaattgtttagttttgatataagtatattctaagcgcttggcttgatgtaatgatttggacgctttcttatctgatttgactagtttattttctaattttcatgaggtatctctagtttatatatgcgtttatgaattaattctgcatgcacttaagatggattgtgaattagttgttagttttctatcattttctagtgatgtaagaccaatttttaacaattcaaaatttacacctattgattgttaatttttgtttttaacctattggatgtatgctcttcttattttgctatagaaaaaggtttaataaactattggctctataaattctaatatatatttgttattgaaaataaagtttacttattacaatatttcccctttaattaacctaaaaaatacgtttttcagaatcttgacaagcataaaagttcaaatcagcgaaagaaaaaaaaaataaagaggctgagcagagtaagacatggaagattttgagaaaaaattatcaatagacgaatcaatggaagaagatggtacccatggccatgccacctccgcctctcattcctcaacaaccatcgtccatttgcttcgtaaattcctcgcccttcagcagcgtcgggccgaagcctattccaatctcaaaaggtttctcttattattcccttctcatttttgtttttgttgttctctttctgaagaatcgaactctttttgatacaggggattttcagagtatatgatttcgggaaatgaattggtttatcaacagctttgcagtgacattacagtggagttcaataactgctctaaacaagttggtatccatattcaaatcccatgttttcaaaattacttatgtaaatataaattcatattctgcatttatttttgttgagagggtttctgtgtttttttctgagttcaggttattgaaattgagtccctatttaagaattctgagtacgatcgagttgatttagctaaacttttgagagctgttcaagaagaggaaaagcagaaactgaatttggtaaccattgtcccttttgttttcccttttttttccactgttattgttataatacattcttaaaaggctcatggctattttctttgtgggtgtatattttagaactctgatacaagccaccccttttctgattttggtattttgagtgtagtgaaatttagttcagagaggcatatctttttgcatcagcatcacatttttggttttgcctttgtataggtcccttttccttacttttcattgccagtgtatgctgcgacaggaaggattctttacaacggatttagatttaaaagttgaaagcttgttttttttttggttactatagaga

SEQ ID NO: 18088 - DNA, 2762 bp, Cannabis sativa
tggaaccgaaaattcagttacggtctggtcggtttgatggtcggtttcagtttttcggtttttatgaacacccctacatgtaagaagccttcatctcgtttcacataccacgagatttatgaaatcccaaacacattttccttcctttatgaaatccaatccagaaaatggattgagatgttctcaatcctagaaaaaaaaatgggatcttcgggtttaagaatattgggaggttctcaatcgtagaaaaaaaatggtgaatggaattcaaaactttcaataattgttctcaattgtagaaaagaaaaaaaaattgcgttaagaatggaattgtaaacttccagtcgttataactttattttaattttagcatattttgggtttaaaaatagaattgaaaactttcaatggtagaattttttttattccatactcaatagctaacgctaatagttaactctccgttagtttttattttaaaaaaacgttaaaaaaatcgttaaaccaaaaattctcttacataaccacattttatataaaataaatatcctaactaacttattaacttcataatttcaaaaataatattacatataattaccaaacctcttttttcttcttatatgttaatttattttattgtagagaacaaacctattaagaagaatagtaaagacaagtgaaatatgataacaattactttgcatatcgtgatgacttcaaacaaataagatatgataacgataacaattctatcacttgtctttttttttttttttttttattttgtgtgggtattcttcaatttatacttttttttctataacatttaaagatatcgctttaattaaatgcttataaaaattaaataagttaattaaaatatctaaaatgtaccatataaattttattatatccaattctattaatttttttattattaaataatgaattttattttgtatattttcttcttctttttatttttatttttatttatttttttaatttaaaaaatattcacacacatgtataaaagtaagtagttaactcatgttttatttttatgtatagagaaaacaaaatagaatgaatagtgagatacattaataataacaattttaaatatagcgacgactataagtaagatatggtgatgatagcggtatataaatttatcaattgttatatatatacatttttcttttttgaatttcaattttatttatccaaacgatatatatttaaaactaaccatacaaattttatatatttttcttgtgttattaagagaagggataatttcaaaaaataatacaaaaacaacaaaagtttataaaataacaatttgtacagaatttttaatttttttacggatttttatattttatttacatatatagtcttttttatgtattttaatattgtactcttattattttgtttttaattttttgttatttgtatattatttcttatgttgttttgatgttgttttcttaattcttttatatagttttttgtgtttttataaaatatcgtaaaaatataaaaaaaatacctttaaagtaaaaatacaaaaaatttacaaaaattaatattttatataattatctctcaaaaaatttaattgaatagttactcataatcgtaaaataaattaagtaaaagatatcaaaatttaaaattttatataatttatcgagttaattattgcaaaacaaaatacaatcccacatttctaattttaaaataaaaaaatgaccagcaactttttcaaaacacataatctaaaataaatataattatgggtgagtatcaattaaatataaagattaataaatagaacattgcaaagatctttttaatttttgtatttttgtaaatatgtgtaatttttattttataaaaaagatagttatattataatatagtgtattaactaggtaaatatataattttttgtcctcttttaaatacatgctattttttaatagttatattaactaagtaatacactatatttttgtcatatacgtagggtccttgtatagaatgatcaaaagtaatcactatttttagttatttgtttataatatctaatggttaatattataaataaaaatattaaacataataaataatttattctttcaaaaaatacaaataaataggtaacttgttggttacttgttgtatggatagtaatttttaatgaattatatatttgtttccaataattattttttgctttctttctaatccatgaatgattccaaaattaattattaaatattataattttttataatttttaaaaaattgctatggaatttatttgttccacacaaattgatcatcacatcctattgtatgcatatataaacatacatgcatagtagtaatagtaatcttcatcatgaatcacatactatttgcactatttctaaaaaaaaattaaaatattagtatacttatgctatcaaatccacaaataatataaaatctaaaaactaatttatacttaaaagaatagagatcacaaataatctaactaatatcaatcatattcttggagagaaatcaaccgtaatcaatatattcgatataattgaatcaaaatgttttgtgatatttttttttaaaaaaaaagattatatatagcaattgcaaagtaaattaattatttatttatttttactaatttatttatttttgttataaaataatataaaatagataagaagaaaaaaagaagaaga

SEQ ID NO: 18089 - DNA, 4811 bp, Cannabis sativa
gttttatgatgtctatttaatttacatattacaatgaagttgttatacagttatttatttgttattatttagttgttcaattaattaagagaaagttaatatatatgtatatatttaatttttcatcgtgcacatattaagattgtttttttttttcttttgtgtatttccaaataaaaaaacatcaatgtattgatgtataaatgatcagtttcgtacgtattgaaatagtgttgtttttcaataattttttttagtttgttgttgttgttatttagttgtcaaaaaagaacaatctaaaagtctgtttttattattatttttttttattcaaaataataataatgaaagaaattatactatttaaaagtgtactttttttttaataatatttattcaagtattttttcacaacgtaatacaaatcccatagtttatttataatcattaattgtttttataattgttttatcttttaatttattttgttgttggtaggtgcagtgggggccttgttcggttaatttgatacgcaagtatacacaatcaaaacttatttcacttgctaatgcaatcacccaatttctctttcctatgccattaaaaagttgagttaagaagtttataattttgttaaaacttataaactaaatttatataaaaacttcttatatttctatggtaagtttaataatcacaaaaactaataaaactatataaacaacctaagtacattcgtcctaaatcaatttacatccataataagcatattcaaatctaacctctcaaaattttgattcaaatacatatataacaattataaatgaccagtaaataattgtagaagtgaaacaaattgtatagaattgaattaaaataaaaaagagaaattaaacaacaacattaatctataaaataaatttaagtacttcacgttataattcttaaaagaaaactagctactaaaagttattctaaaataatcaaaatttaaataaaaatataaaaaatagagatgaagagatagaatacaattggagtcctccagtagtgccttctcctcttgcaatttgaattgcatgtctcaatgcatttcactcggcctcaacaaatattcaccttgacaccaattgccaaattttactttataaatttaataattcgttagctttagatttttttagcttaattcttgatgatattagaatttaattttatgctctcatttcaatgttgtaagttttcattattgttttaacggatttatttagttaagtttgttttaccggttattgcaagcacaatctggcctaattatttttctggtatttgaaacctttgcctaatgtcatgcattaatgatttttcctagctctccactcattagagctagtggctctttagtagtattttttaaggttattttctcaaaataaataaataagatacatgccaatttcgactttacaagtttttactgttattagtgttagtttataattttgggtgttataattttttctctaatacctttatttaattatactctcaattcgatatagaataagaaaagaaaaagtgaaaatgacggagaaagaatcattcccttggatataattgcacaccccaacaacaatctccatctgtcctctctgtatctatgtataaatctatattcttgtgtatttatatatatggtcaaattacatatataattatataaatatttatagcacccaaacaaactactgctcaccacagaatatttcaaaaactatttcgaagaaaaacaaaatgctcttctccacatatttttgtagtgtatttggcattgttcataaagtattatgattattctgtgaataatgaaaatgtgcggtggtgataaaatatttactaatattcatggtaatatttttgtgacacgatcatttaccttgttgtctattttagtgactgcaatgtgttattaagttttggtactagttttaagtgatataccaagaagtgctgccaacaatgattaattacaatattgatccaaagttttagcaccaagttttttttttttttttggaaattatgaagaagtgcaaagattgaaatatttattattaaaataaatgatatgttaattaatgaagtgggactatgatgccaatatgttactaataatattggactaagtttagaagtgatgatgtcagaaattactagaaaaaaataaaatattatattttaagataatgtgagtgtatttttaatgaatattacttataaatggtattagaaaattttaaattttatacttaatttttctatctaagtagaaaaatcttatatggctgagattattctatcgaatgaaaaaaaaaataagaaaaagtttttttttttttttttttaaaaaaaaaaagaagataaaaaaaaaagttgagtttgatttaaatatttttgtatataaatatattttttctatagtgtaaaaattgatattttttgatatatatattttcttttgaattaagaagctaaattaagcatagaaatttaaatttctcttttattatttatcattgaataaaaatttaatagtttaatatttttaaattaatttttaaagttaaatttatttagtaaccatcaatggataatatttattaagaagtgtttcatgtatattttttgttaaaagacacactacttatattacacatactatctacgcataaaaatgaaatgtaattattattattatcattgtctagatttttataagcttgacacgtggaacctaactgaggaagccgagataataatcaactggttaatggctcaggccctagctcccgcgaggggcttttgcgaaggatacttccgtgcaaagcagcgacacgtggagcatccacgctccatgatatctcccagtcatgggaacagaggccaagcgcccagaaaaggctgggagtttccttgagtacgcctataagggtcacgtaatgatttaaaatgagttgtaaccctgttcagtgtcacgggagagctccgttcgaacctgtcagattacaaaggtgacagtcatactttttctcgtacgatgccaggttttgtcccccgcgttaagccacagtacagggcatgcacaccaacttgtacctgccctaatgatccaaaaaccatttataagggcaattcaaaaagagaaggccatggagcgacacgtatgagacgatcagacaatactaagctgacacctctatacaccatgtgatggataaaccatctaccgaatcaacggtcaaatctcttcaagcaaaaccagttcagaaatcacgtaaatgaaggagatcgcctataaaactccggcatataacaagatgaggggcaactcatttaagtttgaaaaaccatagtttacttagaaaaaactctattgaaattcctattgagcttcttcttcttcaagaggaatatagagttcaagtccatagtgtaactacttgtagtattcatcatttgtcgatatggctaataaaatgaactcgtagactaaggatagttaacacctgaaccatgtaaaaagctttgtgttcattatttattattttacttctttcttaagttctaaaaattcaatttctaaaaatctcggtaaacaatttagtgcttttattgagagctgaggaaagattgaaacatgtgtggtgtttgctatcacaaatctcaagttacaaaaaggagaacccatccaagaatgggaaaaaagacacggcttgactacctattgagatctggtcagaagtttatccctaccccgacggggagagtgaagaaggtggatgtaaacagccttggagttcccgcagtacctaggcatatttgggaaaactcagatccagttggttgactctttgagagcgcagcaggccaccggtgccttcaagccttggcaccctgctacttagagaagcacaaccatgcagaaacggtgagatatgagaaagactttggtctggcggtgaaattaagaaaagttatgccggcagcaagtaacctgtggaggcctaccaaaaataatgcgcttgttaaactaaaaaattagttactactccaatccctaaactttcgattcctgcgccagtgttggtgttagtgctaggtccatcgtcgttgactacttctactaccttttcgttgagctgtgaagatgaccagaaactgatatcgcaagatcccgcagtggtggcaactgtgagatttcctccggtgtctgtcaaaatttgttaggtttctggttaggtctagttatggcacggttggtagaaagtttgttgttaaggcaaatcacttcttggtcaaggttgctgaaacggatctctatcattacgatgtaattataactcttgaggttacatcggagaaagtaactcgaaatattataaaccagttagggaatctctaccagattcacgattacagtgctggaagcccaaattcttatcttgtcccgagttcttatcacgtgtattggaccaagggtttcgcttggaaggatgccagttcctagacagcggggtatcctgaggtctccctgaggagtaggccacccttaagctctcggagtgcatcttttggtactcctaagctcgctggctcagggtggaactgcaccacattttacacgtttcctgagacttctggcattatgtagactaaactagactcagcgagatgatgcggatatgaccaagtctaatcgcattcgtatgactcgcattatgtaggaccaaggaacggatttaacccgcata

SEQ ID NO: 18090 - DNA, 3225 bp, Cannabis sativa
  modified_base (2079)..(2079): a, c, t, g, unknown or other
aagactaagcattactataaggcacataattaccaagaagtaatgttttgcgattggttatcgatattttaaaaagttattactttaaattatatgaaacataattcttaattatactaatgaacgataaaattatattggaaaatggtagacatgggttggaacgtgtcttgttctcaaaatatatatgagggaccaaataatattgacccttcaaattgttaaagatggttacattaatgaaggggatttgttaggcatgttctaatgtcataatttatctaagctctattaattagttaaacatttattatcactaggtttgttgagaaaattttaatcatattaacattaataattcgttaatcgaaatcataacaaattaataaaatataaaataactcgatttattattttattatgttatttaacaacccaataaaaaatatattttattttgtttatttaactagaaaagtaaccaaaaattttaattttaataaattgtcatttctaaaaaagttaattattttggatttttcataggcatatttgtcttttttttttaatttttaattaatataaaatcatgaaaatttttacactttcctttttccttaatttatgttggacacccactcatttctaataaggattatttcaaagaaaaaataacacaaaactaacaaaaaaaaaaattacaaaaatatggttgtatgaaattttgaatatttttaccgattataagatttttttacataaaatacagtcttttaatgtatttttatattgtactcttgttattttattgttaattttttgttatttgtatattattttaatgttatttgttattattttaatgtaatttttttgtgtttttatagaatatcgtaaaaacatatataaaaaaatgaacataaaaattttagtttatgtaattttcgaattctaactttctaatattaccaaagtccattatccatataggtaacaaatttcagatgtggaggaatgtcattgggccttagttgggcccatatcctaggcgacgcattttcagcttcagactacataaacagatgggcccaaatcgttagtcttgttctatccaacgaccgaaaaacaacaatgacaaaagcccaaaaccgaaagcaccatgaaatcactcccaacccaggcccaatacccaccagaaacttacccgtatccctaaaacgggtcgacccggttgctgatcattggatagcaaaaaacgacaccaaaatggaaacattttcattcccaatttctcattcccaaattacccttctaaagtcacaattttctactccaattttcgagtcactttgtgccataatttggaaatccatagccaaaatcagaaaagaatcaaatccaaaaacagtcacaattttcaaaaacaaccccaaaagaaccaaaggggttttggccaatagccaaataataagctcagttgaagttgatttttcagtagtggagacagaaacaaagattttggcttcattacttagtgaaaaaaccacaatagaaaatacccaaataaatgaaattgttgaaaatgatcaaggggtatctgattttgtcgtttatggggcaaatttgtcgtttttagattggcaagaggttgatttatatgggttggaattgcaaagttacaagccaaattttgtgtcgtttgatgttcaaggtgttggggaaaacggtgtcgttttgttggccccgggacctaaatatattgatgagtttggaggaattgaagaaatgttgatgatgagtttgattttgccacaaaatgaagtttgtgagatgaaatttgagttgaagaaaaatggtttattgagtgaatagaaaagtgtgcactaaatatttattagtggttgtgagttcaaaaataaaatatttattagtggttgaaaataatagagtgattacaatgcgccttattaaaatagttgtatttgtgcaacctttaattgtttttgcatttagaagaattttttaaatttttttaatcgtgtacgttgtttaaaatattctgtaaaattttgagaaatncagaataatttataatataaaaatgtttaaaccgtttgttttaaaattgtataaaataaaaaagtcacgcgtgcaacaaattttttgaatctttttttaacgtgttaatttttttttaatttcttaaaattttgcagagtgtcttaattaattaccacatatacaatcataaaaaaattcgaacaaatttttttttctagataccaaacaggtaagattatatttttgtaacattttgaaggcatccagaattttctaaaatgatattatgttaaattttattctaaaaaatattcttatttttttgtacttttattctttttttggtttggcatttcctaattttcaattctagttgtgttcttgtacacatacaaaaagttaattccaaacataatactataaataataaagacctatatgacatttgataaaaatgtgacttaatttatattagtgtatattttatgtatttatattattaactttatttatttagtggtagaagtggtgagtggtatggtactgttgccaacaattgagaaaaagaaaaaggaaatgtttgtaattactaatcctaaagaattaatgaagagctttgagttaatctttattcaaaaaaaaaaaaaaacattgagttaataaagaaataataataaataccattttggatcctgtgttttgcaaaagttatggattaaactttctattttgttaaatgacaaaataaaccatgtattttccagaatagtaaaaataagattctaagcttaatttttgacaactttttttttttaatataatcaacttgaagacaattcctaacatgaacagatacaaaaaaatataaactgttttgtcataatacctttaaattagattattattaaattttattttgacaaaaaattagtccatggtcctatttgtaccattttaaaaaatacagggtccattttgttattgagaaacagatatttttatttttctttaaacttttactattttctaaatcgaacatagtgctattttattaaaaagactaaaaggcaccaataaattatttaatattttttaacgtgttatacttatatcactgttagtatatttaaatattaaatgttatataatttaataaaataattt

SEQ ID NO: 18091 - DNA, 8197 bp, Cannabis sativa
gggtttgggcccaaggggtacccagttttgtgcaaatgggtgaggacacacacaattattaagaaacgtgtttaacctgggacgacgggcaatttccaactacttgcacatttcaaattcttcattcggtaatatcgttcctcttttattttgctagcagtttactcaacaaaatatgccattattgatgaatgatttttcggaagagcatccactttaactacaatattaatggtgaatttcattgttccatgattcagaactgtggggcccaccaataaggattacaatgataaactatgggacccacaacctcttttgtctgcatctgagccgaacaatctgatgaaatcatggtaggccccagaagccgttcacagaacagaaacttttgtggatttgtaggtttgttttgtgtcgtaacatgtctaagagggaaataatactattaaaaaataactcaatacgacagatttaaatgtgcgtttcatgtgtgagagagtggcctatatataatctgagttggcacttattagctaaatggagatgagccactctgtcaatggatattatgataatgacaaaaaggccatgcatgataattgatatgcatttcccattacgaatgttcaataattcataataatctaaacataagtaaaataatattcctgaaatttctacacttatttatagggatcaattgcttattgagagacattttgttttgttactctgttattagaatgtggtcatttttagtttataagtagttttataggcctctttcgaaaaaagtagttttataggcaaatcaaatccatgttcgttttttttttagttgtcaaaaaatggtctatattctataatgcttaatctattaatgtagatacatgattgaaccatatctaataattcacttcggaaaattttatgtctttctatttcttttttcttttttcgttttgacatttatttttgcaatgacaattataccctcgtctaagttcaaaagattggactttttgattgagatgttttgggactctcctattacattaatttagggaatctagtggttgatttcttagtttctaaggcaaaatttgttggtagagttgaatatgaaccgagttctaatttcattgaccaataatttagaaaaatgggataatacgttgcaaaatttatttctatcatgacatttttactattattttaagtgagtattgttacataattaattaataattattagactaaaatatatgtaacttcatatcaaactacacttaatatattatactcgacaccattactagtactttctaacaatttttttagggaaaatttttatccaaaatatttataattgattttttttatatatatttctatgtatattatatttttttttatttcttttaatacatttatatgaaacatgatgaacgtaatataaaattaacatgtaaacaatacagtacaaatataaaaatacaaaaataatgtataaataacatattataatattattgtaaaaataatgtgaaaaataatagcctgtatcttttaaaaagaaaagaaaaagttgttgaatcttattgtgccttggctatctctcttttgtctagtactgatttctagaccttgagggtgtcattttgggacataaaaaaaagttttttctcttaaaatttattggttttcctttattttcaaaaggtaaatttgttactaatcttttagctaaatacttgttactcatcatttagctaaatactctgttgctaaaaaaattagtgcttttttaaaatagggacttttcttatgttgcttgttctggttttactgcaaacataacatcttctctattcttggtaatgaattctgtttaaaacaaaaaaatctaaatctatatttttataatatataatttttgtacaaaaatactccttttactttttgtaatgtaatgtaatgatatgtacatataatttacacacaaatttaatacatatttatataatagataatttttaaatatttttatttaaaatatgtctcacttgtcacttattaaaaataatttattatataaatatgtattatatgtttgtgtatattgctagtatatactgagttatgttcatttatttttattgattttgtatatttttcattctactaaattttttaattttaaattaatttattgtataattttaaaaaaagaaaaataataatttattgtattaaaatttgattgtactttaacgtaatttaattcgatgtcataagcaaaataaagtatacaatcagaagttctatttatacaccttattatatcttggataatgtaagtttgtccctattccaccatttacataacaatttcttgagttgaaaaaatagcttgtaatactaataagtaataacaatggttaagcttttgacagtttgatagtgtaccttttaaggggagtaattgtgaaagctcatagagatggatgaattttaattttcaaacagaagttgacactaaccatctctagaagatgccacatggagccaatattaaacttataatttaatattttattttattgaatattacaggtgcttcactaaaaggttttattagcctgcaatacacataattacttaagccaaaaataaataggaaagtattgttaaaaaaaaaaaaaaaaataggaaagtagacacttagaaagtccaaagttgaagttatcactatataatattaataattagtattttatatttattagctaaattttttatactattaaattatgtctttataatataaaattagttaataatatttatggagatataatacaataacctaactcttttatcatattttaattttatcataaaataaataataaagtatatagtaattaataaatcaatacaaattaaataatttttactatttttactttttaatgaataaaaaactaaaaatataaatcctataaattattataaaaaaagaaaaaatattatattactcattaatgtaaaaataattaaaagtattaatttgcatctatttattaattatcattcaccactttacttattttacgctaaaattgaataaaatgtaattgaaaaattatgctactataaaatgtatatttcaaaaaagtactattaagaacatctcaaatggtagtattctttaagggtgttataaagaaaaattttgattttttatacaaacattatgccaaaattaatacactaaacataagtgtatcatagaagttagggatgacttttaacgacatgtagcgatgtaattaccgacaattaaaaatatttactttccacttgcgatttttgcgatgtctatcggcattgtccatgatatgcgtgatagttttagtaatagtgttcaggagccatctgtaaaatttaagacaaaataaaggaacatattaaagcacttaaaaatgtgtcgctaaacgttgcaaaaataaatcacaacatatcgcgaacaaagtcaccacatatcgatagtaatcactaaaacataaacataatctgtgagaaaaaattcccaaggcatatgtcgtgacatgtcgacaaacatgttgccacatgtcgctaactacagcaaggcaaagtaaacaatcaaaacaacatcaaaatcgcaaatgatgttaacaacatatcactacatgtcgctaagggtttcaacttctaattcaatcatagctaatatcgtgagatgtaagaactatatcgactaatatcgctaactataacaatttcatagtctaaagttgatggtattgataaaagtcgctaatatgtcgagaaacattgataaattgtagaaaattcaaaaaaactcagaaatcaaatccaaacacacaattttaaaataaattaaaaaaaaaatctcttaaacttttgattgagcttttggattcttggggttttcaatgtacattgattccctcgctaacataccaagaccttttaaaattttggggtgctgggtttcagtagtgagtaggattcgaggcggttcgtgagtttcaattgaagaaaatagaaagagggagaaacaagtgtagttcgattgtgttggatgttgtgaatagtagtggatgcagtggttgatggtggtggatgctgctatggtgagtgagagggagcgagaaagattcagagggacagagtgtgagagttaggtgaatttgaatggaaggggtattttgggggttaagtaaaattgagatgtatttaaagaatgttttgtaaagtaaaatattaagagtacctaaacccactttaagaatgaattgtcaaatttccctttttttaataaaataataatgagaaaggtattctaaacaatatatttaggtagcttactcgaatatataaatagcttcatcataaaataggaaagtgaaaaccatgttaacaaaccagaattatactgacagagaaatgtgttcttcactaatctaaattaaaagctcaaaagtatatatctttttcacgtggcacttggatattatatgtcatgtgtccactaaacacctccatctaatgtgaatttttaaacccaaactttcgaaaagaataactaaccccaccaaatgggatgaaattaatggaatgtattatttatcgtattcgtaaagtttaattttaatttgaccccaaaaggatatcaggttaaaaatcgtcatcacacccaccaaacatttcaagaatcaaataatcagaatcgtataactgcacaaatatggtttagtcaaaagtattccattaaaatgactatttcacacataatacaaactaaaagaaaagtatattaatgtcttgattaagtaccattctttttaactgaaggaggccaagacaatctcctgtggtcagtctgattcaagtcccctggtatattgtttccatcttctactttttgttgctcaacttcatgcctcctagaacttcttatggctaagtcatcaaaacttggttcggttctccatggaggtggagtcacacagtcagtattcccagaaactctttgtgaaggatccttggcaggtgtcacaggcacagatgaagctgaatgacccaccctcagattctgaagtgttgaaaacgattctctcattgcagacattgcttcaaagaaccgagtgcacgatgctaatgcaacaggaattggacgaagcatttcctacaatgattaaacaaaatgaggccaaatgacatcgcatacaaattcttattgcttactttgatagatttataacaatgaatttgactcagtacactgtgccatgaagtctacacaacatgagcattatatatagattacaatgtaacacaaattgcgtgtacttttcagagatcagatgtaatatttaacaaaggcaaactaacgtttatgtaccagagatgctagtctatgaactatagatttttagaaagaaagaaattcttctataagcataccccccatactgaaggtggctccttaaaagtttgactccattgaaaatctgctactgatgcagtcaaggccccataatcacttgcagccttcatcaataattcggaaaattgtttctgcacaacccaaacaaaatatgtcacaagattatagttttattgaacttgaatgccactctcatactactagagcaaatgaaaccaaaacaattagcatctctgagtaaattaaaaacaatctgcactccaacttttaaatttaaattatactttcatgagaatatgaatgaccaacctgatactcagcctctactgggatgcaatctagtgaatatggttgttgaagacgagcaatgatgcgatcctgccaacataacatgataaattaggtctcataaattagagggcatagctcaaaattgtaagacaggatcaagcatgtccttcctctatcagcaaaagaaaggaaaagggacaatttccagaaagatggagcagccactgattctggtgtagatgtagaactaaaaacaattatacttatttgagatcagcatagatgcaatcaaaccattggatcttaaaaaaatgcaatctccaattttacaatgataaacatcacaattacagttagatcacaaaagtatgttggtaaatctgtggaaaacataaacaatcaaaaccaccggaagtttctaaagagataagagctcaaacaaaaagctcaaattttcatcatatttttgtccaaaaaaacgatattgacaaggaaccaggtgagctaccttattctgaataacatccttcaaaatagtagtaatccttcccaatgtttcacacttcttttccatttcgcttacatgagtcaaatatgccacgtttttgtcatcctaaaataataaattttgaactcaattaaacaggaatcagtataaaatagaaagtagatcagagtgtgatcttacagtaccattgataattcatggaaaaactactgcctgcaaactgaagaagaggcaactcaaactgttaaaccttacctttctcccctgaagttccacttgcagatctgctattttcctttgtacagcggtaagttctctcaaaactctgatcaagtcatcacctttttccccagtggtagttgataaattctgaagttcttcctgtgaaaccacaagtacatacattgagtttttcacaactaacattattaccctaaaatgattaatgctccctgcatggtaacttatttaaggcaatcaagtagcaagacacttttttttttttaaaaaaaaaaaagaaacagtacaaaatgatttagttggctttccctttagaagcaaataaggttcaaatgcagaaacaacagaaagttcccaatgctaaagagtgaaaataaaaaaaaagggcctttatataacatcaacacaagttccattcaccaactcaagggagagaccattttattataactggacgagcaccaaagtaacatttttctcaaacttcttggggataaattccatgaaaatttatttagtcgattgcgaaggctggtctgtcctggactgaggacgtgtcctttggaatggtagataactagatatactcatcaccttctctagagaatatttccttgtgctcaatcccgtatcctttcggttttaacatcagaaactcatctcaagttcttggtgggacttgagaagagttggagtgattcttctctgcatatttcacccacccgtgtcactgtcatccaatattgtggatttttgtttgcatcagcttcccatcgagaagggctttcaagtaggtttcttttgtgagctccatcaagaagttgttggtgcttctctccttgatcgagctgaatacgctcttcaccaacgatgccaattctttctctctctcccccagacgatttacttgatttttgccgttctaatcatgattctaaccagatttttttttttttattatttccaaataaagctcctaaacaatttccataaaactcaattccacaatctatacaaatatgattctcagaagtaattgggcaaccaaaatgtgaagtcgtacatggaaacattaagcacacactcactcaaatcaagtaaaatgtacaaagagatagatcataatttgaatttatcatcagccaaaaaagaaaagaaaatcagaaatattagatttacaaagatcataatctgacctgtgtaggaggtggggagactgaaaaaccaagatcagaggcgatagagagagcatcagacattcccccaattcgacgcaaaggcttccgtccaacccaagtagggtcactccccgtcgacatttttgggcactcaaactcaaatttccagtcaatcaaactcaaggaacaacttcaacgccaattcaaaatttcaaaattctaaaactgttttactggaaatctcgatgtatgtatagtttgagccgaattttgaataaatataattgctttgggccgaacttttcgtaaaagcccatggttgttgagctgtcaagttcatcgtaccccatttttgcaaatgaaatgaaaacaaagattgattgaatacacaaataaaacacttttatgtaaggctgagcattgttcggtttgctcggtttttaatccagaacttattttaaaaccgaccgttttgaa

SEQ ID NO: 18092 - DNA, 2519 bp, Cannabis sativa
aataggtaaatcattaattgcatattaatagcctactaaaaaaagcataaaaatccaaatttaagttcggttgagcaaatactctttgttccctaagcagtaacgacattagcttgatcagctaaaatagcattacgaaaaaggagacaaatttgtatctttaattttctttttagttaaacaattaattaaaaacaataataaagacaaatttaatccccacattaagaaaaaaaacaagtttataaggttgggcaaatatcggcatacccaattgtctcataaagtgcctagccacagcttctgaaactctcccatggcgattgatataaccagaaagatcgccaccgtcacagtactccaaaacaaggtaaatcttttcatcggtctgcaaaacacatagcgaacaccattacatacatacatatatcactacaaaccataaaaagcagatactcacatgtatgatttacctcgatggcttccaaaagacgaataatattcgggtgatcaattgttctgagaatagaaatctctttgagcaaactctcactgatttttggactcagttgtttcttatcaatctccttaactgcaacttcgagacccgattgccgatgcctggacctccaaaccacggcgaatgaaccagacccgattctcggacccattatatagtctccgaccaaacgggtctcactaggcccccgaaaatccatctggaaaccgacccagttgaccaaatagcacgaataagcgaaatgcccagttgggtcgtcgtcgttgttgttggtttctgattggtttcaaaagaataacatgactaccaaaaatttattaaaaaaaaaaaatatatcttttaatgggttttgaatatgaaggaggatggtgaaggtgggtttttggtttttcttctgaggaggttgatagtggaagaaattaatggaacaatgatcatagtgaaagtggtttcctttattagctttatgtgtggaaacgacgctgatcgtgaatatatgttcggaactgagttgaaaaaactttatttggtgttttgggctcagaatttgaaagaaagaggatgagtggatggcttatcaattagaccacaacacaaaaatctcatatcttgctcatattcaaataataataataataaatattggattatttattttaaattattgttattattattattaattattaattattaatgctgccgaagtttcaatgattatcccttttcagaaaatataaaaataaaaaaaatcatcgtttagtaaaaatctgatgattgatcaccaacaaacaactccctcaaaaaaaaatcaccaacaaacatttaaaatgtttttaaaactgacatagatattaatctgaaatttcgttttcaaactgaaaaaaagaaccataaatgtaatgtaagataattaatgtatctaaaattaatatgaaatttttattcaaaaaaaaatgttacatttatcacatccaaatagtgacgaaggcctacttttacaaaagtcacacatattctttcttcccaacagaaatatattttttaattatatttgaaaacttaggtttgcccatttctcatttgtgtcaaatttaaataatttggtctatttgcattctttattaaaagaagttcacagccaataagattgcagcggttgtctctgaataatttgagaattgttattggttattttttttataggtaaagtataattaattagcgatattttttttttaaattataagagattgaatatttaattacatcaataataatataatatctaagaaaataatacattttaacaattctcatttcaaatattttttttcaaatttttttccgtaatcgttatagttaccatataaatttttcaaaaatttaatatttaaaaattttcaaaaatttatagagatgatgttgtaagcataagaaacaccactatgaaaaaaaaaattgaaaaaaaatattcagatatttgtttttgagcatagaaattgactaagaaattataacaggaagttaacgataacactcctctcagtcttaaatcacaattaaggtggttggcatattcttaaagtcttcgagtccatggtattgatgttctgatatgtgctatcaaaacaacagcactaaaattggacctttaaccttttcttttttttcctcatatggttcaaagatttgataaaacatcaataaaagctctaaaataagtacagaaatacgaaagcaaacaataataataattaagggaaaaagtaccttaccaaaacacgacttggtacatcttacatataaaagtattaactattctccttaattttctcatcatcgtgctcacacaatttaatttcctcttttttaacaagatacaataaaaaagaacaaagaaaaaaaaaagtgcttctctttttaatgatcccttgaggcacttttctttaaccattgattatggattctatgaatatagttgtttttagttttcttt

SEQ ID NO: 18093 - DNA, 1732 bp, Cannabis sativa
tacaatattattctgtaaatttttttaaaaatgtcaaatcttttttaaaatattattctgactttagtactttaaactattccaaatttttcagcagattccagcatatgattttagacacagagattgtaattagaagttattcaaatattcaagttactgattagcaataatcaaatatactaactaacaaacttactgcttagcaataacagaaaatgactcatcattaaagaaatgtttagcacaaagtgagagtaaaaaagtttgtacctttaatcttcttcccaattctttgtaaagaagaaaaccagagaattcagcagtacaagacctttccaagaactcaacaaagatttgtctaagaggaccttccattttatcagcagcttccttaaactccttattcctaacgaaatgggtctgattataatcagtcttgaattcctgaagcagagcaacgaattcatcctggtttaactgtttgttaatctcagtgttgaaaagggtctccatttcatcgaaatctgtagtgtaaaacctcggcgtcaaaagggtctcattgatattcttcttagaacccttcttcgaagaagatgaagaagaagaagaagtagttgcagacattctaacagaggtgaatctgggtttggtaaagctccttggaatgaggaattttggggttacattgttgaatttggagatgggttttaccaaagccatctctgccgccatgttcggaggagagattgaggttcagagagggttttggttatggcggattaagctaaggataaggtgagtgagtgagtgaaggtattataatggtggaaaggaaagaggaatctcatctgaggaaatctgtgagattaaatgggaatttgacacgtggcatgggaatgttggcttacttgattggtttagataatgccacgtggatagacattcttgtttgtggttgttattactctttgttggattttctatggtgattttcttggatatctggatattacttctaattatttatcatcaaccacaccatcaaagagattttatttgtactatacacatgacacaaattttggtagtaaaatttgcctcttaaaggaatggtaatactaaattttagagacaattgtatttgtagtcaaaatatcaaaacaattgagagtgatttcaaaatatattaatgtttatttagctaactctaagaacattattgattgaaatttttctaaaataactagaaatttaaacttcgtaggccataatattgccaaatgagcattgctcctaggatttgtagtaggttaaattgaagttgtctcaatccaactcatgtttaaaagtaaatatattttaaaattcttccccctctcactagcttgagacaactctcttttgcacgaatatactgatatattccatatttattaagatatttcagtaaaattttaaaaaatttgaaataatttacagtatagaaagttttattcaaacaatctattttatacacgcataaaataaatcaagtcacgttgcaacaaattgtttaaaccctgtttttagcgtattaaatttttacgaattttttaaaattttacaaaatatcttaaataagtactgtatacataactatgaaaaaatacaataaattttttttttttccgaataacgaaacaaataaagattcatcgatgcttggtagaattttcatgtattttaaatt

SEQ ID NO: 18094 - DNA, 3868 bp, Cannabis sativa
  modified_base (3798)..(3806): a, c, t, g, unknown or other
atgtaaccaggggatgttccacgtgttgatggtcagttggctgtggcgagggcgttcggtgacaagagtttgaagaagcatctgagttctgaacctgacgtgacagtggagctcattgatgatgaaacagagtttcttattctggctagcgatgggttatggaaggtaatgacaaaccaagaagcagtagattccatcaaacatataaaggatgctcgctccgcagcaaagcaccttacagaggaggctcttcacaggaagagcactgacgacatttccattgtaattgtccgcttttagtcgttatatatatgtgtatatatatagctcttcctctctctctctctcgttttcggattaaaacagccacagtaatgtgttgcatattttgatgatatgtgtcaactatttcgtgcatgcaagacatgaaatgatatcacatgctttacttaatggctaattaattttcatttgaaaaactgcaacaatttttgattaacaataataaaagcttaaaattttatttatgtaagtgttaaactcttaaacactaaaccaagcagataatagaaagtcaagagacttcaacttattcttacgagaccatggagcatgtcagaacatggccgatagatacacgcaccagttatttatatatatgtctttatatctatatcgtaatatatatgagtgacagaagagagggagcatatatgtatattttatagtgcaagagtatttgtctcatgatctaaaatggagatgcttgtaagtagaactgcccagatacttgggcctttgctggtcatcgaactctgacctattaaactgttgagtttctttcgaggttttagcgtctccataagactcaactgagcttttcctgcgtctctcattatgtccagccaaacgcctccggcagcttctttttgcatcatcaaactcagatatttcatggaacctgctacttgactatatcaattactatacagtccaattaaaaccaataaatgtttctatatatattgaagttgaagtgtcctaaacacatgtagttagatgatcatactacgcataggcaacggatattgaaatattaagcctgatataaaattaaacaatcgtagcatatataattcctagacattattaaatggtgcaaaaatatatagacagtaactacagacagaaagaaaaaaaaatgctggaaagggatcataacaatattatatttttagacatgaatattcagtcatttgaacaatttaggatattaagttaacgagcattgttattggatactaagggtgcctaggaggatccgctacttagtcacactaatagcagttttgctagacaataataccttttagcaattctctaatttaatatatacttaacattttatgaccatcatgtggaatttgagagaaaaatattagccgccttggtcataaacaaaataaacatagctgttaatagttttataacaaaaatcattatatagagagagatattttttataaaaatacttttaacaaaaaatgacacttgttacaattggagttttagagtgtgtgcgagtgtgggaaacgatttaattattaaataataatataaaaataaatttacgaaaagaaagttcttcaactaaacgccaaatgaaatctataacacacttgggttataggtaataaattaatgatttggagtttgataactttgattttcacggcattgacatatacatatagcatctgcaaataaagccttctaggatggtcatattcacacacgtacacttaattccaccaagctatctaaaacttccagttccacaacaacaattgctgctttagttatatataattacatataagggttattgtggttataatactaaattttttcaattgttatatattttagttttagcgttaataatataaaacattaatattttgttacaattaattataaatggttaatttttttgttgtcaaataattacgtaacaacacttaaagtaacacaaaaaaatatttaaattctaaattaattaaagaaatagaattatatatgctagcatgtcattgttttaataacaaaaattaaactaacggaaagtgtaacaattaaaaaaattagagactattaattaatttaaggccaaaactttttctcggtacaatgatcatatgaaatcaaaatttaatgtatatatcaagatttacaaatttactaccctattcatataaatatatgtacagatatttctttatttctaaatttcaattggccgaagaattctcatcgcactattacaccttattgtcttttaattttcttcctattgttactatacaaaatggtcatttaagttggtcaatagctaaacgccgaaattataaatatttgaatgcagtgtagattaattgattttttttttttttattatgaaagtagattaattgattgaatatgagatattacactttagaaaatagtacttttccatatatatatatgcataaaatttaatgaattagtaccatattgattgtaccaatctctcaaacatagcatatatatataattaagtgcaatatatagtttttcatttataaatgtaatatattacgaatgcaataataataataaaacttaaagaactaagcaagaacgctagtaacagtacgtataaagaaaaggaagagggagagagagagatgacctgctacattgctggcaaaagcgctgttgaagtccggaaacgaatactattgatgccttggaatgaaactcacagaccttatggcggcggtgataacgtttggcatcacttagatcagctccacacctctctgcctgacaccttgctggcgagacatcaccaccaccgccacctcccgacgcccttgatgatgatgatgatgatgaatatggtgcccctgctcctctcttcctcttatccttgtcatgattcataatcaagctgccgctcgattcacctgattcgcccccgagtaccacttcttcatcctcattattgttcatacctattaattaatacctctctctctctatatttagtacctacctatagtactatatattgtccaattttttctccaagttttcctgatcagttgatcatatatattatatagttcgtaggcttcgcttccatgaaaaattgaaaataagaaggatatatattgatcccaattaagaaagttagaaaagtttataggtttatatagaatctgtttggagcttggagaccacttattgtgaaagccaactggctagttttacttggggaaaggtcgtgaaaaaagttggagagcaagaaaaggaccacactctatacctccaattatttatagtgttggggaattgcatgtatatattatgtagaataatcgcaaatgacaatatatattttaagaatatataaaattagtcgtcacttttttagattttttttttgtctatgttatatttttttatgcctgcatcatacatatgtggtctcgtctttttctcacacgattaaggatgattacgtacgtacgaagtgttttctttttcttttatgtacgtattcactatataaatacaacttttaacttaccaaaaaaaaaataatatatatataattataaaatatctctaaaatctatatgggtgactattcaatggttacatttttattgtaatttctttaacctgtaatagcatgttactaataggcagatttttttttaaaaaaaatttaattaattataattaatnnnnnnnnnaaaataattaattaaatagtagacattctttttttagaattatttaattataattaattatt

SEQ ID NO: 18095 - DNA, 4585 bp, Cannabis sativa
ttcttttaggaaaaaactcataattgaattgtcttctcccaccaattatgataatctcaccattaggtaaaatctgatttgttgcataccatctcctttgggataaataatttgggatctcaatccaatcacagatttgattgagacacggggcaaaaacacggacaacatgatcgccgtcgttgtaaccgccggtttggattagggttccgttggggagaacggctccggaagaacaccacaagtcggtttgcacggtgagaggacggaaggtgtttgataaaatgtcgtagaggacagagtgagcggtgcagtctacttgtagggcggtgtcgtcggggtccacacggcatcggccgccggggagagagatgtttgatcggccgaaatcggtgcggtcgtagatgatgactttgttgttacgtaaaagttgcatgtgcatggctgatatgccaatactctcatgtaaaagatgccatcttccattgctactaaagaatggtaatggtaatggtgttatgttaataatttgggatgaaagtaataataataataatggatttttgaagattagtaggattaaataataataataatgaatagtgaaaattatgctcatgatgttataattatatatttgtttttataggttttttgttggttaattttgggtatgaatattaaaactagtgatggttttggagggctataggtgaaaaaaaaaaaagattaaagaagaagttggtttagtgtagtgtgatcttaatgaaaatggaagaggtgtgtttgagtagtatttaaataattcttaatatatacaatatatatataaggagggtaaccaatattattgatatggttattattttttattttggaaatgaaagaaagtttatctttacgtggatagaagtttttgcacaaaaatatgcatgtcaaaacaacatatctatagctatatatatcatgatttattattataagccttatactacaccaaaaaatagaattagtgacatataatttggtaacatttgtaaaaaaaaatgtcataataataacatttggctacaattgtcacttttaagagtataattgacattttaaatattttttcttgcaataaatagaaaaagacaagattaaataaaaatatattttgacataacaagtataatggaatatgagcaattataatatgaatttcttatttgtagtaatgaatttcaatgatacattagtaaacaaagtgggcatttggtctagtggtatgattctcgctttgggtgcgagaggtcccgagttcgattctcggaatgccccctttttttccttttttatttctcaaaatacaaatgtcgtgagaaaatgacacgtgtaaatctaaaatagggacagaataataacaagatgggtcccactcacccccttagattcctagaatccttatcctttaatctagtttctactctacacctacccgtacctaatcatttccacctcttcttcttctttttcctctctctgagatttatcttgagcttcttaatcaatggcaggtaattcattattattctctgtaatctgcgttctccactcgatgatcgcaatcaccagcggagctctaatgatgttctacatgaaagaaatctacagcttaggccacgggaaagagatcgcaatcaagctcatgggctccacaccacacgatcagctactcattcggacctccgattcgttctcgggtttgctgctgataaccatagggtttcttctgttgatggtttcgttggttagagacaaagagtttcagagcttcttcgctaaagggtgtacgattctccatgtgttgatgggtctgtggagattttacttcgaacggagggttgaagatctcgcttgggattggattaggcagacacttggcgacgtcgttttggctctctcttgggttttttttcttctttattcttggagagaaaaatatgattgatttttttttaatgtaaaagattaacttttgtatttaattaattttatgtatttataagaagaaaaaaatgtctaaaagggttttatgtatagtaaatattgcttttttggggggtgaataatgattttttttatgtaaagattgtgaaatattaaaaaaaaatgtatgtgtagactgtagtgtatgtatttattaattttatgtatttataagaaataaatattttaattaatttgagtatgagaaaaaaaaaatgtcttaaagtgttttatgtatagtagatattgcttctgtttttttttttctaattgtaaagattgttgaaaaaaaatgtattaattttcagtgttgtgttaaaaatataacccacttaatctttatattggacgggttaaaaataataccaactcgcccaatcaacccgattaagaaaattttattataaatatatttatatataatataatttacatacatatttaaaaaatatatatataaaattcaaactattatatatatttatctcattatcacaattaactaaaatatgacaattaaatgtaaaaataaaagaacactagtggtcggttttggatggattaactcggccaattttaccttaatcaatgtaaaaataaatatggtattaattaaatttctataattgtattaattaatttttaattggtaatcaaattacatttaattttttcaatttttcttaccttttttagttatatttatttttattaattacctaatttaatttttatattcttaccttgttttattttatgtattaatacgtaattaatcaattttttattagatagaggcaaatcattttaatttattttgtaaatgtatcaattgtatcaatttatttataattatttttttaaagtactaatttattttgtaaattttatttattttttagccattatgtaagttgattagtctttgtcttcaattttaaaacttaacaaaaaaattatcaataaaccattgataaaatatcgatatctaattgataaacttgagacattcaaaaaattaattaacagccattaaaccatcaacaaaccataaataaaatgtcgatttactatcgataaacattaaaaaacattcaaaaaaacaattaagctaaaattatcaactacccatttgattttcaatcaatattatatcgattggtggtggtatgtctcgatctcagttcgtggtgtggtacagtggcaatggtgattgagagaaatcaaggaggagaaagagaaagatttgagtagataaaatttggaggttgttaagttgagttttatgtagatgaagaggttcggtagttggtagtctcgatgtctgggcttggggtctcggtggtgcgaggaagagacagaaagggagggaaaatgaaagtgaaaatttacagactaaaatcactatagacagacacatctcaacataaatcgtttcatcattcaaataattttttctcaatttcttttataaggaaataaaaacaaaaagtcatatgtttaggcagtaaaaagtctcaagtcaaaacaccctttaattcatgtattataatatatagagtaaactaaactaagcccttattatctcaaaagggataagcattaaaattacacacaaattaaaatatgcaaaaatacaacaaaggcaaagctaaatggatcttaacatataacaagtggagaaaaatggaggatcaaattatacatataaatacaaaacactttggagagcaaaaaatatcagaggtagatagtattagttcataattttggaaaactcatgaaatttatgaatagaaactaaaatcggaccacatcctgaatgcagtcgtagaagtgagagatcttgattttctctttgccggaatagattgcctcggcggatccacctgattcgccttgagccgccatctcgatcaacatgtacagcttcttgataggcatctgagagtaccaattgaaaacaatcaagggtcagtcaactcaccataaccatgtgaccatatttatacacatagttgagcattcgagctatatctctggtgtgaccttaataatatactatttctatatttatactaaagaggggtaacaactccaaaactagatgagaagatacagcagcacaaaatgtgcataggtttattaagtgttgtgaatgaacaagaaaacacgccctaatggcatcgaagaagaaaaggggaaagtaactcacgtcgtccagtgcctctgcagctgaatcgatgtcgtcctcagcgaagacattcaattgttgtagcacctaaaataagagagaacaatggtaatccagacgtatataaagatgtacaatgtcatattttcatatgcaattagtttatcaaggaagataatgagacttgtacagttgtttcaacaatctaagaaaaagtaacacacagctaagctataacattgtacaactaacaaacaacattataatagatttagcatatttttattgggaattttgattttatatacttaaaaaattaaaaaaatttattattaaaccaaaaacttaaaccataaaaaa

SEQ ID NO: 18096 - DNA, 3539 bp, Cannabis sativa
  modified_base (2623)..(2623): a, c, t, g, unknown or other
gactgactggagaggaagactaagatgaagtaggacagtctagatgaatagaatcaaatttgtagaggccattgtcaaacttcccaactaggtcttcttaaagtcttgatctttaacagtgcaatgaaaaggaagaaactcaaagaaaactttattgtcaagagcaaactgagacacactaaggagattcttagtaataagaggtacatgtaacaagttattgatgataagttgttttgtatgaaaggggagtgaaaaagaagtgttaccaatagtttgaatgggtagtcctgagccatctcccatttggatctattgattaccagagtaatcaaaactataagccaagttttgagcatttgggtttaaatggtgagtagcatccgagtaagcgtaccagctgctgtcattcacagtttcaggattggcatattgagttgtagcttctgcaagatgggcattacttgcaaaactttagaaagtttttggtctagtaaatgatttatcaaatcgataaaagcattttcttataatgtggccaagcttatggcacaattggcattgtgccttcagtccccatgctgaaaattgtcctttgccaaagggtggttcccctctgttggtactggtctatccacgaccttgaagtgttaatccacgaggttgtccttgcaattgttggtccaaagccaagtggaggatgagaggcagcatagtgacctgatggtccataaggggaatgtccctggccataactgggggagagaaattattatattgggatttatatggggaagaaaaagtacctctgcctcctgtaacaggcttgatgtgagccaagttagcctcaactttagcaatatccagctctgaggtgtctttttctagccgcacttcttgagccatgagtaatgtctcgatctcagccacagtgtacgcatcaagtcttgtgttaacaaaggtaacaaagacatcgtattcacttgataaaccattaaagatattctcgatgtggtcttgagcaaatagaggatgacctatagaagctaaggtattgacaaggctcttgatcttgagtaggaaatcactcaaagatccttacatgcgcagattttgaagctataagttctgtatttacctacatttgcacgattcagtgaaatgtagtattcattgagatgaagccaaatttgtgcagcagtatcagatcccaccattcgagttaagattttctcagacatggaagacaacagccaagaaactaggatactgtcttgttgatcccagtcttcaaattctggactgactcaattgagccttcgatcttcattggtgagaaatttaggtggagctagatctggatcaagatgcttctagagtcgactgcctttgattgctgcatagacttggtaatgccatggcaggtagttgtgctcatcttttcgaacagaaagggaatgagagaatgtaaatggagtctagagatgttttaggaagagtgttgttggctgtgtgagaaaaacctccttgagcagccatgaacgattttgcaggaactaagaggaataaagagagaagagaaagagcttggctctgataccattgtgaacaaaggaaataaatgaatctcttgtactcatagagaaaaggatttcagagtttatatacacaagttttaacaactaacaaccaacaatcaagctaactaacacacagttacaacaagaaaatttagttaaatacttaactaacttaactgacaaaactaactcttagcaaaaaatactttactgaatacaaatttggtatgaattatatatctttcctttataaatttttaatatgcagatatttaaaatattttgactaaattcaagtttgaaaaaatatttttaattatttgacataatatacatagtccaaacatatttttgaagaaaattctttttctttttgtttaaaaaaaacaaaaataagtgaaacgagtgacaatctaatcaggtaagccccaccaccaagttttagcatggtcaatgatcgaagagagcaaattttacaagagaatgagctagctaatttaaccaatatagaacaataaacaaaagaaacaaaataaaatctttctttagcaagttgatatcctctaacaagccattaagaattgagaataaaaactaagctaaaatataagaacacaaaatgaaatattagatcctagtttcaatttataaaaataataatttttaaagtaaaaaaaaattgcacacattgaaaaatattgactattgaagtaaaaaataaataaattcattttgttaacatttaagaaaagggtacttaaaaaaaagttgaaacaataaagcaaaaaatatgggacataataagtttttttttcccactattattaaagatatttaaaatcaaaaaaaaacaaacaaacaaacaagaaaatagaaacaaaattacaaaagagcattattatcacaagtcattatttgagacattttggagatacaatggaccccaaaagttctggttcaaaccaaagggcatgttccccaagaatagccatgtattctatcttcaatgtcaaggagccttcattttatataaatatatatanaaatatatatatatataatttagggcttaacattgagcgggttgactaaatttcacgtgaaaaaaagtaaactcgtacatgtccgttcatatgggttggcgggtctgagttgggtggtctttctccaaacataatgtattatcaaacccggtacaaatgctccgtcctagtattctgtgttatgtattagggaaggagagggagaaatcgagtgggtgggagtcgacggtgaattgcttgcggctaagaggaattttttaggttaaacttttttaagattacttgtaatgtattgtgttatgtactaaaaataaataaataaataaaataaaataaatatataatacgtaaatattatataattattttatattaaagtaatttacggtataaatatttaagtttaacttctagttacaaataaatacttatgtttaatttttagcgataataatacctaagttatatttttggaactctgtaagtatctaagcgttaaatattaagctattaaatctacgtgttatttttttattggtatatttgaactaattttttaaaataataaaaatttaataatttggaccaattagggattaccacgtgacaatttacttaatcagatacctacagaaattttaaaattataacttagatattattactgtcaaatattaaacttatgtattaattatttacaactgaaaattaaacttaagtatttatatcacaaattattataagttattagtaaaatacatgtgttattctttagagagaaaaaaaaatataacatattgtgtttgtagcatttcttgatcatcatattattatttatattatatattgttggaactttgtatgaaatatgtaaaaatagaaaagtgaagtgtgtgagtaggagtcccacatggga

SEQ ID NO: 18097 - DNA, 9656 bp, Cannabis sativa
tataatgaattgattgaataattgaaaaaataagtcttagactgttcaagtaggcatgtcaaaaagatccatttagttggagtaaaagtttcgatccaaaacatttagatacttattggatcttggatcagtttcgctccatttcgcttatatttttttttgaatcatatttgatcccattcggttcaatatatataaaaaaatttaaatcaagactcggacccaatttggactcgaatcccttgtgacctgggactcaaacccggaccgaacctgcctgggagccaaacctggacctaggatcggacctggacccgaactcgagacttaggctcgggacttgggcttggacccaaaccttggcccaaacttgagactggactcgaacccggactcgaactcggttcccagtatggggccctgactcgggacccagatccagattctgggaaccgggcccgaacttggatcccaattcagggccctgacccaagactcaaattcgaacttgcttggattttagggcccagaccctaacccaggatctagacccaaacccgaggtcggatccggacccagactaggatctaaacccaaaaccggacccaaacttgggaccagacccggacccgaattccaggacccacacctggattccaggactcgaacctaggatcggacccggacccaggatttgaaaccaaacctagacctaaacccgagattcgagactcagacccgaactcgggacccaaacccaaacctggggctcggactcaaacccagactcggacccgaactcgagacccaggactcggacacggtcctgattccggacccggacgggactcgggaccaagacccaaacctgagacccgaacccaagcccgggacccgggacccagagactcgagacccaaacttgggaccaaacgcagtgccgatactgaaccccgaacctggacccgacctggattctggtgcccgaacctgaacccgagacccaaaccgaggacccaaacccaaactcgagaccacaaccagactcgaacctaagaccgggccgatgatccagttccggttctggacacagacccaaacacggttgctgagatcgaaacctgaacccgaactcgagacccaaatccgagcccaggacccaaacccgaacatggggccggacttggacccgaggcctcgactcggagcctagacccaaacccgagacccgaacccaaacccgaactcgaacctggacccagactcagacccagatccggaccgaacccgctcccgagaccagacttggactcggaccagtagttggtgttggggtcgagtttattgaaaatatattatatttgcacattctattaatactagttaataccaaacatagtactgttttaaataatactaatacaaaattagaatggatataaaattataagttgagatataaaattaaaattctaaaaaaaaaccgggtcggatcggatcagatctgatccgaataagtcaagtcagatctaatccaatcccagcatatgatctagcagggcaggacagatccttacatgatccggatcaggttggatcataatcggatcatatctgacctgacccatttacactcctatgtccaagagagtgaaaaccctcaattaatatataactatttaatgttagagcattgttattatgcaccagtggtgcccgacacttttatagcgccccacaattgattagcgatatttttcaaaaattagttttaaacttattttcttaagttatataagatccgatacttaattacactaataacggtatgacaccgaagaaggtactaggtatctgtagtgccttttagttctcttaacattaatactagtccctactattttataatggtgttaggtgtcactagtgtctaataagaatgttcttttcataagaaatactaaaaggacttagtaatatctagtataacttgagttgttatattgcttggtaaaattaagtagtaatgtttcacataatttaattttagcagctatttatatgtattttcgaatatatgacatgtgacctcttagctacatggtgttggacgcattaaattgccaaataacaattaagttaagaaaaaaagaatatttaaatagagaaatttatatatatttgtgggctaagatatgacacgccaagacaaaaacttggaaagaggactgaccagaaaacacaccattatccattaccattattcattatccaatttccttcttcttcttcttcttcttcatccaactccaaatgctttcccaccttctcttcttcttcttcttcctctcatcacaaccaaaatgcccatcttattcacttccactcccactcacatttcctttctctcccacctctgcaaatgcaatcccactaccactgatgccaccctctcactctcttcttcatcattttcttctctcttaaacccactgaggaggaagataaggctgcccatttgcttctcctcctcctccaccagcagcagcagtgaggtctttgaacgccgccctgatagagaagctgcagctgcagcagcagctgccagagcacttgaagaaacctctgcagcctcctcagaggcacttagacaagctcgggtgagttttgttttgggtttagatgaaaaatgcataaagagaataaaatagaagaatgataaagtttcagtcttgaaagaatttgtagacttattgacaaataaaaattggttcttgattagtttgagctcaaagaatagtgaggaatttatatgcatttcttgggttttttgttttttggatgaaaatgcataggaaagtataaatgggcaatggaaatttgatgtttttggagattgaagagttagaatatgaatagaagaattatgaaggtttagtcttgtaagggtttgtagacttattgacagaaaaaaattggttctttgagtagtttgagctggtgtataatgcttgtgaaagagtttcaatattaatgtaagtgggcaatggaatttagctgtttttggagatttaagagtgagaaaatgagtagaagagttataaagtttcagtgttgtaagagtttgtggaattattggaaagaaaaattgtgtttctttaattagtttgagctgtttttggaggtggaagagtaaaaaagaaaataattagaagaattataaagtttcagtcttgtaagagtttgtggactttaatgaaaataaaagttgtttctttagttagtttcagctgtttttggaggtggaagacatatatatatatatatatatatacataagaattataaagtttcagttttgtgagagtttgtggacttggtgagataaatttttttatctttaattagtttgagctagtgtataatgattgtgaaagagtttcagtcttctctatactaggaattttcatattgttctttaatttatgtctttataataatttaaaataactacattgttatattatatttagtagaacttgtttgttagctatagccctatttgttctttagcttccattgtcattcccacccaaaagaaaaaaaaaatggaaaattttgaaactttgggtgaaaaaagcttcaagttttggttcatgcattgatgtcaattctcttccatagttagtaaacttagtttagttgagctaatactcgatttctcttaagaagtagaggtctgctgattggaaagcagcaaagagttacaatgatgatcggcgaatctatgaaggcaggatcgaaggttttaacaatggaggattgctgataaaatttcgtagtttagtcgggtttctcccatatcctcaattgagcccttcacatttttttaaaggtactacttttacttttgctcattctcttctcttttagtgtgttagttacatattgtcttctttcaacttatactttcattccttcataagatttccacaatgaattcgataaagaaaagctcggtgtgttaagcttgttacttcttttactctaatgtctaaaatataaaagcaaaaggatatcccaaatggtacatttatgtcatctgtttttcgggttttcctttcccttatttgtctccgaatatgtgatttgtaaacttttgtttggtaatgtaaaatttgtttcaacctcttttattctatcacttgtagaagaaccacgccgaactccccaagatgtggctagaagtttaatcggttcacttatagcggtgaaggtattgaatttatttccctagaatttgactcaaatcataaaatattaatagtagaagagatgtatagtgaaattttgcaaaaaaccgagatgtgaatcttttcggttttgatattttcaggtgattcaagctgatgaagagaacagaaaattgatattttccgaaaaggaagctgtttggtctaagttttctgatcaagttgacataggagatatttatgaaggaaaggtgggttctgtggaggattatggtgcatttgttcacttgcgatttcccgatggtagtattctgttttccttattcacgaaattcataatcgatcaacatattctgtgctcggggctgatttaaacatttctgtttaacaatgctggaaacaacaggtctttatcatctcactggactagtgcatgtttccgaggtttcgtgggatttagtacaagatgtaagggatattctttccgagggcgatgatgtaagggtcaaagtccttagtattgataggtaagcttttgctgttctgtgatttaaatgcacaatattaaagtttcgaattgactggtgatatatactcgattagggcaattctcccttaacaagacggttttgttaggttgagttagacccaataactttcctaatacacaacttacacatatcttgtctcgaaacatactttaatcttagctcgtaagtacatttaaccaatggatttttctcgagtaagaaagtctttcgacttgccctagtttcccgtaaaagttgcattatcttgctacgttcgccttcaattcccacccattttttcttcctttctgaaaatgtagctctatgttttgatccttggtaataacatcatcatctcgagtttcattctttgatatgttatcttacgaagttcgctatgtagctagaaactagaattaatcgagttcttctgtgtagacaaaagccgaggatgacactgtcaatcaaacagttagaagaagatccacttcttgaaacattggataaagtaataccgcaggtttgttatctgataatctcggtgtataggatgagtgttcgcctttcggtcttcctatattgatatttaatggttgtaacatgacacaggatggagcagatggttctgattctttaaatacgagcagtattagtaatatcgaaccacttcaaggactcgaaacaattttcgaagagctactaaaggaagacgggtatggttaagaaaaatctatatgcattgatcttatgctttttggtactttcattaagaaaagtctaacgcgattttgacaaacttattcagcgtatatgacgtgagaattactcgccaaggattcgagaaacgggtggtttcacaagacctacagctttggctttccaatgtgtgtagtacctcttttttccctaaagaaaaaaaactgtctttttttctctttttcccgaaacctcatttgtttttcgctactattgcaggcacctgctaccgacgaaaagtctactcttcttgctcgtgccggaagacaggtgagttaacaatattgcaagttgaaatgttaagagtcaaacaatactctcccgaacaaaatttgggagaggatcagtctaagacaagtgacctcggtctcttttttaacaagcatattttgtgtaatattttcggggttttaggttcaagaaatacaactgacaacatcactcgatcaagaaggtatcaaaaaggcgttgcagcgagttttggaacgaataccgtgattaaaaacacgaataaaaaatcttctatctccaaattacacgatttctccttgtcccgcgatattcaatactcgaaatttcggagaggagaagtgtaatttggaggcagaagatgatttcttttcgattcgagatatagttatatatgtaattctctttccttcctattattgttgttgtgattctctgtttgtacagaaatttatttgtaacattaaccattttgtcctaatgagagctctacttgaggttgatttgtataagaacaattataatgaaggaagctcattttatttttatctccaattttttgtcacatcacattttaatttaaagtcattaagagttaaatgttaattaatttcaaatttattgggtggacaaaaaatttattacatacaaaagaatgaaatcaaattataattcaggacttttaaatactatttcatcaatagtatgtattatgcaaattatatatacatattttaaattaatagcaaattttatttcattatatttgatataatatgattgctttcactaaattatttgtgattaattatataatagaaaacaatgaaaatgtcaaacaaatagtgactctcacttgcaacaatttaaaactccattattttaacataatatattaaaatctagatagttttaatttaggagaattatctcatatactattttttatttttttttaaaaaaatttaaagtttgggttgttccggtaatttcactattagtttttatgtgggttgctatacagattttgattgcgatttagattgctctgttagttgttatagaaatttctgtgtaaaatttcgtaaaaatgtaaaaaaaaaaaactattttgaaaagtaaaaataaaaaaactctttaattaatttattattttttataaaataatatacaactgttttaaaaaatttagaataatttataatataaaaaaaaagatttaaacattttatttcactcgtataaattaaaaagacacacatgcaataaattatttgaactttatttttcaaaatattatttaattttttacaaaatatctcaaataattacatcacataaattgtcatataaaacaaattaagaattaaactatatggatatggaaaacacaaagatacaatcaataattaatacccctcttgatatatttatatatcttatcttcagcctcacaaaattgacccctcttttgttttcttgccaaaatttcaataataagatctaaataacaaaacaaactctatctcataaaaaaaaaatggtgatcacaagcatagatgaacatccaaactatgatagattaagtgagctacaatgttttgatgacacaaaatctggggttaaagggctaatagattcaggaatatcaaaactccctcttatcttttatgatccaacaaatgatttgagtaacaaaaactcaatttgtgaagaatcccatttgagtaataataataataataataatattccaattatagaccttggaggagttactactcaaaggaaggagattgttgatagagttaaagaggcatctgagacttggggttttttccaaattgtcaaccatggaatttcgaagagtgttctcgaggcgatgaagaacggggctcgacggttttatgagcaagatgatgagaagaagaaagagttttacactagagatgttactaagaagtttgtgtataatagtaacattgatttgtttcattcttcagctgctcattggagagactctttttttagttatatggctcctaaccctccaaatccacaagatttgcctgaggcatgcaggtatgtgtgtgtatatgtatgagttaatattattttaaactgtaaaaattactgataattagattatttattttgttaaatgataaaattgatcctatatttttaaaaatagataaatagaacattcgatgattttttttagtctaattaacttgaatacaattccaatcacaaacagatacaataaatgtaatcagtttgtcatatctctaaatcaggttattattaagttttattatgacgaaaaattagttaaggatactatttagtactattttaaaaaatataaagtctagctaatttgttatttatcaaaatagagaattaaattagtaaattttacaaaatacatgtctaatatagtatttactccatatataaatcaaatgaacatcatgtaatgtaaacttgtactaggcttaggattttatatgatttcactaggataaaatctttcttgatttggatttcgttttgtgtacttaaatgaataataaccgtttgatcaatctaattattgattagagtgtgggataaacgtaatttattctttaatggaattgatgttatcactaaaaagttcatggttaaaatattggagaatttttaaaaatacctaatattaaaaataaggtatattacaatgatacaaattttatttacaagcatacagaatttgtttacaaaaaatatggattacaagtttgtgaacactttttacatatttgtaaatatctcttacgaaaagttagatattgtatatttgtaataattaattaattatttttgcagtaaaatgttatttttatcttcttctaaattatggtacgtaaattttttaaaaatattaatcacaaaaattataatctattaatttttagtcatagcaaatactgttactatagctaaaacgaaatttgttaaaaggtgaatctaaatgttactttatagttataaataacatttttgttgtaactataaaattattactaaacagttatatactttacattttgtagtgtatattaattaatatttatctagtgatggctataatgaatggatgagaaataatgatttattattacgattaattgattacaatattgcaatttttttaggaatgagatgataatgtacacaaaggaagtaatgaaactaggctcttgtttgtttgaattgctgtctgaggctcttggtttagattcaaactaccttaagaagatggaatgtgatgagggattagtgtttataagccattactatccgccatgtcccgagccagaactaaccatgggaatagccaaacattccgataatgacttcctcactgttcttctccaagaccacatcggcggccttcaagtcttgcatgagaatacttggttcgatgttccaccactggatggggctttagttgttaatattggagatcttttacaagtgagtatgtttttatttcgattgaaaacttcgaatttgttagacactattcgtcttgcagctaaatgtatagaataagtgttttgtgcacttcttcgtactagaaattgtcagtaagttagttatatttcagttatactaattttagtaattttgaaaatacattggttagacttaaggtaatattatgtgtcgatatttaaaaaatgtaaagtgaatttttagtaattctcgtaaaatacagagttcaaaatagtattttaatttagctaaacatgatctttgtattgttgacatggtttcgtttggattatgcaaatgcagcttataacaaatgacaagt

SEQ ID NO: 18098 - DNA, 9335 bp, Cannabis sativa
  modified_base (6790)..(6809): a, c, t, g, unknown or other
tcttttttttttttttgagaatttagagtttcccttttaccaactttcgtaaggagaagagagagagagaatacctcaacaaatgaactgcctccaggattcctcatatcacaagcccaaaaatacatatgattttctggaagactgtcatcagtaattctaagatttccaagggatgccttaatactaaacgaggacggaaacacctttaggaaaaaaaataaaaaaaatctgtaagaatcatcagaccaaacataaaccaacgaaaatgtaaataaaaagactggaattgtaggagagaatataaatgaacctttatatctgtaagcaaattatcttgggaaagacttgaaagcttggtttcatcttcattcagcaacaagatttgagcacgcttcatattcagggtaatattaaacacaactctagacttcccctttcctagcaaacctttaacaacagcatcctgagtagttgttgacagttgttcatcaatcatgtcatttttagggatgtcatgttttgcaactgttccaggggaattttcgatgaatgattcacagctttcatccttgacgttaatggcattaacaaattccataatggcaagaattgtgggtctacgacagaaaaatgataaggttgctagggtgatgatgacctgaaatgacattttatgaaataagtatatgagaaccatgtattaaactaaaaccagaacccactatttgcactaagaaacatacgcacctgtgtatctatattatcatatgtaggagaattttggtcgcagatcactatctgagctttcacaaaactatccattacatcagtttgggtaacatcatcagttggcacatctttagggagtagaccagaaatgtgggtaaaactaggaagcttatcagacaaactatcggatttgagaaacttttggctactaaaattccctgagaaatttcgtggtgactgcatagggtagtcaaaagactcaaccaaattctcttgtgcttcatagaacttatcatcaccttcactcgactctaagtcattgctttcagagatctgattcctttcatcatcaaatgttgaatatgcatctgtactcccaataaatgatctggcaacatagcgtggtcgagaaccattgctaagagaaactaaatcttcgatttccaaagatttcaagacagtaccaataagcatatcatgttctcttatggatacttcaacctattatccaaaaatacaaaacagtgagtaggaacaccaaaacagcagaaaaatgaaacaaaattaaacagttatttcacctgaccaccaatagctcgaaattcaaataagcgagtctcttctgttaggagcactttgaagaaactgtggtcatgctagaaaagagaagttcatctgtcagatttgtccattgcaaggcaacttatatcattatgaagctttcatataattacctgatcgctgtaactaaagcggaccttcaattcatcaagaacaccagtaataaatattttttccatctctaatagaccaatggctttatttttgtcatcaacctcgatttcagaatcatcagcatctgatgaagtttcagatagagtagttacaggagcagaagcctgcataaaaaacatagcaagttttcccctattcaatttcataataatacaacaaagttggatgctgaaaaaaaaaataataatacaataaagttaaagacaaaattagtgttttgagacacaatttttttaatcaaaacatcagtgcttgtgtatatgtattccaaatattttaaaaagcattccaactaatgtaaccattcatgagtacatattgatgtaatcattgagtactacccaaatattatatgccagtttatcatagattagcatttctgatttaagtgtagactaggtgcagtctgcagaagagataatgagtgaattcttattctgcattgcccagtttcattgcagatgtatataggcttttggaggagtatgaactactttggtgcattcaagcagtataagggatttttgttatttaagattaaggcaggagaaacaaaagcttcagcaaactgcagtagctgctgtttcatgggtcttatggatggaaagaaacaataaaaattttgaagaggaagagaatgaggtggagatattgttggataatatcaagaaaaaagttgctttatggctgcacaatgattagaattttatagatgttccttactaggcttagtttcgagattggagttttttcttgaaaagattgcttttaatttttttgtttttatacactaggctcctagtctaaccctacaatatttggggattgagaaactataacaatatctatataggtacccatgagggacttgaaccgcagaacttgtgggaccaaactacatgtctggccatttgagttaccactcttggatttgattttgctttttactttgcgcgactggttttccatctttacttgtatgtatgaaatacaaatagttttgttttcagaaaaaataaataataataacaataatgcaagccagtacaagacatttagcttgtctaatactcaaaagtccttcgaaaatatataaagaataaaaacactagcagaaatattcaacaactacttgcctcctatttgacttccttattatttaccataattttagacttagaaaagaaatcttttagtatttcttaaagttgtatcgttaggcatactcgttttaatattcctctatatatttgtgtcatttcactataatcttaaggaaaaagattagacatcttctacaggtgtataatacaaatttaaaagaacaaataactaattaatagatcttcaaaaaagggttaccgatgcacgatatattgctccttgcaaacggctctgccaagtcttccttgaatcatcagattcacattgcaatatgagtgcatttgcatcctccacaacctattcggcagtcataaagtcgtattaaacaatcaatgttgaaatataatgtaactaaacaatttcttaaatgataaacatgcagcaagacccttgtctgaacgtgaactatcagaaacagccagtacatgatctgcatcatccacaacttctggcggaactcgagatatctgtttcccacgtaagctacaaaggaagaaattcacatccatgaaaatcaatattttagaagggcaggaaataaaatgccaaataaaaatctcatcttgcacaattatctatcttcttttcagatgatattacgaatttatttattctataaaaacattactagtgtgttattataatatcgtaagtaccattactaggaaagaagtttctattgaactactaaaggatatcacattctcttgagtcattggtatttaatattttatatgaaaatttgtatcttttctaatcccacaactccaaacaatcttctacaatatctccaatttttattttatttttttgggtcagacagtatctctgaatacttgttaggcctttctcacatcttcccaacaaacaacccatactgtgatattctaaagtgccttgatttttaaagacaatttaaggaagagaaaaaaaaacaataggaaaaaatcccctaggtaataaaaccaaaagtagaaagaagtgactaataagtcaatgttcaaaacatagcatttaaacctgatatattgtttgtatgatttggagccaggactctcaaggacatagaggaaaggcccaactaagcagaagtatcggcgctgccacacagcttctcgatttcccacaccctattatatgaacatttttgaaatcatgaaatgtagtaattctggtcagtagagatgcacaggtactaaaaaaaactaccatgtcacaaaggagaagatgagaaagaaaaagggacggaccttccgagtaagaagagataaccacccctcaaagtcagcctgattccaaggttgaaagaaatctgatttttcagtatcctctcccttaaagagctttgctatctgcatcagtcgatgatatcttgctggagaaaagtgaaaccctaatgacggtagtcgtatggcaagtcgcgttgaagggtaggaggcattctccattcgaatctgaataaatttccataataatatagaacttaatcattgacaaaaataactagtatatgtatagagaagaatgcatgacatcaaaagtacaagcaaatacctgttgaagctttagcattgccccacagttatcaataacgggcagaagactaacataatttgagtgagcaggagtagaatgcttctttgtgggaacttctccccaatgatagtcaccatcaaccagaaaggcagacacatccttcaaaaccaagttaaactgcaaatacatgtctaactccttggatgatccaagttcatcctgcaaaccgcacaacctatattcatttgatattaaaaaatttataatgccgttaaatgattaagaaacggttctgctataacctctgtacgaatcaccaaatttcccaagtcaagcataagttttgttgaatgtcggttgtcaggacaaaattctgttggaattgttattttgggtgcagctatatcaatgtccaacaaaaacctagcataagggtataaatgacaaaattttatcatggtgattaaatagaaaagcaaacctacatcaatattacaatatacattccctttagttacaaggatcaaaaacaaacatgaactctaaattggtcaataaatcagaaacatgaagtaagttgagcgttcattagtccagttatgtataaagtctgaaggctttaatcatattctttatttaatttaaataagatttaaataagagaacttttttaaatgaaaaatcagaagttcatgaaagaaagagtataatgtatcccaatagaaactgaagcataaaaacacaactaaaagcttaaaaacagagcaaaacaaaacattactaaacaaagtgtgtttcatccagccaagagtaagtaaagaaagcagagcatccttaactttcttcaccactgaatcccataaaagaaaaaatcccactcttttcaataaaagaatatgtttgtttcattcaaaccaattcagaaaaaaaaatgttttatatgttataacaaagaagaaaatgttctgaaatgtattaagatgtcttttttaaacaatatgaaataacttctaattgcagacccttaaaactttttaaggaaatgaccatccctactagatattcaattctacatttaaacacataccaatttaatccagcaatcatttatgagtaggaatactctaacaatacaaccaataaattgactatatcctagccaatatctgtaattaatacagtgtaaacacctggattgatttttcaatgccttgttcacttgttcctgagcagtgcgcctgacttcatctattgtcatctggaaaataaagaacaaaagaatacagtcaccatcactgttaactgaaaatttgaaattaattactgttaaccatacctgccgaatcatacaagaggcacctcaaaataatatgacactaatgcaaatatgccaaaaatcgttaaattttatcttccaccaaagcccggaaaaaaaaaactaaatacattttctttcataaataactaaaactacaaatcatcccccccccccccccaaaatcatattccatttgcactcggataaaaatacttccaaggtttatatccatggtctcattacatttgcattaacattatttacattgaatggtccttttatattcccaattatttctagaatttcaaacagcaattcacaatcaaatcatctcattaaattgaaggttgagaatcttaactcgtaaactctcagctagcaccttaaataactacataattatgtcagagaaatgacaaagtttaaggaaaacaaacctgaacagcagcagcagcttccagagctaaggtttggctgacatcagtactgctttgaaaaaaattgataatttggtcgatagtatccttgatatactgttaaagaatgtcatcaatgagcatgcacaaattgaacaaagaagaaacaatagagcatgaattagaagcatacagtcacataacaaggggacgctttagcaaccatgctccaatcaactttcatatcgaaaggcttatagcaaaaagccccgagtaacgaatcataattagttgcactctgcatgtgtatggagcaaaggttcaagttctactgccaaagttaggcaaccaaatgtaagaaagatactgcagaataagaatgtaacaattttacctcagcaagtaaaccatttggtgatgatagcctatatgaacccaatttcacatcaaattttttggtctctggataaagttctatgaagcaatgaagaccttcacatgataattcagcaagatactcgttgggcccatcaataagtttggtggcactatgtttcgtgtaaatgtttaaggaagtctgaagagcatctgccttgccacttaataaaactaacttattatcatcaccttccttatacccaatgattttgtttaactgttcccagtcttcctcactgaaatgaattggctcggtttcatcttcagatgcctcattactcctggagaatgcacagtaaggtaggcatactaaattcagaccaagtctcaaagagttagaaaaatcatatgaactgcagtacttgcattaaaaagtatatatatatatatnnnnnnnnnnnnnnnnnnnnagagagagagagagagagctaataccatccaaatgaccaccatgatgacttggacttttgttttctcatgtgggctgattctgtcgatttctccacaaacttatgagccagcatcctgcaaaaagcacatttttaaaaagagacaggtcacacatcatacactgaccttctcccaactttattagggagcctcacttatggcggaggaaaactgtggtaacaaatattgaaacattaagacatacatctagaaaagtaataaaaacattgtaacacaacatatgtctaacaacatttcaatggaattttgatacaatctgtttgccatataacagaaagatatacatattaattaaacaagttaatataacaaaagattaatagtaattattaatttaaatactatgtaagtaaacttatttaaattagaaacctaaaaaaaatagtttgattggtttaagatttggatacaattttatgtttttgaatacttaaaaggtggaggatccacataagaatttttgattagttgagcgttttcaaaaacaaaatctagaatattattttgagttttaagcttaaaaaatgaaaacaccatttttctattttgggatccaaaaactatccaaatattctcttacttttttattttaagattcccaaccaatcacaaattcaattttttatttctcaaaaacattaaatcacactacaacaaatcacatttttagaaataatttttcacatacgaaattcaaatttttgtttctcaaacacttttttaaaaaacacaatttttgaaaaagagatagaaggtcacctcctctcatacttattgagattgagaaacctcacttatggcagaggaaaaccgtagtaacaaaggtctattcaaattttccaactctcggacacaaatctaagaagcataggtcttcaaaatacctcctagatttcttcagtttgccaccctaaagctataacagtaggagaaacatacaaatactttaaaatttgactaaaagcattttccttcaaatacatcttgaaggggctcccaaggaccatgtaaaagaatcccaaaaaaattgaaaagtcaaagatgtcgaatttatccaccatatacatataaataaatcttgattactctttatcacaaacgaataagacaactcatctcatcccactatatagcaaattttcatgagcaagcacattcatagagtgaacgaaaaatattcacaacatcaaagaacaggcaaaatacacaaaatgggtaaaaagcaggtagtaatagaacatatgaactacctggtcacaactcacaaattaacatgagtaatttcataagtcaaaagaaatacctccattgcaatatgacctcaatatctagttcacgatctagatcctcaaggtctttattgtcatcaacagttactcgactgggctcagatttaagaagggaggcataaagagagatgtatcttttccgcaatcttgtatacttcaaaacttgttcccatggcaattttccactgcaatgaagataaattgccaaggaaaatatgaaattaaaaattactcgataaacctctccacaaataagagctacaatatgttatcatttattattaaatctatttcaaatcaatatttacaaagtctgagtagttttttaaaaaaaaaaaaattgtcaaattttactcaagttcatataatgattaccctcagaaaaattatattaaaaaactttattttgtaaggaaattattatcatgcaatgaagcaactcttgaatgggagaattaaatccgatcaaaatatacaaaatgagataccttcccttcttcacttggtcagatacagctctataagcatacttccaccaagaacgaggatcagatttgacggaaacatgtggacgaaaatgtgcatattttaagcgttgattaaaagcagaaaagttatcagctagttttaacatatccttgtatccatcctgcaaccacaagataccaaattttttcaaggccaatcaaaacatgcctcctagtatccaatcacaatgtattataaaattaatttattcttttttaggaaattaaggaaataaacctttgataaacagagaatgacatcatccaaattcactgttgcattctgcaaaggttgatcgctcttagcttgttcattttcccttagctttgtatactttgcatttcctgaaattggttccagaatataagtgtgcttcttgacaattctatcagcaggtttgccttctttagtgccatatctaaaaacctgaagcaaataaagaatatgatcagagtttcgtagattgaatatgtcctcaacatatgtgactgcgagtataaactaaatattggttctacctggacccactcagaaggaagcaaatcctcccatggcttgtcaatatgccacgggacaatatcagaatccagataaagtgcaagtcggtcaagctcaacagactgtaaaaataataaaacaaattaattt

SEQ ID NO: 18099 - DNA, 9398 bp, Cannabis sativa
cataaaatactggaaggtagagctagggtctgagctatttttgtcaaagttttatgtcttacttccttcaaatacctgcattttctattaatatttacttttcaaggctatgatgtataaatcatacaaccaaaattattgttaatttatatttaagttaggaacgttggacaataacaaagtcatacaagaaaaaaaattggataaggatttttgtaaagaattgtctcactcccattcaatgtactcagttcattaatgtgggatgaagttgatgcttgtaaattatgtgttatatcgaaatcaaaacaccggttgaagttgagaattatcttaacaaatgctagcatctcagtgaaggcacctgcacacgaagagtattgaatttgctaattatacattcattcttttaatataaattgagttaattataaaaacagcattttactgtttttgcatttattttcaacaggttcaggagaagaaggttaagaaagtatgtgaaatgaatttggatccttcgaaggctatgggaaatggtcctgttggtggcagtgttttaacaggctccaaaagttctcttcccaatggaggatctaaagagagaaccaccagttatccaagcaatgatacttttccatctgggggtttcccatccctgaaattacccacggtagttgtattcaaaccaacttatatatttattgaagcataagattttggtatttagaaagtatcagtcataactgaagctactagttgttcctttgctagttctatgtagatttttttttccatgttctgatgcatgttgctatgtattgttttgcttttaacattttgttgcatttgtggcattcaggtgactcacgagacaagtctaatggctagatgtcgaagagtctatgcccatgctcatgactatcatatcaattcaatttcaaataacaggtgcaccttttattttatgaattcaagcctccattttaatttgaccttatatgtttctttccctctttgattattacatatatgcctatttgagttccttttcaatagtgtagctttaatgtggattctttgtattcatgggatacaatttggtcttcttttgctgcttacttatttatgacatttgccttatttaatatgtatttttcctgtcttttttgtagtgacggtgaaacttttatctcagctgatgacctccgaattaacctttggaacttagaaattagcagtcaaagttttaatatcgttgacgtgaagcctgcaaacatggaagatctaactggtaggaactaggaacacgacactttgaattataaatgcatgctctgtctactttttctttttctaactgttgctttatgagttttgtacaatgagctcttatagcatagaagaaagcaatgctctttctggttctttatcattgtttgaatctgattctttcggtgcattagatgcttggaacattctatttttgtagtactctttattttgtgccatatttgcaattttcattcagtgctacttttccatcttcgcaaacatacgtgtttctgactttatatgtgcagaggtgatcacgtcagcagaatttcaccctactcattgccatatgttagcatatagtagctctaaaggctcagtccgcctcattgatatgaggcagtcggctttatgtgacactcacagtaaactgtaagctcagtttgtcaccctgcttctcgtttttctttttctcgtcacttcttgatttatgaaattatcacccactgatgatacagattcgaggaacaggaaacccctggttctaggtcttttttcactgagattatagcttccatctcggatattaagtttgccaaggatggaaggcatattctcagtcgtgactacatgaccttaaaggtaatgatttttgtttatttccttagaaatacacagtacaattatatcaatacataaaagaaattttggaggatcataatgctcactcacattttttttgttacccagctttgggacataaatatggattctggtccagttgcaactttccaggttcatgaatacttaaggcccagggtaatgtattccttccgaaagtcttgatgttagattatttatgatgagacaaacattacttatcttagttatttgtcttggccagttgtgtgacttatacgaaaatgattccatcttcgataaatttgagtgttgtctaagtggagatggacgccgagtggcaacaggttcctacaggtctgctttacatacatagatgtattatgatactgtgtaaatgtatatttgtcaggcaacatgttctgaatcgtttcattatgttattccagcaatcttttccgtgtgtttggttgttctgaaggtagcacagaagctacaacattggaagccagcaaaaacccgacgaggtattttctgaatatgtatataatgacaatttcatgattagtgtcagaagaactatttaccatttagtgtttacatatgacattatgttttcatggttctcaggagacaagtccaaaatccaacaaggcctgcaagatcactgggcagccttccccgagttctgcggcgaggtatgtcttgcccactttttagctaacttttaattttcatcccattttgtctcttaactgacttgtttatccacaaaggtgcggatacctctggaactgatgcaaacggaaatggtttcgatttcacaacaaagttgctccatcttgcttggcatccaaccgaaaactcacttgcctgtgctgcttcaaatagcctttacatgtattacgcatagatatggtctctggaaagctgtacttttttgctcgaagagagctttttggacaaggcctggctggttacttacttaccgtcttccttcccttattaacgacgtggaagctgccaaattacccgaaccccactattcactaagactaacttccctaggtcaggataccattttctcatatgtaaaatttttgaggaagaaaccgaaaagcctatttctcccaagtcctccgacccaacaaaatcagccgtttcaagattgcagaactcttaccgcttattgttactaaagtcgaaaatcagacagaggagggagggactgactggcagaagtagttgctctctggtgcttcaattctcactgatacttcttaggccttcatcaactttgtattatttggatttagtataagggtttcgaaatttttatcatgattattgtttttcatttgttatttccatcatccttcgatgcgatcggtctaagttctaaccattctttccactctttcagaatttgctgatttgttatgatctttgccatcttctcaatcctttgggattgaagtagaaagtggggttctcatacaaatcattctttcaacagtcaattctcttggaaaccaagaattgtggggttttctttttatattttcttctttttattattaattaattagttttgttttttggggggtttagttaagtgtttagttactctatttgttagcagcttgcccatctccacaaggtgaagaaacatcatatgttgaagcctaatgtactttttgttgaataaaatgatatgattattactatcattttcttgctacattttgcatatttttcattgcattttcatatactaataataactttaaggttggtagaagtaaaagaaagtgatacatggttttttgtttttgctaaggaaaacttcataaaaccattactaaaaaccagtttagtgtttcgacatgaaaaaacatgtccaaggtaggaaacagagataaataaggttggagagttaacagacagagataaccaaatcaaagggagagttaaaagccaacatatcacttcaaataccccaacgactgtccaaccaacattgcctggccacagaacacttaaaaaatagatggtatagactatagagaatcatcttccattccaccggtaaatagaaatgaatgggatagaacacaattttgacaagagaattggatgggatttgacaaggaatagaatgagaagacaaatggatggaatgtaacacaattttcctttatagtttggaattatgcttaattaaatgtaaagcttatttgtgcattaatattttaaaccaatttggtctaactttctatgaccctacactattaccaaagcttaggaactaatttttaaaaaaatggtttagatgagggtgaaggcaagagggagaacaagatgaattgagatgagagttagatttaggataagacgagctaggtctgaatataggatacatctaatttttttttgaaatatcatatacatattttaataacataatctggtatatatgcaatagttggagatccaaaatatatatttgttcttaaatttattattttttatatatgtattctcacttttttattagagaacaaaaatctataaatgaccaagaaaatatggaatgtcatataaagtattttaaaatcaagacaaaaatgaaatattcctgaaaaaaaaataaaggccaaaatgaaattaatgattgtactaagctaaatttaagaaaaagggcaaatatttttaaacgacaagaaattaaaacgttgaaaaaaatgacaataaattaagaagttgaaaacgacattgaattaataagcagaaaatgacttccagcaaaaaaaaaaaaagtattaaattaagaagcagaaaacgacatcaaaataggaagcaaaaaacgacataaagatatctaaacgacaataagcaaaaaagaaggtataaaacgacaacaaattacggaagttgaaaacgacatatatagttaaacgacaataaataaaaaagaagctaaaaaacgacatatatacagttagacgacaataaataaaagaaagtgaaaacgacaacaaatcaccgaaactaaaaacgacatttatacaattaaacgacaataaataaaagaaagtgaaaaatgacaagaaattacagagatacaaaaacgacaccaaaatggcgtttaactttattgtcgttttaaaacttcttcttcaaacttggttcgtgtttctggttattaaacatctcaccattggcgcggcaaaagggcaaagccagcaaaagcgccatggctcatctcgctcgaacctcggctcatcggattcctttccagctcggctcggctcagcgagccatagctcttcacaccacagtaccttctctctcctccaccggaaccagcagcgctcccaccacttatgcacgagctcctcctccttcggccacgtcgccggccggggtgtctaaggctgcggagttcgtgatctcgaaggtcgacgatctgatgaactgggctcggcgtggctccatctggcccatgacgttcgggctcgcttgttgcgccgttgagatgatgcatactggtgctgctcgttacgatttggatagatttggtattatcttcagacctagccctaggcagtccgattgtatgatcgttgctggtactctcaccaataagatggcccctgctcttcgcaagtaagcccccttttgttcgtgaattctattcgttctagggatttggatttgattacgataccagtaaattattttgtgtttttcatgtgattgtgaataaatagattggctttgtgaatattggtatcgaattagaagaaaaaaaataaaaaaattgttcgattttagggagctagggtttgataaagatcttgatgacttgttcatttgaaggtattgtgattctgagtaaaaaagattgtgttggtgaaaatggggatcgagtttgaagaaaatgcataattccttggtttcctttgcaaaaaaaaaaaaaaatctccttctaaggatttagataaatgttttcaattggatccaaggcattatttcttatggattatttaacgatttaagtttctgatttggtagccggtgcagaaagtaactctgtttcaaaaatatatttgatcctaatcgatttcatgacttgaattgagcaagcttggcataaattactttcttttgagtgtatattaatataggtatttacagttactttatttgttaaagtctcaattttcagatgtgtccttcatagtttgcacgattgaaactttattttttcttggcttgttagattggtggatagaagaaatgcagacctatgctatttgacttatataatcaaagttttgcaatgtaggacattttgaaattttagatggacattttttgttgttgcttttttgtggatgttattgaacttactaatccaattttgttgctggattggtggtaaatcttttaaacttgtactttgattcatactattatgaataatctaaatgtacaatcaataaaagagtgtaattcaatgtgaagtctatatctataatttatataggaccagttgaaagtatgaccatttcaatcaaggtgaaagttttttgtatttgtaaacagatacttcagttgtaagttagaattgaatggaagaagttgaaagtttcttgtagttgttaattagaagcggcaattaattagaaacggatttgagaatactacaagttgtcgtcgagtaaattatgagttagtgatgtagtaaggttgaaacttagtccggcaatggaacttgagagatttctgaaaatttatgcatttagggatttttttgtgcaagatatttgcgtgtgtaaaggaatgtgtgcttatcattttctggctgacaagctgtttatatttattgttttacaatggatttgatttcttctaaggagatatttagtgatagacaactttaccttcttgttgacatgaagttctttaactttgcacctacattttgtcacttccaaatgaagtactttgcacttctttttcctgttcatatcaacatatattttttcgtgatatttatgtactatgttagctacaaaactttccttcataaattgccactttgagctttttccttaatagcactccctctattttatgcacccctttttccccatgtatgcatatatgtaaagtgcaaatttatgcatgtattttttttgcctaagtttgaatttcattgaagcatgttccctgttggaggttgtaaacgattcttgttgatttcttatgcacagaaatgttaacgaattttcagttgcaatttcaatttggataatgtcttaactattcgtttatccaatcttgattttatttcctctcctgatatataaaatcaatctctacatttagttttaccaacatgttctaaatattgttttgcagggtctacgaccaaatgcctgagcctaggtgggttatctccatgggaagttgtgcaaacggtggtggatactaccactactcgtatgctgttgttcggggttgcgataggatcgtccctgttgacatttatgttccaggttgccctcccactgctgaagctctactttatggactccttcagttacagaagaagatcggtaggcgcaaagatttcctccactggtggaccagataagaatatcgcctcgcctcctagttatactggatatctctgctcgtgtttctatggtaataataaaatcagtaagggatgctttgcccttggataagaactgtgaaaagcaatatctgttctcatttcatgagtttaaatagcacatgacaagacgagttgttatgattttacccgtacttctcgcttttctcccgagcttttgcagtacctgcagattatgtaaacattatattctttggttttttttattttctgttcttgaatgagttgcatggacttcttgtcattattcatcttattatttgcagaaatattggttttgaggtatgaattttgtatgttcctagtttcagatgttctcaatctaaagctctctgagcaagaatcacttcacttgtagttagcaataaggcaattgctaagttggtattgttgtgtgtaataacaaggatgttcaacaaagccaaatgtaatgttgagcgggtaggggtgttaatcgatcggttgtgttgtctaaggtttaaccgttgttatgagctaacaaaatataatttgttaagaagatgaattttgatacatagtttttcatatcctctaatttgggtgacttggtttggatgtgctcatcatgaagatcaaagataatcattaataatttctttatatggcactatggtgtggattggcctttcatatatctggtgtgactcttctctctaggagaatccatgaaaacttaaactcccgctcacgaatgtttgtcatgaccctctgaggtgagttacatacgatgggcactggtgtatgaatgctcaagatagactgacacttattgtcctcacatttttttcaaaatgaattaattctattacgaggcataaagccaaaaaatagtcaattataaaagaactttaaaatttaaacaactaaattcataaaaaaacctgaccaccaaacacttgattcatctaaactgaaatttttagattttttacaataaaataaataaaaatactaataaaacacttccaaatatgaataatatcattaagtataatattaaactcattgaaatgaatgccatgattattaactgcaaagactaaacacaagcaattcgagaaagcacccaaattctaacccatggtagtaagcactcatgatcggttataggcaaaaaaaaaaaaaaattgaacctttactataaagataaatagtatttttaacagtttttttttatttacgctcctaaaatgagtgagctctaaccctagtatgtctatacctaaagccagcgtgtaatcactttactactaaaactcatgtttatgactaattcttaccacaatccaaattatattacttttataagaagttatataaatataaggttttctttgtaaaattaggtcccatttaacttatcaaaaaatttggatgtctttttgcattaaaaataataataattgtattttaaaaaggtaataaccattaagctatagaaaacaataagtagttaaacgaaacaaaataatattagaccacctaaaagcaaaatacgacaaacaatagggacgtttacataaaattacacaaatacgtataaaaatacatacagcgaagaatatcaaatcagcatcatataaaaggcgagtcccaaagagtagcgaacaaaagcctctctctcctttgtctctgcgctctgtgctagggtttccaatttatccaaaatatacaacaatggccgacgaagctcagtactcttctggtccagactctgtcaccaataacaaacgcaaatacgaagaacaaaccactc

SEQ ID NO: 18100 - DNA, 15441 bp, Cannabis sativa
cttacacagtatttttgaaaaaagttatgccccacagtaaaaaagtaaaaaaattagaaatttcaatatgtggtgtaaataatccttttttttaaacccttgagttaggtggggcctaagcacaagtcgaacccgcttatgctcagggctggcccatattgatattggcaaatataaaaggtttttacaaaaatactgaattttgagtaaaaatttataattttactgccacacgaatttttttacaaaaatactgtctttttatgaaataaccgtaaaacaacaaaacagaacaattaaaacaacagtagaacaactaaaaaataaccgtgaaataacagtaaaaacttgacacagtatattgtataaaaaatacacggtattttttaattaaatttcgttccacattaaaaaaacaattaaaaattttaacatgtggtgttaacatccttatatataatggtaattagttcaaacgaatgttagctgattagaagagataaaatgggagaatatatatacatatgatttgaacccttaaataaagatgaagagaaagaaaaggataattattaattatagtaatgaaacaaactagctacctagctagtactccaaacatgtggagtcttaatttgtttgcaataaatttacatctttaatatattgacaccaaatcttttcaatttcaaattcatcataaaaacatatatgttaacgttcggtagaaaataaataaaatagcaaaaaccaaaagaagaacaagatagaaattaataatggatgtgtttcttttattatatatagagcaactaattccaattataaaaatgattaatattatatacaatccaaatttattgtgtaactaattctacttggaactttattgttcagccaaaatttcgctcaaattataaaaattactaagaatatgcccttttatttacattctgtttcacagtcttgttggtatcgctcaggcttttgccgtcgattatttatatatgtagcctcggtctgtggtggctctgctcgtgttgttggtgacttatctacaattcattttgttagattttataaatatatatttgtatgtataacttgtaattgtagacgttacgttgatatttatttgtgtccgttaaatttgagatatctcaaatctaaatttttttctttctttattttttcgtttgtgcaagtgcaaaaccgacgcagatgttgtgcaaatctaattttgcaattgttgcgtcagtttgaattgacacaaacactttgtatatgtctccatcgatgcaaacgctcctaattaattttgcgtcaatagtatataagttaatttttcgaaccgatgcaataggcataaatgtcgattcaaaatcgatacagtagggactttttggtggtctctaaaaataaattattaaaccatgtatgcatcttacaaaagtgtttaaacactcaattctctagctaatgtcagttattattagttgcataaacctttgtattgcaagacaaaatgtaccaaatgggcaaatttacaatggttgctacagctcagttggaattttcaccatgcaaaaaaaatcctggaaccaaaattcaaataattcaagggaaaagaagtatatttttaccctaaaatatttattagaactacaatcataaataaataaatcctattaaaagtataatcataaaaattatgctcttcaccttctactttgatttcttttttataggtggagtactaatggaggtttataaatttgggtcaatttggggaagattggatatagggctgggtgttagattttgggttgggggagcccaagaacaagcaattaagagaaaatgatctaggctcagatagagacgtatgagaccttgtgcgtctaggcaaggtcggaacaaaggtgttgtgaatagatttgctgagtgaacaaaacttaatgtagacaaatgctttgggctagtaaaattagttatttattaataatttatattgatatgtacacacaaaatatacattaaagcactgtattttagtaatacataacaatattattcaattaatcccatctgaatattaagatgaaacctaccatttagaaaaataatagtcactagctagatgtaatagttttgtgtgctagtgtcattatataaaagattgtgttaaagagttcttcttaatttttgaaaataaagcgttcattgaaacataaattagaactcgtggtcgttgcaaaataagtttattggaatagacgatacaggtaagctaccaaactgtttgtgggtaaaagttcacttaaccacattatcaacagtaaaattataagttctgaaagaaagcttacagcgaaaagaataataattctcaaactcccagcaaatctccttgcgattgagagaattgatgattattttagagtcgctctccaaactgataaatttgtaatctttaagctttaccaaatcgatcgctaaacaacacaccctgcctcctctccataaagagcatcgaaaaaagtcaattagctcttttgagatgaaactatacatcttagagttctacattgtaataacgtaccacaaggctgtattgcatgcattgattgtgtatatagttcttaacagagcagagagcatatgcatgcttttgtggtccttattggtattaatcaatatgattgtttagcacaaaaatatcattattattttctctccaaccaatggaattattaattaatgtggggttcaacactccattccatattctgaataattgagcagataattcctttttgaactggtaggttttgttctgtctacttttttttttcctctctttaatatatggttgaacaacttttgctgtatatatgtgtaaattccattcaaattctactttgctaaaaagttcatcaatatccaagtaagtgatcaagttttagtggggccgctaccataaataaaagatttcgaataaaaaatattcttgatcctcgagatgagacacaaccatgcaagttttatttatttatttattttttatgaaagttttatttaatttagtgatgttttttcttgactttttttttttctttctctctttctcaagtatattggttatatgttttttttttttttggcgaagtgtatgctggtgttacttaagtgaatttgttcaagttcaaaatcatgatcacaattgttatgttatttataatggatcatgagtcaaatttatatggtatattttaaaacaaaatttacaatataaagatatgattattataattttattacgtggatactataagaataatttttaatttgatgagccaaaatataaaataatttatgttttttggtccttaatccttaaaggtgcttgccaaatgagcattctcattcttttcttactttaattttttttttcctcttgaacacaaaatgaaatgagctcattaagagttcacttcttcctttgagagttgtaacttatattgaattgtttgaattgtggaggaagagagataagcactaaatacacaagcaagtcatctgaaaactcaagctttagtgcgttcaactttgaagcaaggtgagacattttcataatgtattttcttatattttccttgcccttgaacctcatgaaaataagtttctttaaaagagtacttgtttccgcctgatttctttttgcaaagcatttctcaatttcagcaactaaagttgtggcatcggtgatctcctcggacaccgcacccctaaaagcttcaagtattccacgcttaatgatcatatataagactcatgcggtttgaacggtcccacttctcataaatcctccttcgcttggaggtattgacatccataagagaagcaggtcgatccatccttaatgcaaggtcaagtccatgcaaccaagaacaatgaaaatatttgaagagaacaagagattacatgctcacatataggatgtcagatcactttgaaatcattgaatattcttattccaactttgcagcatgccaagatagtaggagatctacttcgggctacatatatctattaggtggtggagctatatcatggagaagtggaaaacaaacactcatagcttcatccaccatggcatcagaatttattgcatgttatgaggcatccaaccatagtatatggttgaggaactttgtcactgggttgcgcattgtagatgtaattaaaagaccacttaagttttattgtgataataaattagctgtattgtatttcaataacaataggagcttgacaaagtcaaaatatattgacatcaagttctttgttgtaaaagaaaaggtatagagttgacagatttgtatggaataggtacaaattccatgattgcagaccctcttactaaggatttgtcacccaagatcttttatgagcacactgctcatatagatgttttagagtataatgatatctagattcagtgagagtttatctttcttatcctttgtatttttatttgtttcatgaagcttgtgtgtttgaatatttttttatcagaaattatgttattcaatttatttcactttgtactttaagctaaagttttgatctccacaaagtaaagcaggaccaaatgaaaattaacatgaatagatcaccatgcatgtaattttcataccatattgtcatgattgatctatgtcatttgactatgtcgatgtatgtgaccattgatgagtagttgtgattgatgttcggcaaattttgatacgcaagtatacgtaatcgaaacaagtaatataatgataaataaagatcgttcctaggaagattgattatcacgtaccaatcaattaattatttggttctatttgatgaataataatttttggatgaaaagtaaataaataaacaataatgaaaattttaaaaaataacaataataaaaataatgattattatgatcttcaactatcttttattttacttcatagtgtaattacttaatttttcttcttcctattcaattgataagttgagttaagaagtttataatctggttaagacttataaattcaatctatgtgaaaacttcctatatttctaaagtaagtttaatcacacaaataatattaaatatagcaactaattaataaaattatacaaacaacctaggtactttcgttttaaatcaatttgcatctatatcaatcaaaacatattcaaatatcaccttttagacttttgacttgaattcataaaacaattatagatgaccagtaaataattgtaaaagtaaaaataattaaatagaaattgaataaagagaagaagtagaaattacatcatcacattaatctataaaataatctcaagtggttcacataataatccttaaaagaacttagctactaaaagacattctaaaataaaaaaaattcaatgaaaaacataaaagatagagatgaaagagaaataacattgtttggagtcctccactagtgccttctgctccttactctccttctacactcagaatcctctcaattttcgtatggtaacaaagatttgccatcaaccccctttaaatagagccaaaaattgaagtttcccatttttttactactaaggccacggcctttcttgcaaggccgcgaccttacaagcgatttctccttttattcgaagtttttcgtttttattttctgctgcaacgactgatagtattttagtcataactctctcaatataactcggaattagatgattcaagatgttttggaaagataaaagagagatctagaacttttacttaatttttttttcctaaaagtgaatggatcacagtcaaaaattagcttaaagtttcaagtttattttctattacaaacggaggatgttaaatattaaaacttagaaatttcaatttatttttggaaagtgatcactattgactattaaccacaaactaaagggctgaaaatgcaatctttaatctattttgagaaatagtaaattactccaagctaaaaaaagttttcttccttcattatattttctcatttttgcttaaaaaggcttgcagaacaccaaaattaccaaaattaaagatctccaaatatttttctaaaaaataaataaaaacaaaaactaaacataattctgcacgataaaataataaaaatactaaaatactctctaaattagactataaaaattgcataaaaataatcctaacaattgatacaatgaaaatcgttttgatcatatgttgatatagttaatggatgaggttgcacatgtctacggttatgatgacaaagatatgagctcaataagattaacacatttatatgtatacatatgtggccattaagagattgttaaaaatttatttagggccacaattgtatatataaatatgcattgagttatcatatatgtttactaagatgttcaaaaactaattaaatgaaagctttagaaattaaataactattaagtaaatgagaagaatgattttaggtagtttggacatcaattatttctagtccacaagtaagaaaaatccaactaagcttttaaaagtttcatttcttccttatatttttctatttttactcaaaaaagcttgcagaatcaccaaaattatcaaaaacggagatcttcaaatagtttctctagaagacaaatataagtaaaaactaaacataaatttgcacgataaagtaataaaaatactaaaacacacactaaaataaactctaaaattgcataaaaataaacctaacaagaatattcatacatgtgtgtacataaaaaaatagataaatttgttatcatgttatttgtcttcttctcaagatacaccaatgataaatttttatttatttagaatattaattaattttcttatttttattaatttggttaataaattttatttaattaattttttatttttatttaaaaatatacattagaatttatatgttatttgatataaatttaaattgaaaaaaaaaatatatgatttgataatcaattacatgattttatttaggtctgtaatttcaataattgtgttaatattaacatttaaagttatacaattaattatgcaattattatatttatttaccaaatcaagtaacttattgtctaaaatatttatttttgaaaatattttcattaattgcaaattatgaaactttgcattcaatttattatcatattgggcatgttggggaaaattaggggatatacaccacattgattctatccaagtgtgtcaggggatcttcttttctggtgtacatcttccaagctagcattttaaactttagtaggggcaatgtatatgctaagaagggtggtccccttgatttgtacagttctaggtctgatagctttgggtcggacaggcctttgatcatgtcttcgagctgatctaactgtatttgcatagatggacctattctagcagcttcttattcggacaaccctccttggccggctacaaatccttgaccgccaagctcaccagatctccacacttggccaggctggttggtggataggttgggggtagatcgtactaatcacttggattgggtggatccatcggtctaaggtcattgttttggggcagaatatagtcatgcatgttctcccttcttgaatcgttgccttagtgtattttcattcaggctaggacttatcctgttgaaaatagaatccctaggcctcggttccacctgttcttggacattctgggggaggaaattgtcgtactacctaaccaggccctgtccagtcatcacagtcctctgtttaggattgtcctccctcctaccgtcattccttggtgttaggaattgtccattcctgttgtatggtctattaggcaagacttgtccgtcctcaagcaggataaagtttggccacctgttcaagggacctggacaagttatttatccattttctacctgttggtaaaccctagtcatcctgtttgtggatctctctagcaggagatctcttatacgagcctcacctcaaaagttcctcttcgaacgtttgtacggatatggactttttagctcttgtcttggctcttgaagcctttactgtgcaaccttgtatggctaagtattggactcttcggatgatgtgcttttatgaaaaataatgactttattattaattaattatggaaaaacgtgtgacagctgcatatttttccatgtttaaacttttgatcttctctctcccatgcatgccttttactttcctcatattctcttcttcgacatttctctctttctttgaatctgtcattgatgagttttaagctttttaaagtttttagaaactatttgattctcatgttttagagtagtctttttacattataatccgcttgatagctttaggatgcataatatatgcctttttgatgaacaagatcgagtctaggactgatacattgggtctatcccatgcatgccttttactttcctcatattctcttcttcgacatttttctctttctttgaatctgtcattgatgagtttcaagctttttaaagtttttagaaactatttgattctcacgttttagagtagtctttttacattataattcgcttgataactttaggatgcataatgtatgcctttttgatgagcaagattgagtctgggactgataccttggttctattagaaaccttgtccggctattagctagatcttatctaggaactctgtccagtacttagatcatgtctaggaactttgtccattacttagatcttgtctaggaactttgtccagtacttagatcttgtctaggaactttgtccaatcattggtcttattataagaccttgaccagtacatagtttttcaaaaagtttgtccgacacttgagcccattgtatacccctgtccagtacttagccccttttgggagctctgtccggtacatcttaggccaaattttccctggccggtcaatggcctttgattcataggctgtccggttcatgagtcttgattttatacttcgccaatcaacgactttgtattttaaggttgtctggttaatactcttaggttttggtcagttaacatatcttttgtctaagtctttttatgttctccggttgttaacctccctctgcctttttgcacatatgaacccgcacgacttttggagaggttacaactgaattgatgaagacttacttagtctggacaactagtccttctaaaataactttgaacctgcagactctagttattattctgatgacatttgaggactttgttgtttgtttttatgcttttattttgcatactttattttttgttcttgtatggcctttaggccctttactttccaacatatgatatttttgttcttgtatgaccttaggaccctttacttttaaacaatgatcgtgtatggccttaagacattttactttcgaacagacgaccgaccatacggtctttaatcctggatttaacttcttttttcagacatgtagctgaccgggcagcttttaattcctgagttatgctttttatgtctaatctgaagtatgtcatttaatattacaatcatgagaacaatgtgttacagatgaagaattggtgagatcttgtgaagaacttatgaagaaacttgacttagtgtctaagaacataaatggcgtgtgaggtttgagagagagaggttgtatgcgtgtggaagggaatctggggccctttcacatgtagctaatgtcttttatatatcgtagggcttactaaatatcttaattcaaatagattaagagatcctttcaaaataaggatattaacatctttttttatcttttatctttaaaaaaaaaagataactgaatccctagagtataagactaatatcttgaaggaatatctctatcttcataggttgttggacctgtcccgcaattgtaggtcagcttgagaatcttttagaaggcttgttgtggaccccacgacttgttcaacatgttaagagttgtctgcacgttctgatcggatagccttgcctttgggggctgtccggcatgtctgtatagtcctgtctttggggattatttgtacaactttgctgtttagcttggttgaccagccttccttggtcagtcaagcctccttggtcggacagacctccttggtcgactagctatggttcggccagggtctaaagacttgtcttattcttgacttggaagttgcacggagtgtacctgtccagttgttgacaggttgtattccacttgttttctgttttgagtatgtggacatgccacgtcaggtggacaaaaattaggataatatctttcattgtaataaaatctctaacaatatattacatatatttgctcacatatgaagaaaaaaaaaacatattgtaaaaattggtaactttgtaatatatagtacgatgcggtattagtcgcaactattaaattcaaaactgcaaactgtactgcaccgtgcaatttggtaaaaatacaaaccacaaccgcaccgcaaaagatttttaatagcattttttgtgtggtgtggtgtaaggagtttgatgaacacccctaaattattttatcacttttgagctatatttgttaagtatatctactttttaaaggagttattggtaggatttatcaggttttttactctattctttaaaatattttactaattttttttaatattattttaccttaaatatttacatcacactgtacatcaatttttttatatttttattttatacaagtaaaatattatatatttaaatattatttttttatttaaataaaaacatgagaaagaaagaaagaaaagaaacaaacaaagaataaaaaaaagtaagtttgaagaataaataatgtgtagctatatttagagaatgaataatgtttagctaaattatttagttattttagctcactttatggagagtgttttttgtggatgattttttttttaaaaaaattttttagcttaatttgagatattataccttacttagcatgcatatattagcgagtatagttaataggtattttatggtgcccaatatcatattgatgtattatgttgtgaatggttagcgatttctatataatttattaaagtaaaatgtgagacttaatattgaattgtaccaatagtagtatgtcactttttgtgataaaataagttatcaacttctttacttttaggagcactttcaaaaaaaattctaatttatcttttaaaataagttattgaaattttaattttttttttattttactttacacattcatattattctatatataaaaattatttatattttttctaaatcatttaaatattatatttataatatacataaataataataatatattatatattatatccaacatatttaattaaataatcgaaagcacctaataaagataataaaatattataactatgtactaaaatctaaaaatattctagctacatttagctatacactgttgatgaagtaaaattttgttataatatttgatatttttttagctttagctatattattaattttgtgtttattacacctgagttagtgtgagtgctctaatgaaaaagtcaaaattaactctgcatttcgaatattacaagactattactgaatgtggattgtaagtgatgaattaaagatagttaattatttaaaaggaaagaacaattaattgggtaaaattttataatttgatttgttggtactcttagttagtttgtccctgaaccagagaactacaagaaaagaccaccctctttcaaatcatgccactataaaatcacaaataactaaaattaaccaaattggtagaattaggaagatatatttaggaaggaaggaaggtcggtgggtccacctcttcttgaaaaaaaaaataaagataatggagtagtgactagtgagtagtcaatcacttaaaaaaaaccaataaaattgagaaatgcttaaaagtatgttgtatagtttttttaggtgtaaatatcgttattaatgcaattaattatcgaacctcatcaaatttaatgtaataatttttaaaaagtatcgctagctaatcgcaagaagacatatcaagaggtgctaaacaccactaactagtatgtaatatcaatcgaaatagaaatagagatagagagcttaatgtaatgaagggtaaatactattttgaaccttgtattttttaaaagttaccgattataccttttattttgttatttaacaaaatagactttgtattttctaaaaaagtaaaaataggatcatgaatttaatttttgacaattttttttaatataaccaacttgaataaaattcttaatacaaacaaatacaaataaatacaaacaattttgtcataacaataaaaaaatttacgaaatataaaatttaaaatatttttatccatattataatgaattagagggtgacattttttaaaaaaccgtgagatgtcctttgctgctgcgccaaaaccacgctttcacttctgttgatagcgatagtgacagccaagagagaatcccggagcaaccaacttcagtcttctgatgggctgagctgggctgggccgggccgagccgagacacctttggattgaattgggcttaccaaggttcaggttatcaagactaaaactctcccaaattctttcttccttctcactggtcaaacatctatgtataagaatctgaaaccttttgtcctatatatctgcccactgttcataatatgtacctcaggctcaggctcactgcactgcagtgtaggtctaatgtaatcaagcctaaatattgcagcctttcctaccaaaaacatttctttcttttccttttgttcaaataaataaattgaaaaatatatggtagtacacttactagtaaaactaactactcccacctcaaagaaagtaaaaaaaaattgagagggtgaaacagaaacagatcccagagattgaaccaaatcaaaactgcagagatcacggggaccgagaaatccgccacaccccaagcgagccaggactacaaaaaggttgaattgtattaccttattattaagaatgaatgaatgggataacgttttcattctaattaatcagtatataatatactattgttatttgttaccaaataaatattaacctgaaaaaaggaaaaacaatgattcaatttttgttttttaatttttaagtagagagagggagttgggtcagtgatagagcagcacatatgagcaggcaaagccaataattgcctcccacgctgatcgacacgcatgattttgtcggttctctctctcttactaaccccaaattattcctttttcttttctccacctttggcggttactcactctcaattctcaattctcaactctcaaatcaaattccctcttactctattccaattccaccccaaacaaattagaacatacttattttaaccaaagaaatttataacaaaacaagcagcaaccatgtatcagttggttggttggttttgttggtaggtacagtcttaattcttaacttgagtagcacgtaataatatgtttcccattgacaactaagcatcattagtagtacaatcttgtgtatttaccttacaattattgacactctaacagtaaattcccctataccaagttgtagtaataatacccattacatacatatgtataaaaacacacacaaacaatcataattagtaaaaatcaatttttttggtgtcatgcaaccgaaagtaataataataaattaataataatattatggtatagccaatgaataaggtttgcttggcttcctcatcctatcctaatcctaatcctaatacgtatagagatgtgtaatcagacgatcatcctcaaatcacgcctcgataagatagtggaaggaaaacgtgggaaattctgattggtgaactgaaaagactatgattactgtttatgtgtctcgaatatggtcaccaccatcatcaacaacaaatttgtattcgccacgtaaagaaacccaaataaagtgattaatagacgatcacaccagattattgatttgtgatcccctcagtcctcactcactgtctctctcaaccttgactgctcttaagaccgcacgcgacaccacgcgctccccaaccaacgtacggaatcaaaaagactctgatttcctttcctccttttgtattactattttattattataaaaaaataaataaaaataaaaataaaataaataagacactactcactgcctcagtccttcattccattccattctttcttttttatacgagttcgttctttctttactttcattattctcatttctcaccaattccaaaaacttcattcttctctttttctctctctctttcttcctccaaaagccccaaatcccaaagacaaaccagaccagaatgccctcggaatcaggggataagaaacaagcggcaagaccccaactaagcatgggacaccttccgccggcccaccctgaaccactcccatgcccaaggtgtgattcaatcaacaccaagttctgctactacaacaactacaatctcttgcagccacgccacttctgcaagggctgccgtcgttactggacacacggtggagcactccgtgacatcccagttggtggaggcactcgtaagaacactaaacgcactcgttcttccaactccaactcctcctcatcctcttcctcttcctcttccatgacccatgaccaccagcttctgccatctaaaccactgctccctgacttttccctagtgaatacacaaaccgactcatctgctgtttcacaggcacaagtgaatctgaacaacggcagtgtggccggtggggttgggttcacctcgctgctgaattgccaggcacctggtgggttcctggcacttggagggtttgggcttggagtcgatgagattgggttaggatatgggtacggagggagaggtgtttgggcttttcctgaggtcggtgagtttgtgaatggcggtggtggcacagctgttggtccgggttctacgtcgggttgtaacgcgtggcagcagatgaacggctcggatggtgggttagtggatggtggtggtgattgctcatactggccggaccttgccatttcaatgtcagggaagggtttgaagtaacagcactgctgacgtggtatttcgaataaatttcttttcttttttctttttagggtggttggtgggtcttactttttctctgagtgttctttgtctggtttaaaaacagagattttagaatgttcagagagtttggggttgttggtttttttttttttt

SEQ ID NO: 18101 - DNA, 5813 bp, Cannabis sativa
aaaaaaaatacaaacctaaatacttactaccttatctatttgcccattttttagggtgtttaaattaacaccaaacaatcacctacttttgagaaatttggtacttttttacttaaacctcaagtgtgtgattaggggttaggaagggttacaacatttttgaccatattatggaagagcaaaaaatattatattatacttattaatttttatactaagatgggtacccatgaattttagatgtcaccaaaaacaggtaatggttaaagaggtggcatatagtcattattaaacttttgtaatgaaagaagttggtccttttctcatatattttaaaaaggccatctccaatttttagagcaatgatataattcttaatgcaatataaatgggataaacaattaaaagaagatgaattattaatggaattaatgacaaaaacattttaccacaatcttattatgttacttcttttttctttttcttttcttttttcttctttttgatgttacactgattttagaagtggagctttggaaaaaggaaaggtgggggcattttaataacttaaccttttagcctttgcttagagaaccactaccacctaacctaaagaaataaaaaaataataataaatattatgattttataaaatatttttttaggtaagtgattttataaatatttaccgagtcatgatcaaagacattaaatacacgagaatattataaataaggacatcaatatatatttatgtatatatattagttggtagttacaatcaaatacactaattgatcaatttagatatttcattgaaaaaaaaaaaagaaaattgttgaaaatattcacattgttcttctcatgttttaaagaatgtaatcaattagaagtcggttcaaactttgttagagttcgttattgtcagttagttacagttggtgtcttgttcatctattttcagctgttattagtttcattttctgttagagattgcttttgatttttgctgtatataataattgtgttcagctcattcaatgtaactctctcttttcattctttgtcctctgttttacctctctttgcttctttttgtttctcttcttcactgttttgttctctttcatcatgtcaaggaagtttaacatggtatcagagcattttttgccgttaataacgaatgttgtcaccggaatctcgagctccgacaatggagttgccttaaaagccaaaaatagagacacgaatgactcttcaccaatagtgttcagcaacactctttttgtaagactcaatgatcataattatcttctatggaagcaacaagtgcttgctgcaattcgtggaaattaacttctgcaattcattcaagatactactccaccacctacatgtctttctgatcaagatcaagcttcaaaaaatctaaaccctgcctttgtcgagtgggatgtccaagaccagcttcttgtctcgtggctcctatcctccatgttagagagtcttctaactcgcatggttggttgtgagacctcaagatagatctggaaaacactcgaaaaatacttcaccttgaaggtttctactaaaatcctagagttcagaaccaagcttcagaacctcaagaaaggtcatctttctttgaatgaataccatctcagagtgaaacagactgttgatctattagcatctgttgatgaagttttaactgatcaagatcaaatagctgccattttttaagggctcccgagtgaatatgacacatttgtcatctccaccaacactcgtcttgaaggttactgttgcagaaattgaatctctgcttcttgcatctgagtcacgaatcgagaaattagatcttgatctctcaactcatgtctcgatgaatgaagttgatctctcacctgaggatcactatacaaacaacaaaaactgtaagcaaccaatgcagggaaactccaatcaaaatttctatgccaaccctggcaatggctatggtaattttggttcgagaaccagcttcagtggaaccaattttaatggtggatcaagtagtgtcttcaacagaggacagtcacaaaatcacattcctacttatggcactggtcgtggctcaaacaattttcgaggaggatccaacttcagttcatctcgaggtggaaagtttattagctcttcaaacaagcctcagtgccaaatctgcttttgtgttggccatatagctcaggactgctactacaggtttgataaaaccttctcccctcaaccatctggatcatcattcacttccccttctctccccaatgttcagacccatctcactgcctcagatcgtgcctatgatccaaactggtacccaaactctagtgcaactaaccactgcacactagaagttcaaaatatgctaaacaacagtgaatatgagggacatgattgcatgtatattggtgatggaacaagtttgcctattaagcatattggtcatactttcatttcttcaaacacattaccttctaaaccattattgctttaaaatttacttcatgttcctgagctaaccaaaaacttagttagtgtgtcaaaatttgctagataactgtatattctttgaatttcatcctgaccattgttttgtcaaggaccaggtgaatcgagctactttgctcatggggagatacaagaatggcatgtattcatttgactccaatgaccttcaactattgtcttcaccactccaaacaacccagtcatctcattcatcttcatcacaacatcagatgtcaggcaacattgtgtcttctcaaccttttattcatatagatccaaataaaaccccatgtataagctgtaacactacaaatctatcagattttgatatttggcacaatatactaggccacccatctaaaaaaattataaaacaagttcttaacacctccaatatttccattaataaaatatctcattctgtttgtgttgcttgttgtcttggtgaaattcataaattaccttttccaaaagcatctcaaactatttacacaacaccactttaaattagttgtttcagatttacggggccctgcacacattctattcttcaatggatacaaatactatgtgcatttcattgatgtctattctagatttacttgaatctatatgttaaagaacaaatttgatactgtaaaagtctttttaaactttaagactgaggctcaattatagttagaagtcaagttaaaatgtcttcaaatagattggggaggggaatatagatcattcacaccacatctagaacaaatgggccttattcataggaattcatgtcctacaacccatgaacaaaatggtcttgcagaaagaaaacacagacacatagttgaatatggtcttgctcttctttctcaagccaattttcccttgaaattttggcatgaggctttcaaaaccactttctatttgcacaacagattacctacacctgtgctaggtaacaaatcccccttagaagtcctgtttcaagccaaacctgactacacttactttaggacatttgggtgtacttgttatccaaacataagaccttataataaatataaactacaatttaggtctgcaccttcacattcctttgttatagtttaaatcacaaaggctataaatgtcttgatgccacatggagactttacatgtccagtgatgtcatctttgatgaacattccttcccttactcatgaccaaaacaaactcaaaccccatgaccagtgggttaaggctctctgcctttggaagtaatccagtggaagacattcaactttataggtctattgtggagccctgcagtatcttacaattacaagacctgaaattgcttttagtgtaaacaaggtgtgtcaattcatgcacaattcccttcaagttcactggttagctgtcaaaaggatcctgagatatgttagtggttcaatgaatcatggtttgcaccttagaaggtctaattttcttgagctttaagcctactgtgatgcagactgggccactgatcttgatgactgaagatctactttaggatttgctgtgttcctaggcccaaacttgatcaattggcaataaaaaaaacaacatactatatcaaggtccaacacagaagctgaatacagaagtcctgtaagtgctattactgaaataacttggctatagtcattgttctctgagttacaacttcacttgcctcataaaccagttatttggtgtgacaacttgagcaccattctgctcacacagaaccatgtgctttatgctagaacaaagcacgtcgagttggacctttactttattcgagaaaaagtttaacaaggtctggtttctgttaagcatgttctagtagtggattaattagcagatggccttactaaagcaatctctagcaacaggtttgccaacttcagaaccaatcttacaattgaagatgcttcaatcataagattgagggaggatgttaaagcatgtaatcagttagaagttggttagaattctattagagttcgttattgtcagttagttacagttggtgtcttgttcatctatttctagctgtaattagtttcattttttgttagagattgcttcttgtctttgctgtatataatggttgtgttcagctcattcaatgtaactctctttcttcattcttttgtcctttattttacctctctttgcttctctttgtttctcttcttttctttcttcttctctttcatcatgtcaaggaagtttaacacaaagacaatgaaaaaaaagaaacaaagcattcccatgttaaaaaaaaaatctagtactattatgatatgacgttttataattggttggcagttttctataatttttattaaattaaaatagagatatttgcgacataaatactttatgttttcggtttcatacacttaaatactgtatattttttttgacagattaaatattttaaattacatttctgtcactactattttgttaaatcatattcaaataagggataattgcgatataaatacctaatgttttagatttcacacttatataataagtatttttttctagcggattaaatacctaaagttacatttacgttactttcattgctaacggtccgttaaatcatattgaaatcagactatgttgacatgtgtcaacatagtagtgatttactcttattttcaataaaattaattattaaattattttaaaaataaaaaataactaaataataataaaattagaaaatgatactcacattctaaataagagaagaagaagaatcaagtatttttttatattattttttttattatttattaattaaataaatattattatttagttacttttttttcaaaaattttaaaattatttaataaggtttttgattgaaaaatacttaacaattttttttttattatgtttatgtacaattgtacaaattttaaaattacttaataagttttcttattaaaaatatgagtggactaatatattaacaggtgaacttagtctgtgttaataagatttaacatactggtagtgataaaattaatataaatataactttaggggtatttaatttgttaaaaaaaaatacgtggtatataagtgtatgaaatctaaatattaaatatttatgcgtttgaatataatttaacaaaataaaagtattagatcttcttgacatttttgaatcagagaaaataatccagaaacagtaaagagaaagaagaagaaagatagagagaaagaagctgaaagagaatgaa

SEQ ID NO: 18102 - DNA, 1999 bp, Cannabis sativa
  modified_base (1286)..(1291): a, c, t, g, unknown or other
gtgatgcaagctggttggatgtttcagcttctgttatgactttaagtattaaatctctttgcacggctcattacgagtggaattattcattcggttgcaagattctctccacatgtcacccaaataaactccatgttaccttgtgtagaaattaggataacaactttcaatcgatattatttatgatattatttcttaagagagtaataattggtacacttacattttacttacaaaattaaatacttatattatacatagttccaattatattatttatgatattattttttaagagaataatgacaaatacactttcatattactcacaaaattaaattatgccatatatcatagtttatattttgtaaccacacaatttgtattatgcgaaatctacctatataacatatcaatggtttgacacttagctaaaaacaaaattgtcaactattataatatttaacctaacaaggttaatatatatatgaatatttttatataatataaattattctataaactatataatatatattgtaaaacacactaggcaagaaattaagtttatcatatatttatgactgttaataatgtatgacagtctatttaataaaaatatttatataatataactttttttaaatatttacttcagtcaattacattactattttttttttcaattatttacttagtttgttagacttataatttctttttttataaagtcaacattgtataattttgattttcttattattagttttattaatatttttttatttataattttgagtttgagtttgctagatgtatatatatagattttgaaagtaattaaaaaatttaaaaataacattctttcactttgtaagatagttcaaaattgaattccaaactaaaaatatttatatttatataataataataataataatgaatatagaactacaaaaagtctcaatataatttgtacttataaaaagactaaaaattattctttcttttgattttttgtcaattgtagatgagcaaaaaagacgtcaaatagagaacttgatacatacgatgatggtaattatatgtagatttaattatcttttttagggataattacataagctactattttttttgtaaaaaaaattacatttttacgtttaatgatttttttttttacatttttacggttttctgtaaaaacaacacgaaaacaacaagaaaactacataaaagtaacatgataataacatcaaaccaacaacaaaaaataacatacagannnnnnaaaatcaacaacaaattaacatgaatgcatcataaaaagaccgtattttcggtaaataaaatcaaaaaattcgtaaaaatatttaaaattccgttaaacagtatttttataattttttttttattgtttttgtgtatttgtaaaattatctctttttttaatcactattttatatagggattctttaatttcatatattttattcactataatatttgaagatatctttttgattaaacaattataaaaaattaaaaattaaataagttaattaaaaatatttaaaacatactattcaaaaataaattaaattagatgtacaattttatatattttctcattattaataaattaaaaaattaaaaattaaataagttaattaaaaatattgtcttttttttaaaatatttataaatattaataccgacagaaactgattgtggtctgctggtattaatgcatctgcgtgtaaaagtgcagatattaataccggcggattaatagcggtagggttcgccggtattaatatctgcacttttacacgcagatacattaataccggcagaccacaatcagtttccgccggtattaatatttataaatattttaaaaaaagacaatattttgaatattttataattaaattaattataattatatataataattatttcataaatatattattaattaaaaataaaacattaa

SEQ ID NO: 18103 - DNA, 6193 bp, Cannabis sativa
tgtgggttaatacagatttttggtggaatttattgtattaacttggatataattgtacaagggaagctaaaagcctaatatatttttatctatctacatatatataaccttttctatcaatttattctgttttgcagcacaatgctgaacctgaagctgttgacctcttattagaggtcagatgacttactactctgttaatatatcattattaaatattgctgttctttttcggcttggtagcttatgagaatttgtgccatatgaaatcttttaggttgaagaccttgatttgttaattgagcatgttgacaagacaaattttaaaagaacttgcctctacctcactagtttggcacggtatgttgaaatgggaatgtttgatgatcagattgttctgtgaaatgtagtttctgcttattgcctgcggcattgcaaaagtcctccttattaccctcttgtatcaactcagtttgtccatttaatgttatactgcagatacgtacctggcccagatgatatgctggttttggatattgcatacactatatatcaaaaatatcaagaatatacaagtgcacttcaagttgctcttttccttgataatttgcaggttcgtacacttctattacatttcctttatttctctttaaaaaaatctgctgcttgtttctaatgaaactgcagtaactgtgtataagtgagttaaatgattttgtattaggtgggaatgggacgtctacatctttgtaaattgtaataaacaatgtgatatgatttagttgtaattttgtcaatgttatgctgcagtatgtaaggcagctatttgagacctgtcctgatctacaacgaaaaaagcaattctgttacatccttgctcgacaggtaaggtttttggtttacttttttctttaatggaaactattttcctgtcttttgataataaaaaaaattggttggattttaaatttgtgtttgatgctgctagtggaactgggatgaagaagttaaggccatagaaaattgtgtttcttcaaatatggatggagtttgctaatattttttctgttatttgaagggtgtcccgtttgtgcttgatgaggagatgattgcagatgatgaggaacgagaggcattgcaggatattatcaacaatgcaaaactaaatgaaggctatctaaatcttgcccgagatattgaggttatggaagcaaaaacccctgaggatatttacaaggttagaagttagaacattttgagttatttagtgtgagatattgatctcttttgatatatatatatatatatcatatcaactctattatgatttcatgttctgtagaattaacttgtgtaatgaaataaaaatattctgccgtagagatattgcacggtatttaagacatattgggcccttttatctggataaatatattcttttggattgattgttttcattgtcaatgtgttagtgtgttaatatgatatagtgtaagagtggtatataaactgtaagcccgttgttgtattcgacatattcaatgccttctgagtacctgaaaaggttgtttatgcctttaatgcagtttcctcttttggaaatggaaaccccttctgcttgatttaatatttcagtgtcatcatcaacttttatataatccgtcctgaaaatggagcattttcctgaccttattaaggagcacttttctttttttgcatgatttggtcttgtattgttgcatattttacatgattgatgaaaagctcaaacgttttaggttatgtttggaagttggattttggtgagcaaagaaaaagggggggaaaaaagtggaatataaaaaataataaattctcatatttggtatggaaagaaacattgtatagaaaaacagtcaattcaacaaaattttccatatcaaacttgaaaaatggatttattcttttgttctccacatatttttccctacttttttatttccaccaaaatctaacttccaaacatagccttaaggaatgtgtggatatctcctgggattacatactgacctactaggcatgtccttaaatgtaatttcattatcgtcactttagctgctatgtaacagtttttacatccatacatatgttgtgtgagccactcaagactggctgaagtggttgggtgtatgaagggtgggttaaagccctcataatgtgaaaaaaaatacttttgctgtatcactattcctgaagttagttgatgagtgatttaaacgtgaatttgatgtatcataatttacttgggtgtttttaggcacacttacttgatggccgggcaagtgctggtgctagtgtcgattcagctagacagaatttggctgcaacatttgttaatgcttttgtaaatgccggctttggtcaggtaagttgtttttggttaatgtacttccaaagttatgtttgaatgtttagttaaatgatagtcatatttgtactccaggataaattgatgacagtcccatcagattcctcaagtggcggttcttcaggaaactggctttttaagaataaagaacatggaaagacaagcgctgcagcaagtttggtgcgcttccattttcctttttaagtaatttactagctgtgtacttatattgacagcttatattctgtttacttgtagggtatgattctattatgggatgtggattcaggacttgcacaaattgacaagtacttccacagcaatgataaccatgtgatcgctggtgccttgctaggagttgggattgttaattgtggcatcaaaaatgattgtgatcctgtaagttgcctgaatgttaagaacttctgggaagcctgtagcctctgatagtatttctaaatcttgtttgttttctcaggcattggcacttctaagtgactatgtagataaggaggatccttctattcgaattggtgcaattatgggcttaggaattacctatgctggcactcagaatgagcaggtgaggtttcttacattttggcagtataaatctgatcagcgacagcaactgttttcttcataacaaacatgcccttgctttctttttgtcttttgttcaaatgtttagtctgagcttgattttcaaaaatatagcatcaacccgcctgtacaaccatggtcatttctggttcattataaacaaacacttatgcagcataattgtcttgacattgaagctaacttatctctatttggtcagctacgatacaagttgactaccatacttaacgatgcaaaagctccacttgatgtgattgcattcactgcaatctcattgggcttgatatacgttggttcatgcaatgaagaggttgctcagacaatcatatttgcattgatggaccgaagtgaatcagagtttggggagcctcttactcggttattgcctttgagtcttggtcttctatatcttggaaagcaggttaatttcttagacttcgaggcaaatgtattatgattgttttcctttgaaaatatgtgtttttccgtgctcaatctgtaattaatatgtgatatatagatttcaggattcatatcagagcctacaaataattctctttgcatagaatcttttattttttcaggatacatatttctgattttttttcttcttttggaatctctttttgtgtgcctctgcaggatagtgtggaggctactgctgaagtttcaaagacattccatgagaaaatcagaaaatattgtgatatggttctgctttcttgtgcttatgcaggaacagggaatgttttgaaggtaatattttcaatgttattgttgagataccttctaaaatctctcttgcatatatgaagcagctgacttttgtgtcatgcacaggttcaacaccttctgagtcaatgttccgaacatcttgacaaaagtgaaacccaccagggacctgctgtacttggaatcgctatggtatcaatggcagaggaattgggtcttgaaatggcagttcgctctttagagcatctcttacagtatggagaacaaaatatccgccgagcggttcctttggcacttggcctcctttgcatatcaaacccaaaggtaatctggttaggtgaaataaacttaatcctctgctttatgaggttgtctgtcattggtaaataattaatgtgtccattttatgtgtaagatgtgattcatactttattgtattttttattgattagggttcttagtttattcagaactcttttttggattttactttgcatttcgaacccaaagctaatctgattaagtcaaacaaactcagcatccttgtcttgaaatgattagatttattcattttctttttattgtaggatgcaaatcctactttattagattttagttgattaatgttcatagtttattcagaagtcttagcttttttagaccaattttatttgagatagtctcctggttacaagagtcttataaaattcttttgtttttatattaggattcctagttagatgcccattaatatctcttgtgatgtattgccaatatcttcttgtgtgttttgaccaggtcaatgttatggacacattaagcagacttagccatgatacagattcagaagtagcaatggtgagataatgctgcatatatgttaaacaattctgctaaacttcagggctaatttattcttctggtttatgcttcaggcagcagtgatctctctaggtttgataggttcagggacaaacaatgccagaatagccggcatgcttcgcaatctgtccagctattactacaaagatgctagccttctgttctgtgtaaggcatcttatgaattgtctttgaccttttgcttgtatacctgtgattgttgccgtgttcatttatatcatttggccattgtttcaggtgcgtattgctcaaggtctagtgcatctggggaagggtttattgaccctgaatccattccattctgatcgttttctgctatcaccgtaagtaactgggtagctgtgcaagtgttaaactaatgcatcatcttctgaataatttaatcatattttatttttcttcttgatcttgctttgagtaaaagaaggtattttttttcaagttctaccaccagcacctctttataaatttctatttattggtgcaggactgcgcttgctggaatcataaccatgctacatgcatgtcttgatatgaaagccatcatcttggggaaataccattatgttctttacttccttgttttagcaatgcaggttgttgtctgtctaatcactagaaagttctctattttaggcaatttaatttcttcttgtggtaattttcttttttaattgtgatagccgagaatgttgatgactgtggatgaggatctgaaaccattgtctgtacctgttcgagtgggccaagctgttgatgttgttggacaggctggtcgtcctaaaacgataactggtttccagacccactctacaccagttcttctggctgctggtgacagagcagagttggctaccgaaaagtactgagataatctctctaaaatttgctgcatagttcttttgctgttcttcattccacaccccttatgacaaatgctttgtatttatgcaggtacattcctctatctcccatccttgaagggtttgtcatcttgaaagaaaacccagactaccaagaagatcactagtgtttccaaccatgacatgagccagggatgggttacgtctctccacgcttctgtaggccatatcgacaccaacctttgtgtgttgaaagttgtcttgatgcaagggggccccaatgtacttttttctttctccaattgggcccccaaaagaagccagaaaattaatggaattagattatggtttaatttttgaattctggaacaggaaagaatgcgggtggacccttcttcaatgttaaaatttattagtttgctgcgagggagcatcttttttttttttctttcactttgttatactgtaatatggctactaagttaggtggtacttgcaaatgaatcatcacagtgagataatatattagtttcgaattagtccaccatgaaattggcttcatgagatgcttcaggaacctttattgtctgaaaatccgcaaatgggtaatgatttttgctcgtagtgtcccaatgttgcttccgcattggttattatcttttttt

SEQ ID NO: 18104 - DNA, 3026 bp, Cannabis sativa
  modified_base (1699)..(1700): a, c, t, g, unknown or other
  modified_base (2265)..(2274): a, c, t, g, unknown or other
ttccctcgtattcgatgtccacctttcaattacctctatcttcctgcagggagttagacgccttgatttgaaaattttggtggaatggaagccttggaaaacaacgctttcttgccacaatttcatgggactctctttgccgtcgcaaatggtccggggggttgggtttcagacggatggaagatgttaacaatgccttactgtcaaagctggcttggtttctagcttctggtgatggaagaccttgggctatggctctcaaagcgaaatattttccttgtgactccttttggtcaattcagaggaagaatggtgattcttttgtttggagaggtattcttgatgcgagacaggtcatccttaaagggtcttgcatggttatagcttcaggggagtcaattgatctctggtttcaaacttggatcccttggctaagctatgaagagtttagagaactcatggagtctattcggtgtaaagctccaagtctccattcggttgctgatttgatgtttcggagagagaagaaatggaatactagctacctttgtttcttatttggtgaggccttgggtagaaggatcagtacgatccagattgctcatgatctaagcaacgacctgctaatttggaaggaagctaatagaggagttttcattgtaaaagaggcttatttatttgatcagaaaagtcgctttgggagtattgagcctctttggaaatggatttggaaggacaagcttcacccgcggatgaggatgattctttggcgtgctgtggcaggtgctctgcccaccggagacaaatttggtgcattgcaaacgtgttgctttttttctaatgcgatggaatctccgctgcatctttttgtccaatgccccgttgctgttgctctctggtttgggtcccctatccccattcgttcctccatggtgtcgacaaattctgaaatctttcgttattgagatgtgctctgggcttgaaccagatcccaggtatcgtttcttactttgtctggctgtgattattgataccttatggagtcttcgaaatgagtattggcatggcaaagatctgggtttcaatgtcaatgacttgtcaattacggtacggaaaaaatactgggagttcatccagtgtgaagttaatggagacttggatcttggaaaggaaaagatgtgtactgatgtggggcttgccgtctctcaaaaaaggaaattaatctttgtggacggttcgttctctgatggaaagatcggtgctggttttcttgcttggaatcgtgacacgaatgattgattttatgaggtgaaatgcgctgttggggaagatgctgtggctgctgaggtttttgcttggttcattgctctgcagtgggcaaaattcaataactgggatgatttggttatcatttcagattcctctgttgtgctaaatgctttcaagaaggagaggcatcccaattggcattgtatctcttggttctcatctgctttaaagataaagaaaagttttcttgatgtaacaatgcaacactctaatcgcacctacttagcatttgtcgatagtctagctaagagtgctcgcttatctgagagcgattttccttgctgtaaaggggagggatttttccctgtggatcccattttctcagcagttaataaaatttgaactgaggttcttttcaaaaaaaaaaaannaaaaataaataaataaaaataggccgtgtctttatatttttagtgtcccacacattgtgatcagatactaattaaaatctctaaaaaaatttagtaacccacattttttgtgcaggactataaaaagtatgagtaaaggttcaattaatcgtagcagtgtaattaaaagaaatatttgaaatccacaagtatctaaaagacatatatattactgttggcaaaaccagagatatgcttgactctttgaatatcatcatttggaggtgtcaagaatcactttaattatgctccgaagaagcagaacaacggttttataatcagcaacacaacaaatcaaattttgaaatttgaaaggaagatcaaaatcatgaattccattaataataataactacagattcataatcacctacacataaatatataatattccaatacaattttatgtatttacacatatctaaataacctatcagaaatatatcacgaggagtacataataaaaacaaaagaaaataagatagatcgaccgagagagagcaagatatttatataaatatatatannnnnnnnnntatatatatatatttataaaagttctatttgcccatgaagaaaccatgcatatggatgatggatatctatatatatatgaggaacaaaaaaccaaattgacatatataaaaaacaaagtgtcatgcatacaatattatttaatttgttatattacaaataatattctatactctctagtagtattaatcatcaccacggcttttggggatggatgacaaaatgttccagttgtgcagctagctcatcaaaacatatacgtaccctacaaatgagccactaccgatctaagctagaaaaaggggaccaattagacaatttggaaagaggaccatctgcccgcatgcttcaacttagatactttatatatgtatatatattattaagaattagtctcacattgctaatacgtcgaaataaattgtaatatataagatgactgagctactcctctcacagccaattggttttgagatagaacctcattcttttgttatttccaaattctaacatggtatcatagccacttgtgatccgttatgagcccaaatttccaccggtctaaaaagccgtttgtgatccgttatgagccaaagtgtcgccggtccaaacagatacttatgttgtttcccttttaacctctatttgggacctttcgaccaatgtgtgtcagtttttagtgttgggtctttgacttgttttaaaatccataaattttccgacgtgtacacccacaaatttttcaatatttggc

SEQ ID NO: 18105 - DNA, 2949 bp, Cannabis sativa
  modified_base (2875)..(2889): a, c, t, g, unknown or other
tgtgcttataaatatagcattactcctccatgcaaagagttgaaatttcttgggttaaaaaccagtaaatacattgtgaaatccatagctaaaagcttataatagtgactcatggactaagatttattgaaaccccagccacattaaaagtcttgtcttattttcctcttagtcttactttctttagcttaatctttattatagtcgatttctgaaatactcggtagatattttggtattgtcattgagagctgaagaaatttttttaccattctttatcattaaaaaaaaatggtagttactagaaacacagtagcacgaccagctagccaagtgggtcgaaataatggtgaagacccgactgtcaatgttctaaatccttctcctctggtggatgctcaggcagccatcgtgggaggaagaagcatcagcagtgggcacaaaccctccctaaaacaataacagccatagtgctagagtttttgccctgaaaagcttgtaaaaatatttataattataaatattagttgaacttttgataaatacttgaatgttaaatttttgatattttatattgaataatttatatataaatatcgaaaaaaaaaattattcatatatgaggttgtgacttgtattgtacagagaatttaaatcgttatcaatgaataaaatgttagtttttagtgatcaaatcaaagatatatgcatcgaaaaaaatatccaacagatcagctttacgtttacagatatatatacattgaacaaaaagagagaaagaaagaaagaaattaaacctgaagtccttcaatgttgctatcatttcatataatgattcattgagatctcacaacaagatcatcctcaacaatctcacaactcaaagacgagtgtgggctcgcaatacaacataatgagaatttttattaattggatattctcaacacataagatctgataaatctgataaatttggaaccataggttttgtttccgggagagctctatgcgtgagactcaggtgtgaaaaaatgtattatattttttttttctctaatctctttatttctctatatatttgtatatgtaaaatagttaattaattaaatattttaattaataagagaatctaattaatttataattgaatattatttaattaactaataattaaatattattagtttgaactgattaaaaattaactaattaattagctgatcaaattcttttatcagctaactgaattattctaatttttaattttatttattaaataataatattttaattatatattaaaataatttattatttaacttgatatttaataattaaaattgttgaatcaaaattcactttttatgaattatgttttacgcatgtaatacacagtgactaggtactgtgttacacgaatacctcatatgtcgaggagggcatatgtgtcttttgattgcctagtttcctaattaataaaatacttaatatcctaaaataaattaattcataacttgttatatttatgtatttcaattaattatgaattaattaaatattcataattatccaataattatgtttttcgcaaagtaaaatattttacttatcatttgcccattgtttgtatttacttttgtcaattttttgattgagctatttcggagactatggacctataacattaagcttcaataaatcaaaactaaataattaaactctttaattgtattagtcaatttattaattttgatattcctccactatgaattaagaattgaactctttctgttatatactattacaaactcaaactcaaactcaaatttgaagaactttcaattctaaatttgtctgagaatagggaatctagagctagaaatgacctttgttaaacaatcaacaagttgtcattggtaggaacatgcatgacttccaaatctttggcaaggatcttctctcgaacaaagtaaaagtctaactcaatgtgcttggtttgagcatgtagaattggattaccaacaagcatgatggtgctttggttatcacaccagataacaagaatgcttggcagtttgagatgaagtttatgaagtaaagacttgatccaagtgacttcatctattaaggaagcaagcatcctgaattttgcctttgtgacaaaccttaaaacagtatgttgtttcttggattatcaggtaatgagattataaccaaagtctaggcaaaaaccaattttggatcttcgatcatcaggttctgcagcccagtctgcatcataaaaactaaccaagtctagagaatttggtttggttaagtgaagaccataatccaaggtgcctgagaggtacttgagaattctcttcactattgtccagtgagattagagtggattttgcatgaactagcataccttattgacaatatatgctatctcaggtctggtaagaactaagtactaaagagcaccaacaatagaactatagaattggagattttcaatagggtcactaccacagacaatctcagactagatgtcattggggtagattgaggattggaaaattacattttggctcgagctaatagatctcttaagtacatagtctgagaaagatgcatgccattaaaagtatgaatgacttcaatacccaaataataatgtgtttatcccaagtgtttgagagagaaaatgttatttaggtctgaaatgagagatttgatgatggagggatggtttctagtaactagaatatcatccacatgggccaatacttgagtagtttgaccattggagaacctgaagaatagtgagtgattttctatagaggaggagaacccaaaggaaatgtgtaataccctggaattaagaaannnnnnnnnnnnnnnctaattagataattgtgaataattgaggaattatattattatatagttcaatttatgtga

SEQ ID NO: 18106 - DNA, 5775 bp, Cannabis sativa
tctttaatagtactcaacgtacattacaatatttgagatcaaagtagcactactttattttttcgagttcagtccaatgtgagtgctgatgtaaatttatatgtatcaaaaatatatctcttttctcttgtcattgatgattattttatttgttgaaatttgacttatgttgtctagctagtaattagttcaaatgtttttggcaatgataaagagcagctggaaactagctgtaacacaatatttactgctttgcaaagagttttctttcaattaatttttataactatacaatattttataaatataaaaaccgaaatcttgttatatatttgtaatgaaaataatgataaatattattatataagaaataattataaaacaaaattgtggggtgcaaggaagaaacaaatcagacaaaaaccgatcgaatgccattatttgatatggaagctggtgccaaacagcataggctactttatataaatatttgtaattgatttataatatatagttataggaacattaaaaggagaggtcagcgcacttaaatcaaggaagaaactttttttgtcatatatgtaatgcaatctctcctcgtggatggaataagaacctgagttttatattgaccaaattaaagtataattcattaactattaagattttaattttaaaaaacaaaatcttaaaaacacaataatattaataaacgaaaagaaaaacaaagtgaagcagttggttgctttctcttatcctaatttatacgatttggttcatgtgtttgatgcttttctttatttaaacccatcaaagctacttatctcaaatcagcagaaagaaaggacaatatatatttaaataaaaaaaaataaaaagatagagagagagagaaaaaaaaaattatatgcatagaaaaagaaagaagaaaccaaacagaaaataaagtaaaagctgcacctgagaatacccttttattcttgaaaaaataaggacgtagagagctgtatattgataatataataagcaaaccatgcattatatatatcgagttatttattaagtttaggcatatagaatcttatgattagcaatataacaacactaataataggaaaatatagatctaaagaaattaagagcatattagtacctggaggaattactccaaagacttgtttggtagtccatttgatcaggttgtaaattagaccgatcgggcggtcctctttggtccacatattgagtacgtaaaccaccagtactatctgagccgctcattccaatctgcgacatttcatcctctccagacccttctgattgccctgatattgttacacatatgttaaccaaaagtatattgggtccaaataattacgatagagtactatacttcgaaaacaacccatgtatgtttttattatgtggaacattatatatatatatgtttgtaaatatatgcatcatgcatgtgcatacatataatgtatcatgtgatgtggcatgggtgattgatgtatgttaaggagtacttaccttttgcacatataggcagcacacatttatgtatatacatacatatatttaattatttgtatatggagtataaaaacgaagacgataaagcctattaatttgtaacaataagagaagaaaaaaaagctaaggctgtaaggggctaaaggaaaaaggtgaaggaggcttagcaatacgaattacctgatgaggctgcaggcttgtcagtagtcttaacagttcgatacatctgcaatttaaaacactaattaatatatatgggatgcatttactatgatatacgcactttaaatcaatatttaattaattcatatctacatgtatgtactttgaaaaaagaaatagtaataaatacatgttatgtaacgttcttaatttaccaaattgaagaatacatctacagatacagataccataaacattaatatatatttatattattttattaatgtgttctcttttattcattaatctcgaggtacgtgaatgctgaatataatgtagtactaatggagttagtattattgcaaaatgattactacttttgtcccttatcatcatgatctacttattaattgatagactacaattacatttacattttcgtttttctttttttggtctgaaattaagcagacgctgtctgtctggactggtctggtctggtcccagtagttaaatgatcgagctataactatcagactcatatttatatgaaaatcgctcgctatatacgatccaatatatctcgttaaattcattcatttattcattcactgctttccattggcaactgtgcccgtgtgatagaccaaaaccgacccacatgaaagagaggagagagaaagagaaagagaaagctgtatgtaaatgtagttcaaaatcaaaaaaaatgtatacacatttcatcattaatacctgtaaatggctcttaacatgagctaaggttagatctttaacatccatcagctctaggaccgactttggagtggctcctgattattatcataccatcatcatgatcaatcccaacttaattattcagaaatcaaattaacccaaaacgccaaaaataaaaataaaataaaacgttaaaagatatatgtacgattgatattacaaattagacaaaagacaaagaaattaaaatgagaaaattaagataatataataatgctataacatactctcatggccgccaagaagctcaacggcatggacgaaacgggcatgtagggtgcttgtccagcgcattcttggtgccctcatactccgcttagttggcagtttcggcaaaaatctagctctcatcgtcccatgagagctaatctccgtctgcccgtactgattgttgtggtgatgaagatgattatgatgttgatggagttgatgatggtggtggtgcagctggttattggctgatttataggcctcggctgctgcagctaaaccattaagccttgcagctctataagcagctactgcagccatggaagacccatttggaagccctggtgagctcagcatcgacattggatccaacccccctacccctccaccacctcctcctcctctactgccaaaataaggggtcgctgtcgctcctgatagtgatggtgccatttggtagaagcacatcttgggatccttaacatgatcaacaacccttgtgttatcagcagagaagaaaggaaatgagcggttgtgatagaccgggatacccttaataggacgaaaagcatcggccgacacatctagaagcgaaaggccaccaccaccgccaccgcgattgattgtatggttataaagatggtgagcatattgaggatggtgctgttggtgatgatgataagggttttggggttggtccccagctccgttgagattactaccactactgctgatcaagcttaatctccctaaagagaggtcggtgtgtgctttggaggtgttagtagtagtcgtagtactactactactgcaagctgttaaattgttgttatctgcttcccttcttcggcatgagagatcgagatcgaaccttgcatcatcaagggctgcggcagcagcggaagaagagcaagtactcgtagtgttggggggacttatgttgagagaaagatcaggaagtactgttggtgttgaagaagatgcctcaatgaaaatcccctccaagggcatatttttccctgccgtcttaactaattttccgaatattttcactaggtttcttttctttcttaattactccaacttgatgaggaagacaagtaaagaaagaaaagaagaagatatattgatgaattaagtgagtgggtaccggtctttttcttttcttttctctttttttttttgttggttgatcctcttttttttcttttgctttatatatatatttatatcttcctctaatgaaatagaaagatggctatcgctagctcaaagttagggatgagttaataatggaggatgaagagaattatgttaattagaaaaacagaggagaataaaagaaaaggtatttggacatatagcacggataatgaaagagggatagatgtgtggatttgttaaggcaaagaactagggaaaataacaaaaagtaatgaaatagaaagagagagagaaagatagatgaagtaggggatttgggtatagtgttcctcctcgagagtatatctcggaaaatgacactagaagaagaagaagaagtagtgggagtgaagaagagcacaaggtctaaagaatttgtaaaagagtcaaaccccaaaaaatatagtcactttggattttgccttccccggagacgacgggataaaaattgttagaccgagaaagacaccctcatgtgtgattccttttcccccactctcttcgcttcatactctctctctcctttaatactttttatttatttattttattaaaataactggctttactattcttatattaatttatgcttatatatggtggcagggccaggctacgtatattggagcgtaagtaaaatttccttttttttttttctttcatcatttttttttctcaaaatctcacgagatgttgaattttaataaaatatactgattttatattatatataatacgaattttagtttgatgggggcagacccacccattgacctcaaagagaaagaaagagatcatcagatgaaagagaaaagccacaaagggttttttgttttcttccttatgtacacatcgtaaaccctaattccacaatattattattattagcttctaattccccttacatcctcccaaatattcccttctaatctttaacaactttgtctggcatcctgggttttattatgttttcctccacatgacccctctccaaactccaagctcatcactctatctccaagtgcttggttttcaaaaccctaggctcaatcagtgatccatataatcatataataatgtacatgcaattaattgtagtgttattggaaacttacccactttctattttctattttttatagaatactttcaccgagataacatagtagctagctctaggggagagcgaagaaattaactagtactgttttcatttaggtgtggtgtttggatacctcattaaatgcaaaattgggtaatagtaaatgcatgctgtttgatttttgatttctaggaagtaggaacacgtttactatagaccatttccccgttttacaagtacttgagagagagagagagagagagagagagagagagaaaataaagagtaaaaaaaggggtaaaaatgaaatgaaataaaaaaggttgaagacctttagttgtgtgtatagtttttggtgcattccttttccaacatgtacagaagagaaaagtattcttcaactaaatgttgtttggataaatgtgggaaagtattgatgtgtatatttcatttccctcgatctatactcttggggtttgtaccaaagacaataacaactcggtaacgccactaatgccctcatcaacaacttgttcgactaattaattaacctaactaattaaagatcattgcttaaggtgctccttacaatttttcctaattaaatatcatatcgcaacctcatctaattaagtttatataatttagtcagccatttttcctcttaattaaaaatactccatttattatcagataccagcttattagctaattttttaaattgttttttttcttgtagcccagtactattaatatatatatat

SEQ ID NO: 18107 - DNA, 5949 bp, Cannabis sativa
cttaattttagttgttgcactatattgttttccaataaaatagattaaaaagtttcatgcatcactaacctgtctggtcgatacgttctggaagaagcaacctcataaagtctgtggcccataaccaagctagaaaaatctggccatccactagcatcattgttaaaaccaggaaaaaaggcatctgcttccactgaaacaatataatcaagagcatcccaaagaagtcgatgggcttgcattcttagatccacaggtgaagggtcaggttctgtttcagtctcagtaatccaaccataccaaccttccttttcatgtctatagataggtctatctggagggggaggaagaggacgaggccttggaccagctttattccattcttcttttagtttctcccttttgactggaggtgatttaaagagatcaagtggaagaggtgtttcaggtccaaccaaatcagacagctctgcttttgtacacaaagaagtgcgatctactaagttagcaaacatggcacgcaaagggatcagaacccgttgacctccaaaaatttcagaaccagcaagatatactatggttttaggaggataacccattgcacgcagcagaattccaacctgtaaaagtttaaacagctacttagctcaaatcaaataattaaagcgaatctagattggtttcagcaacagaaagggtaatgaaaaaaacaatcatagctcagaaagtaaaggcaagcaagcatgactatatattttagcatgaggcccacttcaagaaaacaacggggaaagtgaaggaacacgagcatagctactacatattccatatctgatatttgatcacttagatgaattacactagtgaaactgaattaaattgtgctaatacataatctcctaaagtaacatattcatacatctgcagcaacctatctagcatggcttgtctcttgaaaacattatttggtacagaagcttgtctgtcggcaaggagtttggagggttgggtacatgcaatattctatacggtaacaaaaatttaattatgaaatggctgtggagatttccctgggaaaaaaatcacacttaggcatacatatatttattgaaagcaagtactttctctctgtaaatgggtgggacagttcagtatgtttgtttattcttcaaatatatcacttttaaatcagaaaagggagatgcaattagattttgggaggattacccatggtagatagatgtccttttactgtacagcgttgttgcttctcataacatttctatagcagtttgcaatgacatgggaaaatgaggagaatagaataattctgtagggttctaaagtttgtttgaaatctgaatgaggaagattttacagattgcagagttaattatggtattatatgataacaatttctatttagagcatcatgtaagaaacacacacacacacccaaaaaaaaaaacctactaaaacaaatatccagagatgaattccacttttcaaaaccttggcaaataatatcttaatgcaaatttcatgaggtaacaaaaatctcaatgcaacccagagtgttgtaacctttggaacaaacagcagaataagagaatttctataaatagtgcatcaatgaagtgaaagattttaacaaagcatacctcttcaggcatgagtgggcatgaaccattttctcttcgcatgtgagaatcgatgcttaattcttcattaacaatacctcgtttaatcatttgtgcccttcgatattgtatgagttcggtatgaacatcctaaaagatatactgtgttagctagaaaattttagaaacagtagtacaaaaagtaataccactaatgaggcccaaaagttagcttcaacacccaaatgtgatgaaacttaaaggaaacaaagataagtaaaaaacaaggaaacaatgccaataagaatataaataagctcactccgcaggttaaactaccaatggactcaagcctaattaacatgtagtgaaagtccagagtgtgcctaagataagttgatcataacctgatagggaccactgaacgtgtaggaattatgacatgaattatatcatcccaaaccaaactgattgtgttatactgtatgcaacttaaagttgcatcgctgaagatgcaaacttaatattgttgcttacttatttcttctccctagagatccagaaagtactttgatcctggaaaaaaaacaaaataggtttaaacagctacctgaaaaagttctgcacaaccattatatgccaaggtgtctctaattaagccaggatgaaaaacaaggaaaggctggccccatgctcgtaacctgtatgaaaaacaatataaggatattgagaaaaataggagaaattattacatagacattcggacatacaactgtcagatgtacttatgaatcgtgaaattattccaggtcaagtaactattttatattacatttgatctctggtagcttgcaactcgatgagccaacctacttaaaagtacttcgtcaatttcttcagatattatttcagaaaacttacagcagggtttagggtgtcattggttggcaatcgatgctcttttattattcttttattagtctaatctccctgcaaatcaaatgattcaaacctaggaataaatcaaactaacttgtagaaatagcactcatttttcaaactaaatataataactcctatgtcctttgtgcaccaactgctttttgtagaaaattactattctgagtaagaaatcctacaagacctcaagactatgtctgcataagttctctacataccaatatcttgccaagtgcattcaaatcttagcaagagaggttgaaaatcatacctatctaccatgaggtgcccgagctccctaatttcaggtcggaattggagagcgtggaaagaaactctgcatctaagcctttgaaactcagacatgctagatggaaggatagactgaaaagaggaagcgatattaatttttataagaagcagaaaaaaaaatactaataatacgactagtaagagaacaaggttcatccaaaattatgaacttaaacagcaattaccaatcatatcagtaaactaacaaaaaataaaatcttagtttaaaagatccaaagataagattgttcctttccaaccaaaacaaatagccatagtggcaaacattccaaaggttttgttctttcttctacagttctatcacctttcccacttaaaccctgagtcaaattaaaacaaagaaaagaaagaaaaaaaaaacatcctacattagatgggaagttcctattgaccatggaaaggccttgtacatgaaaggaaatcatttcaacctatgtcaatgaactactattccccctcctcatactgttgaccaatacaaaagcatcatcaataaaagcatgttttggtaattgtttaccctagaaaacaagcaacctgatatggttaatagattcaacaactactttttaaaatgatatgacattcacaaatttgagatgcacactacagataggaattgcaactattgtaggaaaattacttccaaatcattgcagtaaatccatggtagctaaagaaacacgaattatttcttggaaaactcaatgacctttgagagattataaggataaattacctgcagacatccaccatctgtaataaccaaaccaataactttggctttctttaatgctggtagcacttctttaagatagaactttggattcgctgatcttttgggcttaaaagtaggaaatgcattttttttcctggctgctttcaaattttcaggcaagctcttaacaatgagtatgtcatttgtaagtgatgctataaattgctcctcgtcatagagataagagaaactcttgaatttgttgctgagtaaatattgaataagaggtaaagtgcagttaatacgaatgatttactagatttgaaccaataaattaaataagcagggaaagtagcattaagtacctgacaccttttgagcgtgtagtctcttgaatctctggaatgacaagagtagcatttaaaagcctggatatgatgaccagatcacagatctggaagattaacaaaaatttaattaactccaagtagaaattgtcctacagatgacttacacattaattaaaccttaccgaagatcttatgtttgcaaatccaccaaatatttttgcataaatgaaaccgttactttgtttatttggtactgtaagaaaaagaaaaacaatccattagctaaattctctaatagtcttccctttaccaaacacagcaagaaaatattttcaactaaaacccagaatgacatagctaaaaccgattcagtatcattgcaaatcctagaatgtttgatgtaagatagaatcctaaaatcaacaaataaaaagggtgatagaaacaagaaagaaataagatatttgataaggagcatacacaaacacatgtgtacataggaactctttaaaatttacatgcataagatagcataagaaataatcgaatcaaacaaaagtttcttcttaatggatagtatctgttacacacaacaaattcaactgatggaggagtatcctaagagaaaatcttaccaaaccatgacaattgacctctcgggaaaggcatactctcagaaaaatattgttctagattacatttaatagtaagttcatggattcattaaacaaagaagtttccaatgcattggactctactcgatactgataggagattcaattcaattgggataaacttaatcattatacatgatttataaattgtatcatgctaaaccgtacaatacgcaggaaacaagaaattctgataatagtacttgcaaaagactttgtcaccatatttgctaaataattaaggatcataattctcagactaggcaacttattcaattatttttttctttttaacaataataataactaattcatgaacgatagtaccaaattcttacccgcgtaattgcttctagggttggcataaggctgcaaggatttcagtggcttcacaacaccccagagtttcttattccgatatttctgttccaatgtatcaaacattcccataaacttatatagacaagaaaaagaccggaatttgaacccatacaagctagttgaaattcattgtaaatcatcattcgcatacctgtcttccaaggatagaagcaaaatcatcgcgaaacccggccagggcactgtactgaaccaagtcgacagaggaagaccttgcgatggagagatggcgaatcaaagacacaaaagacaagaccagaacaaacagagcaatccatttgatcttagatttgaataccatctgggcaaagaaataacgaatttagaaaattagtcgaatcagaaatggagataaaaaaaaaaaaagtacacaaatttcagtgacattctaaactcacctgtggatactggattagattatcgtagatcgacaataacaagattaggccttgaattcaattaatctagtgccgcatatacatggagaagaagaaaatgaaagagtagcagtagtggtaccattgttgttgtaagatctggttttggttttgtttttggatttaatttggattattcaattctatattccaatggatttagttttgttgttgaaagtttacttataaaatatgaatttcaattgttcactactcaaaacactatttcagtattaaattattgggtttttctttttggcaaaacaaaattagtttttttttttttctaatcaagaaaatactttcctaacaaaattagtttttagtgcagacgatttttttttgggaaatttgaatttgtatgcttgcatttaattaaaatttgtcctcaaaactcataataccccatattttaaatatatgaccattttttctatt

SEQ ID NO: 18108 - DNA, 4642 bp, Cannabis sativa
ttaagagtacctagttagttagtgagttagttatctgttagttgggttgttactctcctctaattgtttttatgctgctttctgttgctggttttcagctgtatataagtgtttctttgtaccattctatcaatcaatgaaatcagccaattctctctttcttctcttttcttttctttctctggtttgcttagaattcaacatggtatcagagctttaatctttcttgtcatggagcaatcgtctgcaaacaacaatggaggttcgttgactcctccaaattcatctcaaattcctttacctaaaactaatcttgtttccttctcgcactctctttcggttcgattggatgaatttaactatcttccatggaggcaccaagtcttggctgcaatcaaaggaagtagattacagaaatttctcgatccgaaactcgcaccaccaaaatttctctctgatgaagatcggctgcaaaacaaagtgagccctgagtttgaggactgggagcagcatgacaatgttctcgtctcttggcttctttcgtccatgtccgagaaggttctcacaagaatggtcggatctgaatccgctgctcagatctggcataatcttcgtgagtactacacttctctcaaccgagctaagattggccaataaaaaaccctcctccgcaacaccaaaatgcagaactctctaagtgattatctccttaagctcaaaagcataatcgatactcttgcttcgattgggcatcctacatctactcaagattatattgaagcaatctttaatggattgcctgccgaatacaatgtattcattacatccgtgaataccagaaccgatgcttacagtgtgcctgagatcgaagctcttttaatggctcaggaggttcagttggacaaagctgctaaggagcttgatattgccaaaagtgaggccaatcttgctaatacaaaagctcaagctggcagaggaacaacttctccatctccaaatttcccttcctatggatcaggcaacatgtatcgaggtaatccttcctcgttttctcaacaaaattcattacaatctggatctttcttgtctgtttccagaggttcaggtccttcaactcgtggtcactttggcaacttcaaaggaggagtttctcgtggtcgaggtatttccaccatttggggacaaaaacctcaatgtcagctatgccacaagctggggcacacggttcagcagtgtttctatagatttgataagtccttcacaggacccgaatcattccaaaacttcccaggtcatgttaatgctaatatagccgaaatgcaagcctattatgcaacatctgaagtgattaatgatccgaactggtatcccgactctggtgctacaaaccatctcacaccaaatgaacagaacttgaccaataacagcagttacacgggtgagcagcaggttcatatgggcaatggcacaggtttgaacattcaaaacattggtcattcctcctttgtgtctcctttttataatcaaactcttgttttgaataatcttttgcatgtgcctaaaattactaagaatcttctcagtgtatctcaattctctaaagataatggtgtcttttttgagtttcacccttctcattgtgttgttaaggaccaggttgcttcgaagattttacttgttgggaagcttgacaatggtctttacaaatttgctccaaatcaactcaacattctgtccctaagcaagcaggaaccatcatcctcttccaatatccctgatgtttccactgttgccaatcaatgtaccttgagtcctctgtcaacacaatgtaattctaatacactgtcaaattcttgtaatacttttgctttatggcacaaaaggttgggtcatcctcaccataaaatagttcaacatgtactcaactcatgtaatattcaaacaagcaataaaaacattaatttttccactcaattatgttctgcttgttgtcttggaaagcatcacaaacttccttttccccaatccaccactgtctatactgcccctcttcaactcttgcattctgatctgtggggtcctgtcccaatcacctcttctaatcgatattacattagctttgtcgatgccttttcaagacacacttggatttacatgttgcgaacaaaagatgaggctctctccaccttcatcactttcaaaacacaagttgaactccagcttggtttaccaatcaagcaaattcaatcagattggggaggtgagtaccaagcctttactcacttcctacgacaatctggtattgttcacaaggtttcatgtcctcacacccatgaacaaaatggagttgttgagcgcaaacatagacacatagttgagagtggtttgaccttattagctcaagctagtatgcctttaaaatactgggatgaagcatatcgagctgctgttttcttaatcaatagaatgccttcaccccagttaaaccatctttcaccaattgagatcctatttcaagtcaaaccagcctacacctccctcaaagtgtttggttgtttatgctacccaaacttaagaccctataacaaagtcaaacttcaatttagattacaaccttgtacttttttaggctatagtctagctcataaagggtataagtgtttgtctaaggaaggaagggtctatatttctagggatgtgctttttgatgaacttgtgttcccctttgctcttgaagccaacaccaatcagacctctcgaaccactacctctggttttcctcatgtgtctgcctctggtgtccctccaagacttagctctcttggccctcctcctggcttctctcacccctctcaacccacaaactctgttgctgcaactccttgtgccaccaccggtctgcccaatgctcaaaattttggtttttatcctactaatgtggtttctacagataattttcctacaggtgcagcaactgaagcttcagctcaacctgtgacagactctacaccagctgctatacccgtgcctgccactataccagcctctactggtcctatctctacacctgggttacattcagatccggttcccccctctggaactactcaacaaccggatgttgtggtcagcaaacatccaatgacaacaagggccaagtctggtattcgaaagcccaaggttctaatggcctccctcattccagcatctgttaaaagtgctttaaaggatccgaaatggtttgcagccatgtctgaagaaaacacaacattaaagaagaacaacacttatactttggtccccctgcctcctaaccgtgagcctattggttgcaagtgggtttaccgcatcaaagagaatgctgatggttcagttagcagacttaaagctcggcttgttgccaagggataccaccaacaagctggcttcgatttccatgaaacatttagcccagtagttaagcccgtgaccattcaggttgtgctcacaattgctctttcaaaaggttggacggtttgccaattagatgtgaacaatgcgtttctcaatggggaccttcatgaagacatatatatggttcaacctcctggctttgttgatccagacaatccaaccaaagtgtgcaaactacataaggcgatttatgggctcaaacaagcacctcgtgcttggtttgaaaaattgtccattgttcttcttcaactcaggttcacaagtgccaaaaccgatcagtccttgttcaccttatatacctctactggtgtcatctatgttctcatctacgtggatgatatcttaatcacaggaagtgattcccatcaagtttccaccttaatatccaatctcagctccaagtttgccttgaaagaccttggcatcatggacttctttcttggaattcaggtggttcctactgcaaatggcattgttctttctcagcaaaagtacattcaagatatcatatgcaaagctgaaatgcaaggggtcaaaactcaaagctcacctatgaatagtgggcttcgactatcaaactttggcagtgaaccggttactgatgctacagcttatcgatctttagttggggctcttcaatatgctacaatcactcgacccgacatcgcctttagtgtaaacaaagtgtgtcgatttatgcaatctcccttgcaatctcatctagtggttgtcaaacgcatcttgcgttatttagctggcactctcgattatggtttacacttaaaatgtcctacttctatggatcttgaagctttttgtgatgccgattgggcggctgatcctgatgacagacgatcaacaacaggctattgcatatttctaggggcaatctcattggttggcagtccaaaaagcaaacaacaatatccagatcttcaacagaggccgagtatcgcagccttgctgctgttgtcacagagatcagctggctgcagtccctcctctctgaactgcaccaacagtcctcatcaccacctgttatatggtgtgataatctcagtgctgttcaactctcggccaacccggtgttgcatgctcgaactaagcatatagagattgacatccattatgttcgagacaaagtaatgggcaaagaaattcttgttcaacatgttcctgctgaacatca

SEQ ID NO: 18109 - DNA, 2501 bp, Cannabis sativa
aagttaagcagaactaaattaaggaactttctgcataatgatacagttgcaccttgcaagaagaatcgtaaaactttgaacatcaaaagcagagagattacatactctattgttccaataaaagtggtgcaggcattacgagcatcttcttggttttgtcttaaataattaagagttcgggaaagtacaacctcctcgagcagttcttctgatctctggagcatagcaaccacaaaagattgcaacagtcagcagtaaacaaagcctattaacataatgataaaacttgcagaggtatgaataaggtcttgaaagaactctaaggtgcattgatgaatacttgccaaggtgataaaaaaactggtttaaaacaatttttttttataattttatacatctgtgttgtcctacgtttacttactatcaatagtcttattaattgacaaaaccgttgcaataagttatagataggcataccttttgcacttctccattaactctgaagtctccatctataggaactattttgcagacataatttccagccataaaagcttctccaaacgtcccttctccaattttaatgatctcctgtggatcactaaattaaaaaatatacatattaaatatcataatcttgtttgtgaggtaaaatgcacaaacagatatgataagcaaaatagcctaaagacaggtcacataattattaaaaaaatcatattaattaaagcctaaaacctcaagcactctgacttgaacaattcaattaaaaagaaaaacaaagaaaagtcttgactgcaaaatatataattggatgtcaaatgacagagagagaaaactggaggacctcaaatatcaccagagaactattggatatactttcaagatacctattatagttaacatgccatatcaaaaaatattccttctctattgaactaacgacttagcttgtcatcctataaattttttgctacttagagagtactatgctataaaactagttgtaggacctaaaatcagaatcattatgcaactcaaacctggaccctgagccaggactaagaatgaaaatatgaagcttagtaagtgattactacacaagtcatacataagactgctgatgaatccagcattctgttttgtgtacattggtttgcaagttgaatgttactatcatttgtacagccatgaaataataagaacacaatgaatgggaataaagtgttaaaaagatgttagccatgttcaattggttccaattttttagcttttaataagacacaagtaactgctacacctatacacacatatgactatataaagagcaagaaacataccaatattttgagaaaacatcctgaaacttagaaggcactgactgttcacacactgctaacagtgtagcaaatggattaaattgcaaagcatctgacgaagaagttgatgctagtgacagttttttgactgaagcttctaattcttcaaaactctcattgcccacgtcctcaaccttatgtgatgtgatctcagcacaaggcaaacgagaagtgcctttggcagatgacttttccggagttttcatattttcagggtcaatgttaccacaatctataggttccaacttaacagatggtgttcctagaatctttgataacgtgctcgaaggtccacaggagtagttcaaattcctacagattaaccacttgtttagtcttgtggacagatgtgttaatgcaacactatcagtgttgttggccccggcccatgtgccaaaaactttgggagaggggctctcctccaataattcaaaggcatcaacctcttcaaaatacatcctctccatctcaaaattttgaggtttaaattgttttccctgaccacaaggacacaagatagtataaatacatggttttcacaaacaaaaaaaaaagttctcaaatacctttatccgtttagaatttaaaacatcaaaacttctatgataatgtcaaccaaaacaaatcattttgatctacctcttgagacaactgaaagcaaatttccttgttctagatacaaacagttgtaccaaaaacgtaaaaaaatatgattcaattcaaagttgacaaaatgcaatttcatgttggacactacaaacaaattactacatactaacaaccactggcaatacaaagaaacagcataataagagtagcgaaatcacactttgggtcgaggaggctttccctttctcttgcccttcttaggttgtggctggtgattaatgcaagtgccaacggcaatactagtccgacctctgtcaagcatacaatccaataataaaaaccacaaatggaaactatatatctaataaatcattaccctgaagccaaaatcagaaacgatacaatatacagacaaataaaaatgaagaaaatgggattttttttaaagcataatctcaaaagattatggtgacaatggcaaataatgtgtatcgccaaaacccagttaccaac

SEQ ID NO: 18110 - DNA, 13284 bp, Cannabis sativa
gagagagagagagagtgatagagaatccatggagtgaagggggcagttgtgcgagagttaaggttattaggtttgatgtgtattgggctgaagcccataattggttttattttattttttttatattcttttcataaatgcaatttttgcgtcggttgtccactggcgcaagttagcatcagtacaaagctgacgcaaattagtgccaaaaccaacgcaaactcagcgtctattctcaagcgacgcaaatttttccgattaattttttgcgtcagtcttgtaattttaatgacgttaaaagcgacgagaaaactaatttttgtagtagtgcatttacaagcacaagcttactaaataagattgacttgtggactaatgctagttaacgccccaaccgtgttaaaactatttttctcgttttatactttcttttaggggtattcattggaccacatccatgatttttaggcatatccagatccgattcatatatatatttgatgttagattttaccatccgatccgatccaattagtttcagttatccaatcgatccagcatccattgaatgttggattggatcggttctatccattggatgtattttatatatatatagatatatttattagtttaatttgagtttattcaatattttagacctagtattttttttttagatcggattggatccatccaatattttagttccaatatgtactggattagactggatccatccaatccaagaataagagtaaaattttaatgttaatttttatatatacatagagattttacatataacaatataaaatctaagtactcattcaaactaaatgaaaatactaattaatttgattggatgttggatgtattggatttttagacaccgcatccaccatccgatctgattcaattggatatttaaaaataacatccaatccgatccaatcacaattggatatccaatgtttgacggtcagttgtaattggatcggtcggttctcattggattggattgatttatgcacaccctctattgattgtttattcttcaatttatattatattttattttgttttcaaaaatctcggtaaacagttccaataaaatttaaataatgccttaaatttacaaacataaataaaattaagtgaatattactaaacaaaaaaaaagagttaaggatatataaattaaaacctaatgggatttagcctcatatttcataaaaaaaataataataaaggactaatgatatgttaacaaataaattacacacaaacttatataacacttataaagtgagtccttttcaacaactgtgatatattttatataaaaatgattggtttaagctagaaaaatactgaggtaccaagcactgtataagtgggtgcaattcaatatcgagtcctccacattttgatttaataaataatataaaaaactaccaactacttacaacacgccattggtatgatgttaggcacattgattgatagcaatgctctacaaaataaagtgagcaatatatcccaaactattctatgaaagtcagatattggtggtcatacagcagcagcgttcctgtaagggccggccgggcgaggccattaaacaattcaacttcaacttcgtgacttaccattttatttctctcgtttgactaaacatgctttcttgaataatgcctttcctcattggacgatcgcaatgagtcacattttttttcttcttactaaatagaacaggactgagtctcattttctttcattttcatatatgtctacctctaatccgaagacaaaggggcttagattatttacaaatatggagtattataattctcattgataaagactaattacctaactataatataccctattctagttcctatacctagacttatttgaacgcggaaacagaatttatagagacaaacatatgcataacttaaattattttcattgtcaatattttcttctttattcataatgaagataatcattatcattatcatcatcatagcgtttctcattcccaatagccaaactactaacacaagtagctgcctggacagatgtggtgatgttgaaataccgttcccgttcggcagtggggaaaactgttacttggaacccaagtatttgatcacatgtacaaactcaacagcatacctcactgattcaactatcattgtagaaaacatatcccttaaagatggtgagatgagtgttatgcagttcgtgaccaaagattgttacagcaaaaaaggcacacccgaggccatcaacccttataactccatctggttgtcagatttcaccatttcggctaccaaaaacaagtttgtagcattaggctgcgacacttacggcaccatcgtcgcctaccggggtaacaggaagtacacaaccggctgcatatcgtcgtgtgacaaaatcgacgaggatcagttgcgtaagtcttgctcgggtgtggttggttgttgtgaaactccaatcactagtggactcaaaaatttcactgtttggttgtctagtttctacaatcatacttatgtttgggacttcaatccgtgtagttatgcctttgtggttgatgaatccaagttcaaattttctagttttgaaggtttgaggaacactgaaaagcaacctttggtgcttgactggtccattggggtagtttcttgtgatgaggctgtgaagcttactaattacagttgcaaagcgaatagcaagtgtgtcaactctaataatgggattggctatctttgccagtgtttgaatggttaccatggaaatccttaccacccacaaggttgccaaggtatgtatcacaatctactactaactatagtacattttctcttactcttttcgcttacatatgtttttgcaattgttgtcattaaggcaaatataataaaaccaaaatatagaaatacaaaaggaaccaacaaaaaaaaaaaagtcaaagtggaagaaatttctaaaattacatatttggcaacttgtaattaaaatcggaattttatacacattggcgacaacgatgttccagcttgttttcatatatttaccatttttttacttattttacagattttattttcatacagacaacctaaaacaacataaaaataattttaattttgtgaaaaaaaagttatgctaaacttcttaaaatttttgggaatctatgaaataatttctattttttttttttaattattgaggtttttttttttctttatatataagtcttttaaatatttatttttcttttttacattgtttactgtatctctctcaaatcgaaaaatctaaatgttccaatcaagaaaacattttaccatctacagaatatcttgttagtttccctccaaactaacttgttactatctagggtaaccaataagaaaacttataatatgagtaactaaaatataataaatgaaagtttattagagttaatattttaatatagtagcgtgttgtattgctctgaaaaattctactcgaattctgagatatatatatttcgataaacggatcgattctgaaatacatgtgctaccaatatcaaatataaaaaatttatgtcatttttttattctatattgtataagatgtcaagtcaactgaacataaaaatgttgtgaactccaaattatcctcattaattgttatcaaattatacaatttagatattgatgagtgcaagagtattactagtctttgcaacaatggagaatgtcgaaatttacccgggacttggaaatgtgaatgtccaaaagggtttctgcttaatgctactgggacgggttgcgacaaagatttcaaacaatctcacaacaagagggctgtcattctatacgctgcacttggtatgtataaatattactcatctgttactttctttttttgctgtttttttttttgaaaggaattcattaaacaaaccaaacattaattacaaaggaatagacttgcccatctcaaagagattactagcaacagaggttaaacccccattcaaccaagaagaagctttaacatctaataaagatatcttagctaagcaatgagcaactatagaaacttacaatgctgcacaggaagaattaattaagataaacatatatacaacactctgactaaatgtccacaagcaaaatatacaaataaataatgcccttgttcaaactgtattatatagtatttaaacaatctaaagcaataattagtttaggaagcttggcatcagccgccactttaacaaccctgttgatagcccacaattcaacagcaagggggcttcagataagagtcctacaaaaaataaaacacttcatttggtgatgcctgttaacaactaattttgttctgttattttttttgttagttgttagttaaaagatagttagtcgttactttttgttttgcttactatgtgtaacagactctcagtataattaaaggcagggtctaatccttaattagcttttgctgtgctaatcatgattagtacaatttttttttctctgtttttcttgctctattttcattctgtttgtgttcttacatgtatcattcatccatgtcgtcttctatggctgatcctgcttctgcaacaatggctcatgccacgattcccactgctcctcctgctcctcccactcaatcatggaatccattttccaattccctcacatcctctctcactctcaaactcaatcgactcaattttctttcttagaaatcccgtcgttccagtcgtgataggccacgatcttgatgaaattctcttcactgagttcccccacccccaaaatcttatcaatggtgcccagaacccagagtatgctcaatggagaagaaaggatcaactcctcctttcctagttacgatcatcgatgactgaatctattcttgcatctgttgccaactataataactcctttgttgtgtggcatgctctggaacaaaagtttgctagttaaaccaaggcacggcttcttcaacttaaaggccaattctctaatattcaaaagggaagtctttctatttctgaatatgttgataaaatttaatccatttatgatgctttaagtgttgttggttcacctgtcaataatcaagatttgattttacaactcttaaatggtcttagaccagactttgattctgttgtctcgaagattacatcaagaagtgatgccttgacaattgaggaagttcaagctatgcttctttctcatgaaagcagacttgaacatcatcaatccatgacaaatctttctataaagatgtaggctaatcttacccttggcaatggcagatttggtggtgttcgaccatatgccaactccaagaacaatcaacctgatgttccccaatcctcaacaggtcgaggtagcagttatcctcaatacaatcctcaaagggtgattcgtcaagtgtatttcagatctggccatactgcaccagtatgtcattgtctctttgacaagaattgggtggttcctcaaaccaacccatatgcaacaagggcacaccttacagaggtcaattttgagtatgattcacaagcctactcaatcaccttggttcaagaatttaatgatgattgctgttggtatgctgatactagagctattgctcatgtcactttcgatgccacgaatcttgacagtcaacacgcctacactggaactgaaaccttagccgtgggtgttgataaaaagctcttaatttctcatgttggtcattgtacaattcaatcttataatccctcatgccctcttcaattacaattttgtgttataagtgccctcaataactaagaaccttgtgagtgtgtctaagcttgttgatgataatgacatctttcttgaatttcacaaaaactgttgttttgttaaggacaagcaaacaggagcacctctcaaaggaaagtgtaaagatggcttgtatatgctaagtgaaggaccagtggcatccaattcatttctgcaatgtcaccttactactgcttctagttcagttcagactacctattgtaataatcaatctataaactgtactgacaacaatgatgttattcactataatcattccaatatcaataaagactattgtcaattttctaagtatgttgcactttatgcttctccatttaatgatatcaatatatggcactgcaaacttggccacccttctttagctacattaagcaaacttctgcctcaattacctcatagtggctcaattgaaacattactgttttgtactgcctgtcagcaaggcaaaaatcacaagctcccatttcttcaagtcatgccaaccaacctcttgaacttgtccatactgacttgtggggaccttctcacatacaatccaaagatggattcaagtactacatctgttgtattgacgattacagtaggttcacttggatttacccatcgtcattgaaatctcaagctcttgagatgtttctccaattcaaaagtatgactgagaaacaatttggtttgcctaataaaaagttgttcgagcagatggtggtggtgaatacaaaccatttaagaggttcctaaatgatcaaggcattcttttctctcatccttgtccacacacacatgaggaaaatggtagggttgagaggaaacacagacacattgtggagactggacttacacttcttgccaaaagcaacatagatttttcctactggtggcatgccttttagtatgcatcattcactatcaacaggctgcctactagtgttctcaacaatatcagtccctttgagtgcttctttgcatccccacctgattataccatcatgaaaccctttgggtgtgcttgcttcccacatctcaaaccctatcactctcacaaaatgaacttcaagtctgaacagtgcttgtttcttggctattccttttatcacaagggttacctatgtgaaaatgctcaaggaaggatatacattgcaaggaatgttgtctttaatgaagatcactatccaggtgctttaccttccaccaattcacaataggtacattctacacccattaatgttcccactactacttttagtacttcatctgtgttaccacaaagtaatgatgcctgcactactggtgtgtccactcctggtcctgagacaacacatttacctaccacaacccaaattggcccctttcccatgccactatcatcacatacaccccatatttcagctcccaatactatacctatcataactcacccatctgccatcactccgccaccagtaaccactactacagctcctataacagatgtcccaaatattcatgactaaccaaacacatctcccactttcataccaactcaaaccacagctacaaatgacaaatctatacctaccaactcccttgtctcaggtaccatccaacaggttgatacacagtctcttacagattgttcagttgaggcttctccaagtcaaacacacaaaatgacaaccagattataaagtggaatagtcaaaccaaagtcttatctggctactacacatccactttcacagtcccagataccattggaaccaagaaactcaaaagaagctcttcataatcccaattggcttgcttctatgaactctaaaattggggctcttcaatctgctggtacttagacactcattccctatgaaccgggtatgcatgttattgacaataaatggatccatagaattaaactaaatgctaatggctcattagatcgatacaagtcaagattagtgtctaagggattccttcaaacaccaggaatagactatgctgaaatattttctcctattgtcaaacctgtcactgtgagaactgttctatcacttgttgtatctaacaaatggtctgtccagcaactcgatgttagcaatgagtttctcaatgacactctaactgaaaaagtctacatgtgccaaccactaggctttattgaccctcagaaaccaaatcatgtgtgtctattacgtaaagccatttatggccttaaacaggcaccaagagcatggaacactaagctcaaagagtgtctcattcagtggggattcacaccatctaaagctaacaactcactatttgtttatagctcaggtacctctcttatcattctacttgtatatgttaatgacatattagttactggacctagtgtgtcactcatccacaagcttacacatgacctcaacaagttcttactaaaagatcttggcaaagctcactacttcttgagggtagaaatttttagagactcatctataacgtacctttctcaatcaaaatatattactgatctacttaagaagcttaatatggaaggtgccaaaagttcccctaatccatcaagtgtcgccacaaaattgtcattaattgaaggtgagccatttttcgatgtctaactgtacaaaagtacaatttgagctctacactatctgtccttaaccagatccaatgtggagtatataataaacaaactcagtcaattcattaaggcccccacttcctgtcattgggaagcttgtaaaaaactgctcaggtacctcaaaggtacaacctcagacagattagcgcttagaccaacaattgaaatggctcttcatagctactcagatatagattgggctagttgtttcgatgatagtggatcaacaaggggatatgttgttttctttggtggaaatctaatctcacggtcaacaaaaaagcaacaagttattgatcattctagcactgaaagcgagttttgagcacttgccaatactgctactgaactcaaatggatacaatctttgctgtctgagctacaaattcatctcaaccattgtcctgtgatctgggttgacaatcaaagtgctactgcacttgctgccaatccagtatttcatgccaaatcaaagcatattgagattgacttacattttattcagtatcaaatcattgctcagaaacttgttgttcaattcgttctttcagttgatcaagttgccgacattctcaccaagtccctatctactaagaaatttcactaccttaagtccaaactaaacatggatgtctccaagttcagtttgcggggggatgttaacaactaattttattctgttatttttttgtttgttagttgttagttaaaaggtagttagttgtttctttctgttttacttactgtgtgtaacaaactcttagtataaataaaggcggggtctaatccttgattagctttcgctgtgctaatcacgattagtaccattttcttttactctatttttcttgctctattttcattctggtttgtgttcttacagtgcaaagctttagccccatttgtcaaatcacaacagtcttgtacccactcttaacgttgtattctctatttttagaataataccaattctccagtaggtaacaaagtataaaacccacttgataatatatcatatggtttacctagtgcatttatcactctacttgacacatatgaatgtgtagcaccaatattaatcataatagtaaacatagtgccataaatagaaatctgacttgtcactgtggaaggtccagtatcgatctctgcttgtgtcaaagaaaacactgaggcaggaaccaaagcatcttctttcttcggtttttttacctgcaaaaaattttctttttaggtggcctaccaccccacactagaagtaggatcgagcttgagatttgccttgatggcgtcttttacatcttagacattcaggataagtttgccaattgtcattcccgcctcagcaaaaaccttagttaccttggaacttcttgttaggactcgtagctagagtgccatttggtctcttttccagatcattagggtcaaaaactctacccgaaccaaaattggaagacaacttccatgaatctcttctaatgttactgttcttctgaatatggtccttagccctttcagtagtaagggccaactcaacaacctgagcatacaatctaaattaaataaaataactgaaacttctaattgtcttatccaaacactacttaaatctagagaagttacacttaagacaatacttctaaagatttaacttaaatgataaaatgaccaaaatgcccactaacttaactcctaagtaatctttaaagctagggataaattggtcttaatcaattatcccgagacaccatgacaataaacaataccaacttaaaacttctcgtcataacaaaattcaaaactattaccgtctttacatttctagtcaactaatcaggttttcacggttgtcgaacgtaaaaatattttatttcatatatagcattcataataccaacatatttcaataaaatttttgtaattaataaattacacatttatcgatttctatttaaatccttaattattacataattactctagtaagattataactagagtggtgatagtgaaagttttcccaaatatattttttaggatagtttagttgcaattctttattttttaataatgggatattatttcacaaatacacaaaaataataaaaaaatattttaattttatccccatgaaaatttcctgccacaatgaagatttctcaccccgcccccgattgaagatatgtggggatgagggcgggatgggtattcaaattgttaacaaggatgggaaatgaggagcactccccacctgttacccacccaatttctattcctgtcctagaggcacaatttataccattcagaccatctcgaaaaagtgacacaaaaaattgtgttgtatttggcgcaaaaaataattttgtgatagatttgcatcaacttgtagtattgtgctccaatgtacaatttgaaaacataataaaaaatttaatatttttttaatattttttattaaaaatacaagaaatgataacttcgtcattaaatttgattatataaaataatataaaaaaaataaataaattttttataatttaatgtgatagttaaatattttaataaagtaatatagatgacaataatgtaaataaaaaagcatgcatatattatgatacaaattttgtattatagcatatgttaagccaaatttgatataagacttgtgatgtgctaaatttgaatcaccttttgatacactatcagagcacatttttttggtaattgagttatattttagcttattgcattcaagataaaatactctttcataattatacattcaataaaaatactatttcttaatgaaaaaactatgtatgtatattcattataatatatgtttcaattttggttatggtatttctaaaatatacttgtaggtacaacaattggcctcttagctttattgacaacaagttttctagtatggtggaaagtaaagaagagagaattgacaaatctcagagagaagttttttaaacaaaatggtgggttaatactgcaacaacaattgtctactcaactaagtagagaagaatctcagtcaacaaaaatattctccgaggaagaacttcaaagggccacaaataattttcacgaggatagaattgttggaaaaggaggatatggaatagtttacaaagggataatgccaaataacaaagttgttgccattaagaggtccaagctcggtgtccaaactgaaactgaacaatttattaatgaggtaacagtacttttacaaataagccatagaaatgtggttaggctattaggttgttgtttggagacagaaacacctttgcttgtttatgattttgtaagtaatgggactttgtcccaacatattcatgagaaatctcgagatgctcaagtgctttcatgggacttgcgggttaagatcgccgaagaaatagctagagtacctgcatacttacactcagaatgttccacaccaattatacatagagatgtcaagaccacaaatatattattagatgaaaactacatagcaaaagtgtctgattttggagcttcgagactaattcctttaaacaaaagtgaacttacaacattggtgcaaggtacactcgggtacttagatccagaatactttcaatcaggtcaattgactgataaaagtgatgtttatagttttggagttgttttacttgagctattgacaagcaaaaaggcagtttcatttgaaagattagagaatgaaagaaacctagcaatgctctttcttaagtcaatgcaagaggattcattaattgagattcttgacaaaagtattgtgcaagaaggcagaattgaggcaatcaagaaagttgcaaaacttgcatcaatgtgtttaagtgtaaaagggcaagagaggcctaccatgaaagaagtagctacggagttagagggattaagaatcatggaaaagcacccatggagagaagaaaataatttgagcccagaagaaagtgagtacttgcttggagacaccgcaatggtaaatgctttccaaattgatattgatagcgaaatgtactctacttgtacaggatgtaacaactccaaaaattgtattttgattccatacaaccatggacgttaaattaattgacatggttatatagttagctagcttgtatttttttttattgtttttagtttcaatttttgatcatttatcatctatgtcgaagatttacatatgtataagtacatatacatcttatacatatacatgatatatcacatgttacatgtatcattcaatcattattataataataatgagggtaatttttaatcaaactccctgaattatggaaattagcatgatcaatccccaagacataaattttgggtgcgcagaagtccccgtactacaaaatgttttgttgtccactctttcattagttttttattgttaaatgtcaaataaacctgccattgtgtacacaagtgtacacgtggaataattttattagtccgcatcattttatttttttgaatattataaaaaataatcaaaaaataaaaaaattccttttttatttctttcttcttcttcttcttcttctccttgtccttgtccttgtccttctccttctccttcttcttctcactcttaccagtgcgaccctgagtaaaatttggccctagaaaatataatttttttgggccccttttttaaaaaaataaagggtaaatggcggcaaaacctccaatactttggttttggtttcactaaacccccacaacccaaatttctgcgggtaaaccccc

SEQ ID NO: 18111 - DNA, 8913 bp, Cannabis sativa
catctgtgttttctttgactcgtagaacccatctgcaaccaattactttcttaccaggaggaagtctaacaagtgtccaagttttattctttttgagggccacaacctcagtacccatagcggcattccatttggggtcagctagagaatctgcaagtgtgagaggttctttggaacttatgtaaacctttggtttatagatacctgcttttgctctagttgtcatgggatgaacattggtagtagaaggaggaacagagggagcagatataggtgaagacaggggacatgatgaggacaagggtgaagaatcagagagagaagtggtggtggtaggaaggggaggtgcagggggatgaaaaactgtaggttgaagaggaacagggacagaagtgtgagactgagaactggggttggaatgaacaggtggaatggattgagtgagtttagcataagggaattggtactcattaaaaagaacatctcgagagataaaaattctaccagaggcagattgacacttgtagcctttatgtttcaagctatagccaaggaatgtacattcctcagatcgaaaggcaagtttgtgtctgttgtatgggcgagtgttaggatagcatgagcaaccaaatacccgtagctgagagtagtcaggttcaattttgaataatttatgaagaggtgtatcccctttgagaacagaggagggaagacgattaattaggaaagctgaggctctcacagcttcatcccagaaggacaaaggaagggatgcatgagcaagtaaagtaagggcagtctcaatgagatgcctgtgttttctctctgccacaccattctgttcatgagtggtagggcaagagagcctatgatgtatgccatgctcagtgagatatggagagaatgcttgaaactctcctccctagtcagattggagcattttgatgggtagattgaactctttttcaaccagatttttaaagttaatgattgtctgaatggcatcagacttgtttttgagaagataaacccatgtaaacctggaaaaggcatctgtaaaatgcacatagtagtaataaccatttgaggaaatcattggggagggaccccatagatcagaatgtattaattgcaagggtttagtatattcagtagtggatctaggaaaaggtagtttgtgtattttgcctagacagcaagatgaacaaaaatcaaaaacatttttattgctatttgtgatattacacttatgcattatttgctgaactgttttaatggcagggtggccaagacgagaatgccacaaatgaaataacgaactgttaacaatagtgttattagtggactgaacattattacaagaaatgtttgaaagagagtgagtagcaggaacagaagcctgttgagacttgaatgtgggtagaagagggggaaacacgtataggccagcttcaagagtagcctccagcagcacttggtgtgtctcccgatccttgacaagacaaaagtcagggtgaaactcaaaaaagacgttattatcagaagcaaattttgaaacactgataagatttttggttatctttggaacatgtaaaagattattaagagttaagatcttggatttatcaatagacagaaagagtttcttaccaatgttctcaatgttcaaccctgcaccattgcccatgtaaacttgatcttgaccattaaagtcagatttttgtgagagattgctgtcatttgaggtacagtgatgtgttgctcctgagtcaggataccaggcatcatcgcagacagtttcagcagtggcaaccatagccataggagaattttgagtgttgttacttgatccagcaccaaaaccaggaaatcctgggttgaacctttgatagcacttagatgcatagtgtccttgtcgagagcaaagctgacaggtgggtttgtttgtattagttcctcttgctgagttgttattttgagtagttccaaagttgcctcttcctccagaagttggaggacgagatgagaagccatttccacttggatttccaggatggtagccattttgattcgaccttccaccagtggcatagggattccaatgatctttattatgttgatttgatgaattaccacgagatcgaaaattagcaagattcacagaggctgaatcaagatctttgtgtttacgttcaatgcgatgttcttgagccaaaaaaagggcttcaagagcagtaacttcaatgggttcagctcgagaatttaccgaaataacaaaggtatcataatcaggagatggaagccctcgaaagatagcagtaacatgttatttattcgaagtagtatgaccaacaaaatttagtttatcaataagagaacgaaccttgagtaagtattcattgagagtgagagctcctttcttgagattctgcaactcagtggtatattgatcgatcttggcttcagtatgagatgcaaagtacatttcaagaacagaacagagtgcagcggaggtttcactatttataactcgtgtgagaatgggttcaatcatggatgagagaagccaagagaataacaattgatcctgttgatcccagtcaatgaaggcaggattgacattttcagcaattcgatcattttcagagagaaattttggtggaggaatggcagtttttgagatgtattgttgaagcttgtggcctctaatggcagaaagaacttgaggtttccagagaagaaaattatcatgatccaactttgtagccagcttgtgtgagaagacaacaggtacaaacgatgatgttgcagctccaaacggtgttgactggcttgttgcagaggacatggttggtgacgatgtcattcataacctaacgaagaagatgaagaatgagaatcagagcctgctctgataccatgtaaggaaacgaaacaaaacaagaaaacgaataaactgattctcattgattaaagcaatgtgattacattctttatatacaggaaataaacaataaaagggaaaagacaagaatacccttgaaccccaacagacataacagaaaactgttattacagttattacagttattaagtattgttcttaacacccactttgtacagatccacctacagagctctgcaatatctcacattaacaaggtcagagatgttgcctttattatcaataaattaagttagtttatcaaagctccaaccaccatacaacgggaagcttgtaaaaggctattgaggtatattaaaggaaccattttagatagcatgttactcaaattagctgctgtaatgacacttgaaagctatttagatgcagattctaccagttgtgtggatgacagggattctacaagtggttatgttgtgtttttttttggtggaaatctcaatttttggtctgcaaagaagcaacatctagtggctagatccagtacagaaagtgagttcagagctctagctaatgttgttgctgaaatcaagtggataacctcacttctcaatgaacttcatgtcaaaatgccttactaccctgtcatttgggtggacaatcaaagtgtcatagctcttgcggcaaaccttgtctttcatgctagatcaaagcatattgaaatggacctatactttgtgagagatcaaattctctctgtaagatatgttctttctctcgacctaattgcgaatgttctcacaaagtcactctcgactaacatttcaactatctcaagttcaaacttcaaacaacttcaacccctttacgtttgagggggatgttagtattgaaaataagtctgagaaattttgtaaaaggtagtcaagtagagttagttatttattaacttaacaactatattttcttgttttccttgtaatgggtagcttataaataaagtttagatcgagtggagaattagcttttgctattctcttttctcattcacaaattgtgctctgcccttttctctctccttctacacttaactgttcccttcagcatcacaaatcatccttctaaatatataaccacaccattaaatagctttaatataagcacttattggttacgattctctaatcacaattatcatgcctcacttttcttcttacttcaagacatgtgtactaatcgaggaacaaaagcttggacttcatatcatatagtatcactattcactacgtagtacgtactactattgctggcttttaaaaaattgtttttttttagtaattaagtcatgtttatattatattttgatgacctgaatactgttcagacttgtttcttcatttgtagtttttaaaaagcctttattgttacataaagctcaaattgttattattattattatttcgtggccgacactgtaaaagagcccttgtacgtattgatgtccaatatccaaggttttggggtttgacgtgcttcttttcgttacgccaatgcccatatatactgtctaaattctgtgagaatgaatttaagggttggctttgatgacaagacaagcggaagcgcatgagtgtgatgatgatcacaatggtggcttggcttaatcttgaaagtgacgacaatcatggtccatatatgcatgacgtggtggcttggttcatgaacatggtaactcaaagctcattatatataataggcctttggattaagagttccttacgatcttggttacagttggttacagttcgtcatgttttcgttggaaaaatacccaaataaaactatttctaattggtactttgaggcatgatttttatcgagacacacttgtaattaataaaacagatgcttaggagcaactacactacaagagaggtagtaaagtgttattggttgattttaatattagatcccacgtattttaatttaataatgataatatgaaaaattactaactaattgtgagacaccacatcgatgtagttttgaacaactcttatagtgatctctggtaatttactcttagatcaaggtttctctattgagtgtcgttctttctctgtataaatttcgtgtccttgaatagtaaaatgagtctattatttatatgaatcaattacatgaaattaatttccctaaatcaataataattaaaatgggaaactaaattatttttgtaattatagtgaggaaaatgataaacttagtctttattctttgaggacacgaatctatcccaagaacgtagggattgtgtcgtcacttgcaatcttggagatatacgagatatattttaaaaattgctaactcgcatcccctggtaggtgtatggaaactaccttctagataaaagttggtcggatgtttatgcacactttaattgctcggatgtcacaacttctgtctgtgaccttgagaatcaatccttcctatatggcttatcatgagtagaatcatccatccttgttatgaaatatgttaaacgtgtcacctagatggacatgcatcatagtgtagaaatttggataatagctagcaagcgagatgtaaagaggagcacacataatagtagagtgttacccgaaccgaattttaattattatggcacgcttgaagaagtactgaagttaacctttattggtgtttactcggtgacattatctaagtgcatgcaagtaatttaatagagatccaaggcagaagaaaataattgttgagaataatatcagtagtattaatattaggggctaatagtataaagatgactccaacatacttgctaatcaagaaaaacaagtattctatcttgatgatctacaaagagagaaaaataagaaaattattgagaatgtaaaccattatcaaatttggaacattgtggatgaagataatattgccgacgttgatgtggtacatgacacaagctcgtcaattttttttttgaccgtggatcttggagagttgattatgcaacataatcaatttggaattgacattggtgcatgctacacaaagtttgcatgttaaccaagaggatcacaacttaggcgatgaagaagccgctgaagaatctaacgacgatgaattacttgataacctttgtaaagacaatattaataataatttaatcaatgatgaaaatgatcatagtgattactaattttaagtagtttttattcatttattttttgtactaaagacaattaattttttttaatgtttaattaatatgattattaatttatagttaattttttgtttattaatttctagataataatattattattaataaagacaacaaatttatttttaaaagaaatgtcagctgatgtagcataatatcacggtggagacggtggtggtatgaactcgccagaccctaatagggtactctcgtccggcgagttaggttaatataaaattttcaatcatgttcgacttttattcaatccatgctatacaaatactaaattttttttgttttaatgattggacacctcaattgccaaaaggatatggccctactagtaacattgatgttgaaaagcgaaggcaggatgcgggaaaataactaccacttcatcatgatgaggtgacgagcaaagtggtttgtactttgcaaagagaaccaagttttttttttcagtcagctaggtgttgaagttacaatgttgatgccaggacactacttggattttaaagatatacctcaatattttaatgaccaagttgtacaaaaaatgttggcaaaaaaattaacatatttcgtgatgtagattttactttaataaatacaaaggtcattaatatgtcttttttttttttatgtagtatttgtatgatattgatggttattcagaattcgagagagttacggaaattctctacaaagagaagcaaagaagatattttgagagaaagaataacagacactcattgtgacagtcagtagttttatgatccgtaaggaaaaatactagctaggtaagttgtgcaatcccacatcgcctaggaaaggtcaagtgtgatgattctaagattgtgtaggtatgtgactatactatacctgacggttttaaactgtcgggtataagggcccaataaattcacaaattccaattaaaattgttgcatattcctataattaatgttataaactgtcgagaatactaatttttccgacgattttaaacagttacataattttttaagtgacggtccccccaaaaaagtatttttaggaccgtcgtgaattctgacttgtgtagtagtgaagttatagtagttttacacttctcctcacaaagaggaggtcccaagttcaactctctcctctcccaaaatcaacaaaaaacatatgtctacataaatacatttatattaaaatatatttaggtgtcgtttggttggagctaataaaatagaatagaatagaaaggaaaaaatcttctttccatttatttatttggttgcatattaaagtattggaatgtcattctaatagaatgacctttccagttttttggtgtaatgaattccattttgaaatagaaggaaaaattattctaatgtatgatgagaaaaaaaattatgataaaatgtttccatttcatttctatttttattcctatttctattctcgttcctatatttttattcctcctaactaaacgacacatttaggtacgagtaaatttctttaatacaataaaataaatatgatatttatattgttatttgaatatttaacatcactttaattatcatgtttattaaacactctaatagaacactttaaagccaataatttagtaatacaatatttttttctactacccaattatagcaaactggactatagtcccttattggaaagttaagggacactttaaagagccaatagcaatataaaaagtgatatattattattagtgtattctaatatcatatatttttacatattttaatttaataaataatgagtaacccaattaaagagtgtctcacattagtatggtattgagcatcttagaccgtttctaaatttggattaatttttacaacaccattagagcaaatttttttacaaaactaatgagttatattttagtaattgatcaccaatttgcatctttcattcattgaagatactcttaaagttccacataataatattctaaaagttgcaatttatgtgtatagttttcataataaaggtgtttattgttgtctctcatggctttttgtgagggtttgtgacaatttgtgaaggtttttttttgtccatgaagcttgtcctgtgtactatatattaagcaaaatcgacatgctagctttgtggatagattgcctctattgataaaatttgcttattctttaaaaaaaaaaagacactttataaatatacgaagaaagaaaggtggaaaaagtgttgttttcattagactcaattttttctttaattttttttttctttcttttaagaaaacatttaaatatatagtattggtaccccacaatcatgcatatgttatggtttggttttaatagatcttgaagatttaatcatatgataaagagttctctattattgaacggtattaaatcaaaaactgaacaataatacatctaaataaataagtattgcatttatcataaataagaaatctcaatacatatatatatatataacaatatatattcagattttaattctaattgtccctactatgtactcattcttgtacaagataaacgaggtatatttatacaaacagaaccaaaaatatgtgacactttcattgagacactgatgaagaaaaaagtgtactctcatacaatatataaatatataaatatagacatatagtatatatttatatatgtatatatatttgtgacacaaaaataattatgataaataattatgatgtatgggagtagaa

SEQ ID NO: 18112 - DNA, 5379 bp, Cannabis sativa
taagaaaggtagagtaaagggtatatctgtacccaaaaaggagtatgaatcatgtcctcctagacattttgcggaagaacacgtggtgaggataaggatgtttgtttggttagctggaaaatgaaggaagagccatattaaattaaaatataatataggtcgatgaatgacatcagcaaacccgggcccgacccgagtaaaaaatttctcatattgatttttggtaaaacaaaacaaagacgcgtccttgaacttgaagcaaaattggtcttctttctcttccaacctccctctctcccctcactgtttttttgtcttctgttaaaaatgagcatgacccagttcgccatggtttgtcttcttcttcttctacttctctgttttcaatttttttcatcttcctagttattattcttgtttaattcctttcttctatttatgttttttttctgcaactttttttttttcttaattgttgtatgaattgggtttagggtactgtttttcaacaattatgcttaaaatttagcccaggtagaactaaagaaggaaacttgaaggttcagtgtaagaaaattcccccctttttttggggcggagctaatttgaatattttctgtatataattcaaattaattaactttaatgtagtggaattgttttcttcaaaattgttgtatgaaggtttttgtttgagttgaatttgattttactttgatagtgtatatggttctatcaaatgtctgggtactgccagttttttttaaggcttttattgaactgcatgtttggattttttttaattatcaaacaaaatactgatatagtactgttgaatttcaggttgaggagttggcttcacttgtcaaggacaatcttccatgcaagcatcttgttctctctgtggaagaagccttggtcaacttcattgagagtgatatcaggtacccatttcagattgatacgatttgtaatttcgaagttaactttttttttagctagattgctcagaaactttagtgactagggttaggagtacatcaaatcgaattttgggtggctcttcctgttcctgttagaatatctgttgcatgacactagttttgcctactattttaatggtttggtacttgcttgaaaaattaaacgaggaaagaaaccttacacgctctcatagatgataaaattggaagctagcccatctatgtctcccttgtgtggttgtaaaattcccttattgttataatgagttaatgttctcggatttttggttgcagctctggtgggatcctagagctagaaccaatgaattcatacaatcgtcttcttatgcatcgtcttgcagatatatttgggtatgtctgtagcactagcacttatatgtttacattcttacctgtctagtcttttgctttattccgtacatgtctgcttgttttctgatgtgttatggttatgacccttatgttgtgaaagtaaaacattttttccttagggccgaaagctactcagcaggtctatctccctgcatttcaatagacatttgatttgattttatatttgtgcaagattttcgcatgaatctgtcggtgaaggagatgatcgacacttaattttggagagatgccctgatacatcagtgtatgtgaagactaaagcctataatattttacttagaatattttttcttccatctttattatggctgtatatcctccattaatagtttataatgttagaatttcctgctgtcaatgactcattatgtagtcatctttagtaaaataaatcaagcgaaatctccttatttgcagaccttccatccttgttagtgatattttgtggcagtacgatgaacctcaatctccaacaacatcacatcaattgttaagaagaacaggagactcaccaggttatttattatcatgtaatacagatcatgaaattttactttaagggttggttttattctcatgttaaagtttgatgtcatttcacagctcttatttgtctgagaagaaaatattttgaatactaaaaaaaattcgttgcgaacttattattattactgctgttcattttgttgtgagttgtgacttctattattatcagatgatggaatgatgtgattaaaatcattaaatcatgttgccagtgttgaagacaaaatcaccttcggttcaacattcacttgaggagagagaagctgcttatttggctgcacgtgagagaatattttcagccaacttaggggatgaaaaagaacccatcaagcagaaaccacgaagtgttcccgtggttgctcgccgtatgattgctcatgctctagggcaaagaatcaactcacgcaatcacgagaccacacacaatgactcaagtgcttccagagaggctgatgaattaaacaaccagcataaggataaagtggagactgatttgagggtggaagatgttcaagaaatccttcatttgtctggcaaaatggataactcgtgttgtaaagtaaaaaagaataaccatatttcgggcacatcatcaaatgctgacagtaaggcaggcaaaaataaatctgacaaaatccctagtggtgttgttgcatctggaagagtcagaaatggtgtcaatgaagaacatcataaaaaggaacatctaggagctgcaaagaggatgtttgctcaagccttggggaaacaagcagggaaagatacttttctttcaaaatccactgagtttaagcatattaatgcagagtaggagatgtcgaaaatcctttcagtgaagcatgtttacattttgttgcaaacattcactgaacactagctctcctggtcttcagttgcagttaaatggcagtcaaggagcatgttctgtttgaagccctgatggtaaattttgtaaggaggtgtttatgggaaaaaacaccaaacttgggttagtgtgtctggagttgaattctgcagctgtgcagcgagaacatcgttgtatcccactcgatcatgtgaaatgctgttctatttagctggagggaaaatacacttgtggctcacaagattgggtcttatgtgataactgaagactaaagtcagagcaggctggcatgttacatgcaatttgaaagccaatcatgcgaaatcattattaacatattagtaaataatatatataaacgcaatcctcctatcctagcgtttttcttaaataaaaaaaattacatgtttaacgtgagggaaatttttcacctgtttagtttgtttcataattttggtgcagaaagccaacttaaattatttctttaggagttgggtctgtgttgaaatctcaagggagaatgtggaggagatatttcttttgaagaattgagtggtttttaaattgcacttttaatataatttaaaaggcaaccttaattacatttttacctatataatgaatttggatttgtcaacattcagcacaaacaaaactattgccgttgagtttatgtttgtaaaaggatttgggccattatttgtttagagatcacaactgtaaaagtagctatttctcggagactatgtagcgtgcaagcctagctttggaacatgttcttgcttgctttacaaggttaaaatattaaattagcatatgtcaactgaatggttttcatggattccaagatatcagcagtggggaaggaacatttaaggaaaactttactttattgtaatgaatgccactgcaagaagaaccaaaagttctgaattctgatcctaaaaaaaatagaaacttcaaaaatttggtctaaaactatttgagcgcataggaaaaaaactaggctaccctaccatcaatatactggcattggcatttcaaattggaacattttttttcgtatttctccaacatcaataagtaaattcctatgaaacaatgaagctaaaacttgtataaatttaggcttgagccaagcaagaatcgaaagtgatatatcatgaatcatatcaaggggtatttcctccaaaaatatggtgtagattaaacatcaggctattccccaaaagatcaacaatgcttcccctcagcatgtcagaaatagactgttatcattcaatcgaagatgaagcgccgtgaattgaacaccacaatcttgactctggcggtcatttgattctcctagaagaaaatgaccaaaacaatttcatacaaaacttggaatgtgggcaatgcagtacttatagttgcttgaaaaactatgaggtgttacgaatatcatttgcaggaggcgaggacttcattgctaactcatgaagcatagattgcacagataaaaatttctcccttagcatgacattgtaatcgtacaaacatttaagattcttttgaacatcagacatattcatttctgaacaatccttcaactctgtagtaaaagcaacaaaatgtattgatcagacgcaatgatacacaagacattgttgactattcagtaatgacatttcacaatgctcatcgtctcaaaaagaaaggcaaagaaatagcaagtgatcattactttataaagtaagtagttacctagtgtaggtggtagaggaatggtttcattagataaagagaatgaatcaagctgggatgaactttccttgcatgaagcaccggaatgttgtttgccttcgtgtttctgtgacaggaaaagataagcattttaaatctaacaaatgactactaaaacaaggaggcaaggagctaattatttacatttaaacatcagtcaaagaggctagtttgcaaactaagggtgaaagggcccatactttgaacaacaccatagctaagtttatgttttggaatttacttcacatttttcatattgcgaagatcattggaccttccagtgtcagcttaagataggacccaaatgttataaggaaaaaggtagacatgcacagtcctaaaaatatggacagacatcaacagtcaatgtaacgtctctgctctcatccacctttctaaaatcttaatgctaaaatattgaaggacaaacaatactaactagtgtttgtactgactaaaaaatctgggttgataagaactttgaacataatagctaataacaaatctgttagtcaagtaaatgaatcagaatcgtaaaacataggtaaatagactggtaatattgagagatgggaacaaaggatgcagaacaatcctactttaagatacacaatgagcagatctttgttttaatttcaagacaaacattaaaagcaactcacaagttcaccccgagagtctgacttctctccgcgagtcaaagcagtttttggtatagaagacttggttatagtgtgtgaatcatcttgagcaggaatctacacaagaaaaagttaacaataaaaatga

SEQ ID NO: 18113 - DNA, 5262 bp, Cannabis sativa
aaataaaattttaatttaaccaaaataattgatataatatatttcaaacaattttgagaacactattttcttaagttgtagaatttatttctgaatatatatatagtatatcacctttatttagactagacttttaagtatgacagcaaatgaattcttaatttgataatattaaacatagaagaaagaatatttatctattaagacaattatggcattgattatgttgtaagatcaacaaacatccttgtgaatcaagcaactcaaccaactgttgcattgaaatgatgtttattctttcttcctcacaatcttattcttattatttcagattacaatttattctttcatctaaggataaatgttatggttttatgaagaactagtaaaattaaaaggctaactattctagaaacattaacctaaatttaaaaagttacaaattatgaaggaaaaaaaaaaattgttacccttaactgtttttccatatttcttccaacttctttgaatttttcacataattttttttaatttttttttatataaattttaccagaaaatatcataaaaataaaaactccccattagaaaatcctacctactgtaccggaccaagcgcttgactggtccggtaacctatcgagcttagccggtccggtcaattatcaagctgaaccggtttgatttggtaggctagtggtttagaagtaacccaatttggttatgtacagttaactgtgctcatgtgtttcaacagtgtgtcggtctatgtgttggcgcatacatggcaggttcgggttggtttaacacgatgaactcgggtccaactggataccgtggaaaccgaaatcaaccttactatgatgactcacttgacaagcaatgctcagaaattcataacttggtttgaacataggggcaaaaatcagcaagcaatcattcactgcttacaaaattcattgataagattcataacttaatggaacatatggacaaaaaataagccaggaaaagactatacgaaatcgaaaagaagaagaagaaaaagaaaagtttcataatatttttcaacaaactcgaaatgcttctttctttttcttatctaaagttacaacaatgagctcttcctctagccaacttatcccaaagacaaatcatttgccttggggattggtaatgtgcagtataataatctactaaacaaccatactgacaaaacttccaattatgggaatattggacggctgcgatcgtgctgttgaattgttcgacccacattcccatgctcacatcttccatcttgaaaagctagatgaagcaaacagaagaacattgattagcagagaaagtagtaaaggaggtaccgaaaataacagagagcgaatagaaactaacccttaggcttctgtttccatgttgagacacaacaaatttggcaatgtcacttgaaataatgtatccaggaccattggcatatggaggataaacttcttctggccattcctgtcacaatcaaacaatacaacttttaagtaaaccgaaaattttaacttaacttgagcaacaaatccaaagcaggtagcacaaaagcaagccaacttgcatacctcgtaagttaccgcccatttaccacttctgagaggacgatgcaagaggttaagattgcccatgtaaagagattttttgcgagagatgccctcgatctctttcaaaacagtgtccacccttataaatgtgtcatcatcacacttcatgatgtatgcagccgtcacattctgaacctgcattaacatattccagactattgatcagaagcaataaaaactcagacccaacacaataaatttctaatctattgagtattgatagaataatgagtcaagtttaatgagaactacttaccccatactcacaaatagcaatagttttaagaacaacaagctcgtagcgatccatgaagggtaaaatcacaatatcaccgaagtaagcagcttccttcttcatcatcaaattcacctccttcctcggattctaaacatccattttacaaacgagtataagcatcatatatgaaaagaacatgaggatggaataactttgaaaacagaaaaacacattgtctttacacaaagatgcttatatgttcttgtaattatctattaattaatatcataatctaaacttatcgaactcaacaataaaaatgggtttctcaattatatccgggagagcaaaataaactaataagtaatcatagtaaacgggtatctggtggcttaagctactttgataggtaaaatgttataacatgtactacaatattgtaatattaacatgttacaatattactcattagtttatccaccagctaaaaaatacaagctcagccaaaaaccgaaaagtaacctagtttcccacttccccgcttcacattagcatgaaattcattctttccgaagatctagtacacattcactatctctctcattttgacaatccctattaattttagttctttttcttgggattccaatactgaaatttgtatcagacaagtaatattatgcaaaatgattttcattttttaatatattctgcagaattaattttgctagctacaactttattgcttctgatttcaatcattcatcctttcgctcaaaacaatatgctaattattgatgataaacataatagcgaaatccttaccagtgcaacgaagaagcgaactactacacgtgaagatttgattgctgatgattgcatccaagtttttctcacagccatccgctctgcaaagtgattggttgctgagagaactccgatgaaaacctgaacggggtgtttaggtacaggatgggatttccacttctccgacatttctaatactcttcgaggggagaaacttggatgcgaagcaggaagagacgtagcatacactgaatgaatatccacttctcctttaactgctaaccccgttgcatcttccagtgtaaaaccctaaatggatagagaaaaaggtcaaacgaagaaagaactttaatgtttcatacaataaattgggaaacaaagtaaagaagggaaaaatagctgtaataaagtcaaaaggctctaataagttaataacatgctcgtgatatatgcaactaattaccgttcgatatggaaatgaggtcacatgcctacccccaacagtaatatgatatccttctacaccggcacgtatggtcaaaacaaagagtctaccctccacaaatggaaatggccaggtcacttctggcttttgctcacgtcctatgaatcgcttaaaccatgaggttgtcttggactcctttgagtctacaatatcattcctcatccacttttcacatctccgaaatccatcaactgccaaacatacggttagaaacacattataacaaatacaatgctagggtgacttgagtcctgactatgcagagataagagaacataagtttaactggcgacatttgcgaaaacaattacaagacacaagcaagaatggtgaaaaagaaggtaaaagcataagttaagaatacaagcaagaatttagaaataagaagcttaaaattttagtaaaagcttgtagaggtcaataacttctcatcaaaatacaaaaatgtatcgattgcccacttcctacaaaccgacctgaacctttgggtaggctccttaggatcaacaacttcagtagtaaatgatttatattttcccaatcttataaaatactttcttcatacataaaagtatctacagtaatccttaactggatggattaaataatgtgttcttctatgcattaataaaaagacaagtatatatatagtaaacaatatataacataccaagcatgtcttcgtcacttttggatggtaaaccatcacacctttgagctcctccccattgcatcctgtaacaagtgttgtgctcaatgactggcctgtggctccaatctcctttcagtcgaggattcaagtgcataatcttcggcgggtcctctccatccactgccttcaaaccttgcaattcaaccatgaattgtgaaaccataaccagtggatcaccacgcctcaacttcgcgagctggggcacaaactcctgatgagcataatgaggtgttcccactaatgtgatagaagaaccagcagcaagcccacaaggaaggaacatcactttatctcccactgccaattcttctccactcattgataaccaagaaggacaagactccggctttccctcgatcatagatgtctcagcagtctcctttacatcaagtttatccaactcatcccaagccttcaaacctaatgtccaagcctcatctgccattctctcaagcaatgacaaattgttagtcctatttatccttctcatgatatcaccagttattcgaccataccgatgttgaagaggtctaataggtgtagagccatttctctcctcttccaatggttccttactaggccttactggggcatcttggttttggttatcttctaatttccggtgaaatgtatccttataaacagaactgaaaaaaggtttgtttatctctgaatcttcagagttcctaatctttgttccatccaattcaatataactatcatcaccattcaacactgctgcactctctaaaaactggggaaacttaaatgatatgaaaaccaagtataatgctgctataaccaacaaaaggtgtgataatctgaacctcctagacaccggaggttcaccttttggtcttttcatttctaccaaaaacccaaaaaaaaaaaaaacaaagcaactacaatacaatcctcttcctctctaccatagccaaaagcttctcaaacccatttcaataaatatcaacaagaacctccaaaaccagacaaaatcctcaaacagaacaatacccaatactagaaaacgatcgaaaataagaaaaatcaaacctttttcacgaatcaacagctggggttgccaaaactacagagatcgattgatgttcataattggaaaacacaaaaaagcgagccaaacccatcaaaagctgactcaccaaaaagctgtatcaatcataatctcaccggcattccttacagggtgctcgatctcgacctagattaaaaacccagtcttgtttagaaaatggccgatttgaaacccaaatatctagaaagcgagtataaatgtgatacagaaagaaaggagggaattagagaaaatgaaaatataaaaattatttattttttt

SEQ ID NO: 18114 - DNA, 4562 bp, Cannabis sativa
tagaaaggatcagattacatgggatacttacgttgaccatacaagattactgtatatgaatcgtatgttttgtgtattttagtattatctttgtaccatgagtcggggtttcttttcttcgtccaaaatccctcaaacgaacctttctatttctctctacattcaccactgagctccccccctccctcttctctctctctctctctctctctctctttgtaatttccttttccgccatttcacacacatcacgaacaaccaacaggacccattttctcgttagacctgtctttcatttcttcattctttccttctttctctatctaaatggctgagtctcgccggggaagatgaaggtatccggtaagtctcaccttggggcagcattccctgccaccctttcaaccaagggtctaaacccacgaacggattcggatcttcagcctaaacccagtacccggaaacccggaaggagaaagccacggacgccgggattcggcagggtcaaaataaccggagcttcgaatgggaggcggagccggcccgagacgcctctattgaagtggaagatagatgatgttgtggagagagtgaagagtgagagtgagtttctagaagaggacgagaaggttgaggatggtcggagacatggccgaaaagttaggagggaaagggaagctgcggtctcggcgagaaagctcgccgctggactttggcggctgcagttgccggaggtggcttcgtccggtggcaaaaggagtagtcaggtagggtttcaggtatgtttgagctctatttcatctctgggaaggttgctaattaagggttctggattgttttggttttcgaagatctgaaacttttgggtgttcttagttggaaggtttgattaaatgtgcgatctttaagcattgttgacctaagatgattgaagtttgactttttctctttcatattgttactaaagagggagaattcttcgtatagtgataatttgtgtaggtattgtaaagttaaagctgctaactaagaagggttgtgagtgatcttgaagtttgggttttgcttgatgtgattttttcttctttcgttttccttttgaatctccttttggaaattagcattgtggatcaagctcttaatagaaaagtactcgactgtctcttaaaatcaaaatttgctttatagggttctcagtaccaaagaaggaaatgttcgtcaaacccttaattagttagtttcatttcactaggacgaaaaattaattattagggttattggaaattttttcattattatctaatatacatgtgtgttgtgtgtgtgtgtggcgttgtaatgcctaaattttctgtcactgtctctcccctttttcttatttttcttttattgttgaagttcaagaaatatgtattcaaataaagctgctaactgtgactaaatctgtggaactttacctggtgatattaagttaggcttgaaaattccatctaatattagtctagattaagcaatacaaaacgacaggctactttatccattgaagttttttggctgctttatatattgagaattgattgtgttttattgttttccttacagccgcccggagttggccatgttgggttatcgtttgtccaccctcgcagtaacaaggtacatggttctgaaggaaaggagtatctacagatccccagttctttttcaaggaatggaggattttgcaaggtacattttagttttgtttctttaattaaagcttctgtacatctatgaattaacaaataactttaaattctctaacgatttacattttttgaattgatggtttcttttaatcatcttaattattcttgatttcttgttaatactaaagtactgaaattttgtattgctgcacttatatttataagtccctgttagcaattatctttttttcatagcaaacggcgttatttcctctcttggttttatgattacgaagaaaaaccattttctttcgtgtcacaaattctaatcttagttctctttccttctcttttcttcttttttttctttagcttcagccttcttttcagtttcccaacactgccatggaaggcgcaacaaagtgggatcctgtatgcataaaaacatctgatgaggctctccagatttaccgacaaatgaagctgcttgatcaacaagtcagtgctgtatcagtggtgtctgcacttgaggcggaattagagcaggctcgtgctcgaattcaggagcttgagactgaacggcgatcctctaaaaagaaactcgagcacttcttaaggaaagttagtgaggaaaaagcctcatggaggagtagagagcatgacaaaattcgtgcatttattgatgacctgaaaacagagttaaatcgagaaaggaagaatcgccaaagaattgaaatattaaattctaaattggttaatgagctcgctgatgccaagttatcagctaagcgttttctacaggattatgataaagaaaggaaagccagagaattaattgaggaagtatgtgatgagcttgccaaggaaattggagaagacaaagctgaagttgaagcattgaagagagaatccatgaagctcagagaggaagttgaagaagaaaggaagatgttgcagatggctgaggtctggcgtgaagaacgtgttcaaatgaagctcgttgatgcaaaggttgcagttgaagagaagtattcatatatgaacaaacttgtagcagatctggagaaatttttcgagttaagaagtacaaccccagatgtgaaggagatgaaagaagcagagttgcttcgacaggctgctgcttctgtaaatattcaagaaattaaggatttttcatatgagcctcccaaccctgatgatatcttttctgtgtttgaagaagttaattttggtgaatcaaatgaaagggagattgtaccatgtgttgcttatagtcctgttagccatgcctctagaattcatactgttagtcctgaagttaatgggattagtaagaactgtattaaagggcatatgatgtttgctgatcataatggtgatttagaagaagatgaaagtggatgggaaactgtaagccatgcagaggaccagggttcgagctattcgccagaaggaagtgaaagtgccccatcggtcaacaagaatcttcgagatagtaacgtttcagggagtgggacagaatgggaagacaatgttggtgatgaaacaccaatcactgagatcactgaagtctgtttagtacctacaaagcagtttaagaagggatcctcgataacaaggctttggagatcatgctctaacaatggagaaaattacaagataatctcggtggagggaataaatggccgactttcaaatggaaggctgtctaacgcaggtaccatgtctccagatagaggctcagggaaagggggctttagtccttcagagttgccagggcaatggagttctcctgactcaggaaattctcacattcgaggaatgaaaggatgtattcctcgcagcggacagaagcacagtttgaaggcaaagcttttagaggcaaggatggaaagtcaaaagctccagttgcgtcatgttcttaaacaaaagatctaagtaataatctggcacagcttgctcatgaaacttagcaacatggacaggagaagaatatgctgcttcatttctggctgtgggagtggttcttccgaatggatctgctaccgctgattgtgggttcaggagtcttgagccttagaataattggcctcctacacttgcttctttcttgttctccagttttcctgcaactgattgtgctgtgctgatattctatttccttttgtcaagacctcaagagctggagaataatagggctttagaatggccaggttcttccatcagcaagacgttcactattttctcaggaaggcaattcattatttgtattgtatcattaaattgttaagacttcagggcactaccgctacggaggaaagcaaattcatggtagaaactagaaacgataacatttacttttatgtaatctgtactattatcaccaacgtttcttgcagtttcttatagaaatggaagataaaaaactaatgctaaaacttaataactcttgtgcctttcaagtctcatttacggtctttgacatgcagcccaaagtttataggtctttaattatctcaagttttgtcacatcatacaatcgtctcttaggaaactaacgattattgctataaataattaagggcaattttcatgtacaatattacagaaaaataaatgtaaaaaaaaaaaaacataattatataattctatacagaatatttacatatgaatatatatatatatatttacgattttaacttgttaattacttttaatttataggtctttaaaaaataaaaaataaatagacgcataaagctcaatatataaatataaaaattaatatataaatatatatactaggcggtaattatgtggcagtcatggtttaaatttaataaaaacaactacacgattaattatcaatataat

SEQ ID NO: 18115 - DNA, 10772 bp, Cannabis sativa
  modified_base (6879)..(6888): a, c, t, g, unknown or other
caaatgtaatattagagaattagttactcgtattataaaattttctttatagaaaatacagtttttaatatatttttatgttgtacttttgttattttattgttaatttttgttatttgtatattattttttatgttattttatgttattttcccgtaatttttttgttattttcataaaatactgtaaaaatatgtgtatataaaaaactttaaaagtaaatgtaaatgtgtaattttttttataaattaaaaaataacaatttatgtaattttcccataaaattacatattgatataaattgttaattttttttttctcccaactattttgaccacttgaatttatgtcaacatttgtgtcacatgtatatattattgttctattacccccactcttttttagttgaaattctccatgagaggcattaattgctacaaggaaaaacacactatgtggaaccaaaagttaggagctagctagggtcaataattcaaaagacagaaatctatttgtccttttttaaacaacaaaattaataaaaatcacaaaaacactctcacatctttcccaacccaactcaaaccactctcttactagttagtaccaaaaacaaaaatttagtaagataatttgagtggttgcatcactaattcattacaaaaacctaattttgtaaggtatttaaagctaatggtctatatatatatactagattacttatttgtgtttagacttttattaaattttctagcaattatataaaataataattttaggaaagttgaactttttttttcatacaaaacaacaatgtgttactcatttatcaatatgaatcaatttggaaatagaaagcacaattctaatatagtggatgaaacccccctcaactttattcaatgatttagtaaatttttattttaatagtgattgtttattagtgtccaacaaagataattaatttttcatattaattattaaattaaagataagtgttaattacaatcttttattataatctcccagtcaatttttacgtctgaaatcacatgtctgaatattctttttttcaaaaaaatttcataacagtattctttatagttacagtatcattactgtaaattttttaagaattctaaatagtttacaatataagaaaatagagtttctgatattctaatttaccacacacgttcaaaaaacttcaaacgtattttcgacaatataaattattcaaaaaaattcaaaaatttacagtaataatgttgtaagcataacgaatactgccatgaaaaaaaaattaaaataaaagcacaaaaattaattaagagattataataagagattgatcgtagcactcctttaaattaaaatataagagactaaatacttatactaataacaatataacacttaaaccgaatgagtgcaaccacttggggctagctcaagtggccataggtgggtgtgtgagtgttggagctcctgggttcgagtcccaagtaaaaacatattgtaatatataaacgcttaaataaaaaaaaaataaataacaatataacacttttaagaaccttaaacactatgattgtacatttcactaacaatttggaaactacaaacaaaaacacatacaaatttgaaagctttaaaactcacctaatacaacaatgataggaacaagtgatacaataatccacattacacttgtaacttttctttttcttttcttattttgaaagagaaacattattacacttgtaacttgttcttcttacaagttacaaaacaaaataaaataagaaaagaaatgtgtgatgtaatctgagattgttggttcccagctggatctatggacagttgtggagtcttctctctcccctaaactcacatgtcccatcaactttcttaacaactttttcacataagagattcctacgtttttttgcccttctctctccttaattacaatttacttattttaattaactattactatttttcttttacatattaaaaaattaataaaaattttaattttttagtacactcctaaagttatggtagacctcttatttatttggagttttttattttttatttttataagtaatttattttaaaaattcacataacaactaacgaaaaaatttaaattacaattaaaattcaaatagcaactcacataataatcaccaaagtaatttaaacggtcaaattaaaataattaaaaaataatatataaaatatttttctatttattttagtatcgagaaaagtttttttgtcaattttttaatttaaaaaaattatgaataatttatagtgaccaaaataaaattcaaacaactacaataaaaaaaaacaaccacatatgtaataaaatattttaactttattcttggtattctaaattattagagatttctaaaaattgaacggtggtactaaaataactattaatatatacaattatatatataaaaaaaaaataactaaaaaaactaaaaaaattctaccaaaatactttttaagaggtataatatagacttacccaaaattaaaatattccctaattttttttaaaaaataataataaaaattgcatcaacttgtcggtctttttaactctcttccttctataaattccattccctcaacacgcaaagtcccctcttctcttctcttcttctcttctttgatcattcttgagttttttcttcaatcaagatccaaactttcctctcagatccatctgggttttcaaaattttcctctaaaatctcttattttccctcaaacccagaaacttcccctgtttgtttcccgggaaaattttctctctcatctgggatttcgctctgttcttaactttcccagcttttttcaaaaaacccacttcaaaaaaagcttcccatacaacaacataacaaaaaaacaaaaaatctaatcttaatgctcaatatagttttcttgatgtttgagattcatgtctgcaattctcagtgaaaaccttctctttgagtgtatgataaattccacattcagacgcaggacccagttggttcaatctttctcagttgttttcctttactggctttactacgtttcatgatttttacatctttctcatcaccccaattttaattattttcctaattttatatatataatatctataataataaagtctctgtttttattttcttttttgagttttaattttctttttcaccatctgggtccctgctataataattaatccaatattattatcaataattttctcacaacaatggcttcatcaagtggaacatcatcaggttcgtttcaaaactcaggttcagaagaagatttacaggctttaatggatcaaagaaagagaaaaagaatgttatcaaacagagaatctgcaagaagatcaaggatgaggaaacaaaagcatttagatgatctaacggctcaggtttcacagcttagaaaagagaatcatcagatcatgacaagtgtcaacatcacaacacaacactatcttaacgttgagtctgagaattcaatcctcagagcccaaatgagtgaactcactcatagacttcagtcgttggatgagattattaactttctaaacgcaactaataatgctgtcgttttgggtggaggaagtggatccaacggtggagatcatttcatgactggtgggacttgtttcggtacggttgagcctatggaaagttttctgaaccctttgaatttttcaaccatgaaccaacctattatggcttctgcagatgtttttaatcagtactaaattattaattattgattaatctctactccataatgggtttaattttctgggattttccatggttgagaactttagaagagagagaaaaaaaaaaaagaaatattgggtttaatatatatatatatattataaataatttaaggaataaattaaagagtgttgtttgttggttgtaatattattatatataattaatattatgagtcttgtttaattaataattataattagtggggtttaatttttattatgtgctaatattgttgtaaaagggggttttattatgttgttttgttttaattaatggaaattatcattgtattttgtagccaattaatctgtctcttttaagtagctataatattgtttattattaatttattattattgttattaattgtcaccaggttcttttgtttgactaaactccaaagttttaatttttaaatttttatttattaatatatatgtggggtctattctatatagaaagatatttaatagtgtttggttttatttggtggccgtagttataattaatgcatatatatacgcactacaaaaaaaagtttagtttttttttttaaatgaaaaaaaaaatatttaattttagtcataataaaatttgtaaaaaaaattctgattaattataaattattattcttatgttgtgactaaaagattcttgattaaaagtattagttataaaaattataatttgtcgtgactaaatgcatttttcgtcacaatacttattgtgactaaaactaaattagtgataatttgtagctaaatattatgttttagtcacaagtaaatttttgttgtgactaaaagtcatatttaattaaaaaaaaattatattgtgactaaattttttttacaaaaaataacaattttttatagtaacatatataaatgttcaaagtgtgaagttataattccacaccactaccaataaaaacttaacaagtgtatatataaatgcatgtatttatacaaaaaaagacaaactaatggtgattaattcttaatgaaatgatcccacttttaccaaatatcggttatgtaaaatttaaaataaaattcattaaatcaaatgtatatatcccatatatataatcctaaaggtaaaattatatttttggtgaattttcaaattcatactctattgaattcaagattttctttagagtagggtggttggggtcgttacctagggcctaaagaggtctttcaattttttttttcttaaatatatgtatttaggctaattaaattataaaattagataaaaaaaattaaaatctaataatctcattaatttaaaaatatttttaacagtcttaaaatatcatgagacagaatttggtatatgtcaaagtttagaggacaaaaatcttattaattaacgttaacattagccccgaaaataatttttgctataaaactattaagaaatttatttgatttttttaaattttgctccaatttctataaaagctagagacaaccctaaattccttaattgtatactacattactagactcacaacaaaaaatattgtggctataatagaataataataataataattaatatgtgtgtattaacaacaatttgaaagtattttatgaaattttttatatatttttagacatgttttatctacatatactatattgcataataataatgagaattttatataaaaaataatggggttaatttggaaaaatattaaataaatattagagtattttaagtgatcataaactatatatatagaataaatgtaagttaattattgggtgaagtctattaatcatgcatactaataaatgatggctctcactatctgtaaggtaacatgtttgaaaaaatgaacattttaattttgtcttgttaggagtttattaaagcaatctttggttttaataccactactactactataaatcttgataagttaattgtactatacaaattaattagattcctatttaatattatttataaacttcattaataaattcttgtttaagggtcaatatataggtactgcaattatggacttcaaacttttaattataataattatatataatcattaataaaataaatttagattggtgattgataactacccatctctccataaaattagccctaaatatattgatctcttatacatgtgcttctgctaacattaatcctgccagaatcatgcatattatatatcaatgtattatatatatataaattattattattattattactaaacctatatatatacaattatatatacatatttgtctatgacaagcatgaaattaataagtcaaataagctaataagtaaatattactagactcagcatatataaataaaaagaagtatagtcttaaaaataacctcttctctttttacaatttatatggatgaataattttaataaattattaattaatactattaattaagaagtgaatatattaatatataattaatgaaataattgggggacaattaaattaactttggtactcccaatgttaatattttgtatgtgtgcagcatgtggtttgtgtatcttgtaatcaatacttttgagaactcactatataattattttatttataattcagtagaaaattgttaaaagatattattggtacttagtacctttttcggtgttatactgttattggtgtaattaagtattaattctcatataacttaagaaggaaacatactaaaaggcaccagtagttcttagcactctcttatgtattaatatcggtagtgatctaattaagtatagagtctcatatagtttaatgtaatataacttttagggaatatcactaactaatcgcaagactacatttctagaggtgttaggcaccaatagtgcccaatatatagcaatgctcttttagaaaataaattttaaaaaatattgctaaccaatcgtatagtccataccactcactacaaaaaatcttacttttagtcacaaaaaatttgtgacaaaaagtaaaaaaagttgtgactaattatnnnnnnnnnntcttatgttgtgactaaaatgtccatggctaagatattagtgacaacttgtatataaatgctatgttttagtcacaagtaatttttcgttgtgactaaaaatgacacatgtactcacaaaaaatttatattgtgactaaaaatttatcactaaaagttacaatttcaacactcaattgagtattagtctttctttaattattatattattattattattatgagagagagagagagattgatatttagaggaaaaaacaatagttcactgaaaaaaaggacaattatgatgaattactatagaagtactgtgataatgattattataattaataaagtgagaaatatttaatatatatatattaaatcaaatcaattgaagggttaaagttaaggattaaaaagtaaataaaaaaggcacatgatttctgatgaagtgtatagtgtggtatggtgtgctcgtgtgtgtgtgtgtgttttttgaggaatgagtccccatgtgtagggaacaatgttttcagtctcacttacgtactactcttttcataaacattgataataataatatacaaacaccacactaatcaacttattaattatattaattaattatgtatattaagatctacttacaccatgcacaaatatcaatatatatctctaaataatattatcatcataaagctatgcaaattgtatatatggtatatatatggtacgtacttatagaatagtgaaattgtattattgttattagtatggaaatttaatggtgccctaattaaaaggagtgatgaatcgatgcaccacatttgagtttttaacatttaaaatagttttatttttgatattttttatagggtaaatattattttagactttgtgttttacagaaattattgattgaactttttgattcgttaaatgataaaatgaaccttatattttttaaaatagtaaaaataagacattgagctcaattttttatattttttttataacaaacttgaagacaatttctaatccgaacatatacagaaaatataatcagttttatcataatatctgtaaatcggattattattaaattttattttgataaaaaataagttcagtgtcctatttgtattattttggaaaatacaaagtttattttgtcatttaacaaaataaaaagtccaattaataacttttacaaaataaatgatctataataatagtacttgatcgatatattttgtaaacattttataatttcagaacaaaaataaatttctaataaattattgttacatgagcatcttttatttcaatgtaaaatagattttgaattttattttttatattgtaaattatttcaaaaaattttaaaatattacataatgttatcaaaatatcaacaatacgagaatgaactgtaaaaacacaataataattattattattataaattagggggagattttaatttatggtagggttagatacatataattgagtggtgagtgagcttaatttgttttgtgtacttaaaaattctcattaattaattattgagattatattttttggacttttgatgtgatttgaggtgaataaatgtacacgtgcccatttgtagataaaacatcaacttggtctgatttccttcagattttccacactttattaaagttttgatttcaccaaatatctttttcctttttcttttacaaaaatgaatggtaataataaatgttatttcatgttttttatcattattatttattatttggacagttaattataatgaatggtaatacactctagtgtatataatatttagggacacgaatttagtacatcacgggacaaaatcgtgtcccataatattttatatattattttaaatgattgagatattttatatcataattaaatattgtataattaaaattaattacacattataaaaaaaattagttacaacaaaatttgtgactaaaagtacaaaaattgtgactaattataaattagcattcctatgttgtgattaaaaagtttgtggctaaaagtattagtcacaaaaattataatttattttaactaaatgtatttagtaacaaaaatttatgttgtgaacgaagttcaacaagaatacgtaacactacaatacaatcactaaaatattaaacattcatttttaacctcggtaggtgcaagactttctgttgtgccccttgccaccacacttgctgcaagttcattttatcaaaattctttcaccattacaaacagttcagtttgacttaattcttccaaccttttgcttcttgggttgccctattagtttcttctcaacaggcactccaactgtcatgttctttatgtcatcaggcaattcccaatcatcctcattacaaattggcataattgtgtcttcatatgtattcctccaatattttattgtgtaatatggtgaacacagtgcatacatactaatactttgttgctgagctgcaacacatgcatgaggataaggaaactttataatctggaaaaaaaccgcaagtgtcagtctattcctgcaagtccactacagcatcggtctcaactaatcctccagggtggacattcaacgtgtaagatccacatgtgtcaacgttcaaataccgagatttctcaaacaacaatgccaagtcctccttcatttttagtgttagggtttttgtccacttatcagttttttcttttcgcgtagcaaactactgtcggactttggacctcaagaatgctatagaagcagtgatcgggaagcctcttgcgtccttagttgtgttattgaagctctcagcccagttactcatcattacattataacgtacccctggaaagtacgatcgaacctatttctcaaatccaatttcctcaagatattgtgcaactgcaacattcattgctcgaatcttctcaatttctctgtgaaactttgtttttgaatatgtgtaggcacatgtgtaaatatgattcgtgaagatgttagtcttgaacttgtagttaacgttcatagtaatgtggtggtagcatgcattgcggtgtgcattagggaacacgatctccaaagcatgaacaatactttgatgcatatctgacacgctggctaatttctcaacatcaccaatcgtttctttcaattgtctcataaaataagtccaagagttgtggtttttactgtcaactacagcgaaagctatcagaaattcatgtttaggatgttaaataacatacatggtatagtaaatctagatccttgtaaaacaatctccaacaggactaacattgggcccctattggactagacgaaaaaaattgcataaactagaaaaaaaaatagtattcacagacaacaactatttcaacacacaaaatagcaaaataacaacaacaaaccatagatcaagcatcaaaataaaattttaaactaaatataacaactatcaacaacattaaacaaagaaaaataataacctattaaattcgtgtatgatgctccctccacaaaataagtgaaagaatgtagtgtaatgaagagaagagaatgtagtgttccttcgtgtgtggtggatgatggtttaggatgaaaaaatgggaggggcgcgtaccgtttgtttcagtgagacagagagagggaaagagcgaaaagagagtggagggatgtaaatggggagggcattttggaataatagaaaaagttgaaatattcttccaatttagcttagcataagtttagaaaatcaattttacactaatatatgcaaggaaagtcaaatttcttaaagggttatatattaggctaattagtaattttttcccctgaacttggacatgtaccaaatcatgtcccct

SEQ ID NO: 18116 - DNA, 9282 bp, Cannabis sativa
agtttcatatagtggaatattttttaattaggtagccatattaacttattaagcatattctcacatatcccttttcattatatgatattagtttgccataggaaaatcattcagtgaaacagtagcgaacattcgttacacacctgtaacattttccaggacgaactctaccagccctaccagccctttgcctagcagaagccttagatatcggtgccacaaccagattttcaatatctgatatctgaagcaaaaagaatgaacaaaagatatggaatacatgttaaaataaatattggatggttatctgttgaaaagcagaaaatagcccttatcttcaggagaacaggaaaagtaaaatctagttcaaacaaataattgaggaaaagagagattttttgttaatccgaaccaagtaatctagagactattaatcaaggattctagtcaatgatacaatgatggtccacaatcataaataataaaatttatttgaaaaggaaaaacaacaaagaaaggaacaaagggaacactcaatattcatattgcatgaatcatgtaggaaatcaagctagttgtaaataaacatttaatcctctttcattatttctaggacacaaggtgtttacattgtattatattgaaaatctaatacaaataaatataaaaaattcattttcccattgcttcatgaaatcaaacttcaaaaaaaaaattcttaatagggttttaacgcacacccatagccacatctcttcattttctcaggcgcaccactcgagcaccattcttctttgcgaccattctagaaacctcaggccacgtcctagtcacatgaagaccactcgcacgtctccaaccaggcgcacatcagtcgcacctcaggtaaagtcaccaactccaaccaatcgcacgcctctaaccaccatcttctcaggcgaccaggtcctatcatcatcttcttaggtgcaccggtccagctcagatctccaactttcaaaccctagatcagtccatcttgttcaaacaaagacactacatctgtccatctcggctcaaattctcctcctccagcgttcaaaccctaaatccgccattgcaccttcactgttgcatcctcgtcgtcgcaccttcgcgccgtctcgatctccggcggcccccaactagccgagcctccatctgccactatgtttctctccatggaagactatatcactttcaattgtatctcttcagttgcacatcaaagcaacactcaggttattcaagcctctctctttggattgtggatacaggtgcttctgaccacatggcaagggacaggtcactattttcaatttttagcaaatgttccaacaataccacaggccattctatgagtctcttcctttttgcgtattcgaatgtatcaacagaatcatttgattatttctgctaatgattcaaaccaaaatccaatttttgggtacaacaaaatttttttctcaccattgaaatcattgttctctctctctcagtgtcagtctctttcctctgtaacccagtctaataaaattagtacaatcatgttatggcataatcatttaggtcattctaatttcatgtgccttaaacatttattcccattcctatttgtcaatataaatcctcagtctttcaggagtgatatttgtcaattctctaagcttctcgccactcattcattccaagacctcatcaaccgtctcacccgttctcactcattcacggggatatttggggaccgtccaaaatccaaaatatcagtgaggtacattggtttttatgactaatttatgatcacagccacctaagttgaacattcctcataaaagaaaaatttgaaacaagtcatattttccaaaatttccacaaaatgatccaaactcaattccaaacaaacatccaagtattaaaaactgacaatgctcgtgactttttcaattctgtccttagaccatatctacaatccaatgggattattcatcaaagttcttgtgtagccacaccacagcaaaatgatgtggccgaacgcaaaaattgtcatttactagaaatagcccaatctttacttttttcatctcatgttccaaaaagatttttagatgaagcagttctcacagctacctatctcataaataaaatgccatctcagatatcaaaattcaaaactccgctgcaaatcttcctagaagcatatcctcactcacatctcgtgtatcaagatccccttcatgtctttagttgtgatgcatttgtccatgttgactcctcacatcgtagcaaacttaatgcatcagccacaatatgtatccttggctactcatccaataaaaaaggctgtgttgcaaaaaaggttacaaatgctactgtcatgttacacaaaaggtgttcaactccatggatgtcactttcatttaagaacagtcgtactatcccaaatttgtagttcaggtggagaatcatagtcaagaactgcagaattgggagtttagttcactcattcatataactaattctcctgacaacaccattgtttcagaaacaccaacaaacccttttgttgctcatgctccaaactattcagtcaaatcacatgagcagaaatcctcatccaaggcatcttagtcactcagcggaaatatgtccttaacctctaacaggaaatggaatgatcaaatgcaaggcgattgaaactccgatggaccctaatacaaaacttgatgtgcaaacagacaaaacaaaagttgatcgatgaaggtatcaaggtcttgtgggaaagttaatctacctaactcacactaagcctgacataagcttcgttgtgagtgttgttagccaatttctcaataatccctttgagtaacacatggatgttgtctataagattcttagggtacctcaagggaacaccgagaaaagggttaatgttcaataaaactctcaacaaagatcttaaaatctacataaatgagattgggttggttctcttactgaccaaagatccacttccggtactgcttctacgtttggggaaatctcttggtgcaacaagcaacaagtggtaactcacagcagtgcagaagcgtaatttcgtgccatagcacatggaatttgtgaaggaatgtggctgaaacgcctacttgatgaactcataatcagacttgaaagcctaatagatgttttctatgataatcaatcaaccatagcaatccatcataataggaccaaacatgttgaaattgatgtcacttcatcgatgagaaaattgaaaacaagatcatcaccttgaaacatgttccctcaagacaacaagcagctgacatcttaaccgaagctctcaatcttcctaactttagcgaactcagtttccaaattaagaatgtttagcatacatctagcttaagggggagtgtaggaaattgatagacctccaatcacatttgtctactctagaagaaccaagatgggtactgtagggtgcactacagagaactaaggtgagctggcagtagttagtggagttgtgttagagtgtggggactttgttacactcggtgggtattaaataactgtttggggaattaatattgatatgtatgaaaaagtaaattgagtattgtaacctttaaggggagagaaccaggctctcgaagtcttggaaattaatgaaaggctatcagccaccattttctcatcttcttttcttctaattctcttgttctaactaatatttgataagaaattcttatcaaattggtatcagagcacaaagatatgggacctaagaaggattttagtatggatctgttgaaggagaaattggagtcgatgaactttgaactacataaagccatcacggaggatcgaattcagttggggaaggagattgctgatactcgagtacagcaagacaaggaacggacagaggtgcaaactctgcgatccgaaatgcagaagctgccggagatgatgatggcacagtgggcccgatttttgacgtcggggaaggcaccgatggaagggccgattctcagcgagaaccaccagcaaccacccactgtcgcaggcggcgacaggtcatcttcctcagccccgatgggtccccaggtacgatttcctccatcgccgactccgcaaggctcttttccgaccgatcctcaaccaccgatccactcgttctacccgcaccaacaatcctcgatggatttcagaccaccaagaatagagattcccattttttcgggggacaaccccgaaggatggatttatagggcggaaaggtattttctcatttctcggttgacggaaccactcatgctcgaaacagccatagttggcttagacggagatgcccttacgtggttccagtgggagaatcaaaggagacccattacctcgtgggctactttgaaacaattattgctgcatcggtttcgggctgtaccaattgggtcattggcggaagaatttctgtctctgaaccaaacaaccaccgtgcgcgattatcgattgcgatgggaggcatcggcgtcgagagttccaggtgttctggagcacatcttggaaggtagtttcgttaagggacttaaggatgaaatcaagggacctttgcacattttgcaacccattggattggcacaaatcatggaaacagcccaacgggtggaggagggccaacacttatttcctcctgctgggcaacagattcaacccaccaaacccaatagacctcagatacagcctctcacccatactagaaactccccacacacttttacccgatctattacagctgcacctatgaccaattccactacattcgcaccagccctggccacttccacgggaaaacccccaactatgaggcggatgtcggaatcggagtatcaagataaacgtgccaagggaatttgttttcgatgcgagaaaaaatatcatcggggtcacgtatgtgatcagaaattcctccaagtgatgttgtttgttgatgaagatgaacccccacctgatattgaatcactgccaccatcaccagcctcgaaagaaccagcgactactgaggaaacattggctacgttatccttgaactcccttgttgggatatcgtcggctcataccatgaaactcgcagggaagattgggcagctaccggttacggtcctcatagacagcggtgccactcataatttcatttctaaagaggtagtggaagtgtcgggactacctatcacacaaacaacgaggtatgggatcttgttgggtaccggtgatcgagtcaaagctgaaggtgtttgctctcaagtcgctttggaattgggagagatatgtgtgctgactgattttttgccattggagttgagcggggcagatgtgatattgggagtcaaatggctagagactttgggaaatatgcaggttaattggaggaccatggtaatgaaattcgaacgagggggctcttgggtgaccttgcaaggtgaccctagcctttgtaagtcacccattacattgaaggctatgattcatacagttgaacaagaagggtacggatactgggttcactttggggccatacaaggggacagccgagaggaggaacaacaaatccctagtgttgtggaggaagtcatccacaaatatgactcggttttccacatgcctccaggtctcccaccagaaagatctcgtgaacattgtattgtgctaaaagaaggagtaggtccaatatcggtgcgcccctatcgctatgctcagattcaaaagaatgagattgagagaatggtacgagatatgctccaagtcggcattgtaattccaagcaccagccctttttctagtcctgtattattagtaagaagaaggacggtagttggcgattttgtgtggactatcgtgcgctgaatagagagactgtggcggacaagttcccaattcctgtgatcgacgaacttttggatgagctctacggagcaaaggtgttctctaaactggaccttaaatccgggtaccatcaaattggaatggcagccaaagactgagctaaaacggcctttcgaacacatgaaggacactatgagttcttgttgatgccgttcaagttaacaaatgctcccgccacttttcaggcccttatgaatgaaatctttcgagatctccttcggcgaactgtgcttgtattctttgatgatatcttggttttcagcgcaacggtagaggaacatgttggccatttggaagaagtgttgaaacgcctacaacaacaccagttgtaggccaaccgcaagaagtgcttatttggacagtccaggttggagtatttggggcacatcatttcgggtgaaggggtttcggctgatcctcacaaggttgctgcaatggttcaatggccggttccaaagactcttaaggagctacggggcttccttggcctcacagggtactaccgcaagtttgtcaaaaactatggtacgattgctcgccctttaacagatcaactcaaggacgcttttggttggacacaagaggctcaacaagcttttgaacacctaaaatcagctatgtgtactgtccccgtcctcgctcttccggatttttccaagccttttgtggtggaggcagatgcttcgggggtcggattgggtgctgtcctaatgcaagagcagcgaccaatagcatactatagtcaggttttgtcgcacagatcccattccaaatccgtttatgagcgtgagttaatggccatcttgcttgctatccaaaagtggggtccttatttattgggacgcaaattcctggttcgaacggaccaaaagagcttgaagtacttgctagagcagggattggtggctgctgagcaccaaaaatggctgactaagattcttggctatgacttcgaaatacaatacaggcccggaatggaaaacaaggctgctgacgccctctctcgtgtccaaccggatcccacttgtgctgccttattggtcccaaacttactagccattccaaatcttcaagagcaagtgcaggcggatcccattttgtccaaggtactagctgatcttaagctaggacagaacagtggtggttgtacgctcatacacagagtccttcattttagaggccggttagtgctaccatcatcttcacccgtcattcgtctccttcttcaggagtatcacggtagtgctctcgggggccactctggggtgttcaagacatttcagcgggtggcagctgacttgtattggcctggaatgagaaaggatgtgcaacgttttgtggctgagtgtgttgtctgccagcaaaacaagtatctcgctcaaacgccagccgggttgttgcaacctttgcctatcccggagcaggtgtgggacgatatatccatggatttcattgagggcttacccatgtcacatggctttgactctatcatggtcgtggtagaccgtttgagtaaatatgggcactttattcctttgcgccatccctatacagccgctactgtcactgaagtatttgtaagggaagtgatcaaactccatgggattcctcgctcaattgtgtcaaaccgggacaagatcttcctaagcctcttttggaaggaattgttcaagctccaagagaccagcttgaagcatagcacggcgtatcatccccaaacggatggtcaaaccgaagtagtgaaccgctgccttgaaacatacttgaggtgctttgtgggtgtcagacccaacaagtgggttaagtggttggcttgggcagagtattggtacaatacttcctatcatgtgtcggcagggatgactcctttcaaggccttgtacaaccgtgaccctccgccgcttctccgttttgaacatggcagcaccaaagtttcagcagtcgagcagcaacttcaagctcgggatgtcaccttatcactactgaaagaaaacctccagcgagctcaacaaaagatgaaatcccaggctgataagaagcgaagagatgttagctttgccattggcgatttggtctatgtcaaaataagaccttaccgccaacgcactgtggcccgacgtcgcaacgagaagcttggtccccgcttctttggcccttttcctgttctagagcgcattggttcggctgcctatcgtcttcaactccctcctgagtcttccattcaccccgttttccacgtctcactcttacgagcggccttgggaacacaccagcaggcttcaacccttcctccttgtctctttgctgatctagaatggctcctcactcctgaagaagtgttagccatccgccctggtatgcataagacagctccacaggcccttatcaagtggaaaaatctgccaccttttgaagctacttgggaggatttctcagtcatccaggaccaattccctcattttcaccttgaggacaaggtgagactcgtagggggggtattgatagacctccaatcacatttgtctactctagaagaaccaagaagggtattgtagggtgcactacagagaactaaggtgagctggcagtagttagtggagttgtgttagagtgtggggactttgttacactcggtgggtattaaataactgtttggggaattaatattggtatgtatgaaaaagtaaattgagtattgtaacctttaaggggagagaccaggctctcgaagtcctggaaataaatgaaaggctatcagccaccattttctcatcttcttttcttctaattctcttgttctaactaatatttgataagaaattcttatcagaaatcaagcaagatgtaaatatacatttaatgatcttttattttctctaggatactaggtgtttacattgtattttataaatatatatatatatatataaatccgttgtacttacaaagtaaatatatcagaaaattcattttccaattgcttcaaatcataatttacttgaatactcattactaacacaatgaacatccattaagagggaaagagtactttcaagcaaaactacatgtataataagagatttataagggcaggaatatcgataaccaacatacctgataactaatatactctaatatgttacaagttacaactttaaacataaaagggaagggacatacaggattgtagaaccgctgctttgagaacccactatcaataacatagacaattccctgcacagaaacggtaaaataattttcttataaaggaaaataagaaaagacaaagagacaaaggtcacatgcacgagtgaccttatc

SEQ ID NO: 18117 - DNA, 2936 bp, Cannabis sativa
attaatatttataacaaaaattaaattttatattttttgttacaattatttataaaataaaatttaaccaaacaaaaataaaattaaatggaacaaaaagaggtagatgcacgtgctatctcacctagtatcataaaacattctaaaaaaaaaaccatatttccacatacttttaccattttagtatcgaaaaagaaaagaaaaatttgaaggtaaggagagtattagtgtgagactactgagatagtttctccacaacccccaacaatggcagcggttgccaccaaccggccccaaacgcaaccggagccaacttggaaactcgattgcctttctcagatagatattagctccctctcccagtcggaactccacgccctctccctctgctcctcctctgccttcgacctccactgcaccgacgacatcgtcgtccccaaaatcgaccctgccaccttcaacgaaagcgctggctctcgtcgccagacttactctcgtgctcgccgcttactgtcctctccgtcgtcgtcgccctccgtgcgcactgttgcttccgctgccaccggtcatcgtcgtcgagtcgctggacttgttccgactcctaaggtctcgcatatcctcgctgatgatcccgaacgacgtgagaaccgtttgatcatcgatcacctcaagcgtttcatctcgcaagaccctcaattcaactatgtcgagttctctcagccttcgtcgcagatgggaatggaaattgattccgatggtgggcgaggaatttcgatgttcgataatggattggcattgacgaattttggcggagagaggaagagaaagagaggcaggaagcccaaattgttgaaggtccaactggaaatgcaaaatgtggagcctcatagttatcgaagtctggagatggtgaacaggaatggcgtggcggttgatttttcggctttgggaaatgcggatgatccatacggagaggagttcagaaggagaacagtgggtttggagagcgaggaagcgcttctagggtttctcagagagttggatgggcaatggggaagtagaagaaagaagagaaagattgtggatgctagtgagtttggtgatgctttacccattggttggaaacttctgttgggcctcaagaggaaagagggtcgtgcttggatttattgccggagatacataaggtctgtttctttcctttacgtttttcatctcaaatttacttttcagcaactatgaaaatgagaacctgaaaacttacaactttcttcttgagaaaaaagggaattttgagataaatttttttggctatgtttcatggtagtgcttgcgtatttaagtgaagagatcacattgtcatggctccccattggtttgaaacttctcttattgtgttgaagctgttactcaaaacttgactaacataaagttgaatgaattgtcatattcatcatctcttgtatctataaattgtttattttgtgctatttctcgctccatttgatcttcaccggccttacttgttacttttggcacgttggtacttcgcagccctaatggacaacaatttgtaagctgcaaggaagtttcttcatatttgcaatctgttggtggtctcaataccccgcatctgttgaatgatcacaaaaatgaaaatattcaggaagacaggtcgatcactgaaaatgtaagtacataaatgtggtgttgtttgatttgttttgtttcttcaatgaggttcattggatatgctgcagaatgcaggtttgatctttaaggaaggagagcagagacaagacctaaatttaagttctgctctacccactcctacatctaatgagcaagagaaagaagtttctttattggggattgagaatcttgcagaggttcagatacatgccctctttgaatgccacaagtgcagtatgacttttgatcagaaggatgcatatttgcagcaccttttgtcctttcaccaaaggactactaggaggtataggcttggttcatctgttggagatggagtgataattaaagatggaaaatacgaatgccagttttgtcataaagtgtttctggaacgtcgacgctacaatggtcatgtggggatacatgtaaggaatttcgtgaggaaagttgaagatgtgcccggttcaagtgctcaagagaaaattgaagagccaagcacagaagacttgcctgcaaggatctctaaaatggatgctttagtagaaattgctcagaattcaatactagaaacttctgtggtacatgacgatggatcaaaaggtgactttgctcctgataattctcttgcaattttaagttcggattttcatgttttgaatcccgaccatgaaatgaacacggtgtatcctcatagtgaacctgatcttgatgattgcatgatcgaccaagatcatttggatcgtcaagaagatgagcatgtgttcagtgagggaattgggaaaactgatggtgcttgtgaaattttagacaataagatggattcagtaccagataattcaactcttcttgctactagaaagctagaaaataatgcacctgaacattttgttcaggaagataattcagtatttaactttgatagagtagaaagacctgccattgagctgggagaggttaaagaatgtgatagtatttgcaatgttgagaacgaagcaaaaatggattatggcagcacctcagagcacctgaagcctgttgaagtaaatgcttccaagaataacacacttgaaacagacactgatattaatataaatggtccgactaatgacactgcaatagagtctatacaacaatgttccgaaggaaaggaactgcaccttgaggtttctgagtcttcaacatccatgcctcaaccattaccttgtctttcctcattgaaggaaacgtcagataaggtacaaata

SEQ ID NO: 18118 - DNA, 3428 bp, Cannabis sativa
gtcaaacctcttgttccattgcctaggtgattgtttcaagccatacagatttttctgtagtttgcacaccatttccataacaaagttttcttcataacctcttggttgttccatgtagatctcctcttccaactcaccatgcgagaatgctattttaaaatccatttgttcaagctctaggtcatattaaacaataatggccagcattatccttatattatacttgacatttgggaaaatatctcattaaaattcactccatctcttcgagagaatcctttggccactaatctagctttataactaatctgattcctatcttccttgtgcttgaatatccatttatttagcacaatggatttccttctggtcttgtcactacaatccaagttttgttttcttcaaagatgacatcttctcatccattttcaaaccccgtttccttgcatctggacctcttatacctgcttcataagaatctgattctttcttggtagtttctatagcagaatggaaagcataggcaatgatgtcatccaagacattcaaggctcaatttgttagttagtttaggcgctctccttttcctatttcaagcaagttggcagttttccatatctggttgctcagggtaatattctccttcttcttatgctattgtgtccataaaatgaggttccacctgagttgcacggtctccttgttccacttgatcagtgtgatttgtctttctagcctctagtacatgttccatctgaacattggactggttttggttttcctttcctgctttagtgctaatttatttccctttgttacctacattttggttagtactacaagaaaactatatattcattgcatattacatccctgctaattattatcttgattccatttctagatctatcccataacctataacccttcacccttggaggttatcctagaaagatgcacttgtttgatctaggttaatgtttaactatattttgatgtatataagcactacaacctaaagttctcaaatgagatagatttggaatcttacctgaccacatttcctcagtgttttgaagttgatttcacttgaattatgtttaccagatgtgcatctgtcataacaacttctcccccaaaatccttttgacaatcctgaacttagcaacatacatctaaacttttcgaaaagtgctctgtccatcctttcagcaaccccattatgttgaggtttggtattaactatcttgtgcttgttaattcccttgtttgcataaaacttgtcaaatatctcattataaaattctaaactattattcattctacgatttttaatccttttccctgttaagttttcaaccacattctttcatgttttaaagacgttaaaagcatcattcttacaaaacatgcaccaaaactttcctagagtaatcatctacaactgacagaaaatgagagcttccaccaaaagtttgaaccttctcaggtccccacaagtgtgcatgaaaatattcttgaacttgttttgaattatgaatgcctttgccaaaactaaccttatgctgcctgcaatgttcacagaaaggtagagagtcaattttatctttagcaaatgcattttttttttgttgagaacatgcaaacctttctcactaatgtgtccaagcctagtatgccataacacaatcatgtcttctgttgtctcagttgcaacagatgcctctctagtcacaacttctcctttcaaatagtacatccctcctttcttttctcctttcaacataaccaaggctcttttgcatattttcaatattccattgcagtacttgaattcataatctgcatcatcaaactggcttggtgaaataaaatttctagcaagggttggaacatacctgatatctttgatttctctaatagtgccatcattcaatctaaattgaacatttcatattcctgcgatagcacaggtctgaccatttccaacaataactttaccattcttctaaactttcatgtttctcatccaattcttattgttcgtcatgtgaaaggtgaatccagagtctatgatccattcattcttgatggttatttcttttcttgaagttaaatcgaccattcatccagagtctatatgatccattcatctgagaatgctttggatgaatggatcatagactcttagtttgtaattctcagatgaattataaactaattaagagaaagccttggaaatggcaatttctactgcaacaatgtagccaccgaactcagagaattctttttctctcaagctctctcaaacacaagaactcaccacaattctctcactccattcttttctctctgctcaccaacaagctctaaccaacctctaacaattacctaaatggttggtttatatgtgagctctagatatgacagctaggcataacagtcataacagactttgacagctaattaactgtcataactaactaatccaagatgtctaagtcttgacatgtaggcaatctgagtgaaagtattgaaatccaataagctaggaacatgttgcaagtgattaagatgaactgaaactaacatataccttcaccctcttgttattatgttaattatatgacccatcttttgatgtattatgcacatatatattatttggataatgttgatttaattagtaaaaacgtatgcatgcatgcatgcagatatatttgacaagttcaaagatgagaatggcaactttaaagaatgtttggcgagtgacaccgttggtttgcttagcttatatgaggcctcacatttgagctgtgttggagaaaatttactagatgaagccctttctttcactaccaaacacctaactgaatttttggaaaataataaaaaagaacaccccaatgatgatccattatcaaaggaaatatctcgagccctagagaggcccttaagaaagaccctagtgaatctccatgcaaggtatttcatttcaatatatgaaaaagatgcctcacataacaaagtattgctacaacttgcaaagttagatttcaatctattacaatccatgcacaaaaaggagcttagtgaaatctcaaggtataaataaataatgttggtgtttatgtgaaccccaatactctgttgatatttatatcatctctaatctctctttgcatatgtaattaatatattataattattaggtggtggaaggaattagacagtgcacacaactttccatttgcaagaaataggattgtggaactatacatttggatattaggagtctattatgaaccccaatactcttttgcaagaaatattttagtgaagatcatagcactttcctcaatcgctgatgatatttatgattcatatggtatatttgaagaacataagctccttattgaagcaattga

SEQ ID NO: 18119 - DNA, 2488 bp, Cannabis sativa
accctattcttttgacgtttcttgtgagttcctttcataatcttacaatattcgccatataggtaaccaatagttacttaaattttcgaactttgtcggagcaaactacatgcctaaccaagatgtgttacaatgtacttgtctctgcttctaagttcaacaaacctcttcttcattatcctattaccaataatcacccaaaataatgcagaacctcaaactctggaaaacaaattatggtgtatagtgtaaatctaataaataagtatcctctacaacttcaacaaagtcatacatgcaatgatgcaatacataaaacatctattgccaaccaaaatgcccatagtagatgcaagcaagtttagcaaacttgattcttgaatacaacaaattaacaaatgaggtactattacatacaagataaaacgtcaaacctgaaggaggagagagagcaatggaaaaaataaccaccatttaaacagaaaaagaaaataataataataataataacaacaacaacaaaaaaaccgtatgtctgttccttcaaaactgactattcttcatttagctgaatcactgatatactgtcaaaatctatcctaccgaaattcaacattcttagaattctttgagaaacaatcatgaattcatataccaaaatataggtacaaagagttatggtctcttcaaacaaaataaaggatataaaatcaatggcatcaaccttagatgtcacatttgcagcaaataaaatgcacctgccattgtgatgggttagggatagcacctcaactttaattaggaacacagaacaagcagcaaaatcgggcatgatctagattctaacgaaacaaacagcagcataaataataacctgataaatttgccaaaccaaaactaaaactgtattggacttccatttcattcccaggcaaagaccagaggaaattatgctacacaatctcagggccagaaattggcaatgcactcatctgcagtgttctaccatttccagttgaaagaaaccgaacagtaggcaaagaaggatcgttgacggattcaatctcaagaaaattgaaatcataagcaccagagcgcttcaaactgaagacaaaaacaagcaaaatccatcccaacatggaaattgcccaaaagttattcatcccgtgaatcaaaccccacgcaatggcatacccgacaatgattcctgacaaatgtcctagaaaacttgcttgtggaacaataatagaagtaaaaataagtgattcaaatggtgcaaaactgatagggagtgaaagaaacccaaaaagatccaatttcgatgatggctgtcttacagagagaattgtcatccacccaaaaacaacacaagaatatccaacagctgttactcttctaaagtactcaatcttgaatctttgaattaggacatggtacatccccaaaactagaatgccagatagaacaaccaggacaagtgtgtaatgaagataatattcaactccaagtcccaaaggccccaacttctcaaccacaccaagactccaaagtgcactcatattaaacacaagatgaagaatgcttatatgcgaaaaggccgaagttataatcctccaatggtgcccttcaatggcgttttcataactcaagcccacatgggaatacccaatgtttttcttctgaatgtagaaccagattgcactgcatagtcctatgatacagcttgtagctggcttttccaaaatctcataaatcaaaggccttcccatttattccacccttctttcacaaaatctttactgactctccacaattctttgatgtcgattacggaaattcaatacaataatcttcacaacaacgctaaacccgtaacagaaaaaagagcccttttcacttagaatcaagatatagaccactcataattaggtaagtgtccctccaaaagcagtcaaatttaaatacctgttcgatctaaatcccctaaaataacttaaaaactcatactttagtgcatataaaggcttagaacacttttctgtgaaataagagtcttgcataacatcaattataggggcaactttctttgagaatctagaagaagctacaggggaaacttgtttgggcaaaaatggaaactcaaattcaatgatcgattatcttcagagttaagcattaaaaagaaagaagtgaaagagatctacttcaagtaatcaaagaatcaatatcggtgaagaactttctcacctgttcggcttcaaatcgacttgttccggctttgattttctgggactttcgagtattttcgcattccatacgtaataatattggtaaaaaaaaaaaatgaataaaatgtcggttttgcacaaaatgcctggtcttacttttattcttgtcacctgagaagtttctttttcacatagaaattttttcacaatcaagttttgtgaaaattatatatgattggaaaattctacaatgaaataaa

SEQ ID NO: 18120 - DNA, 6122 bp, Cannabis sativa
acactcacacacttcacttatcctacaaggattttgtaaattttcactaaagttcaaacagtttgctatgccatctataagtaattggaggattagttttaatgagtaataatatatgcacccacccaaatgtgacttatgtgacaagtcacttcaatcaattatttttatttaaggtgatctcactaattaaaaataacttgccaaatgtatgtcctatttgtgtataatttatgtgtgtacataatgttattggttttaaatcttagtctatatcctacactaagacagatttgccagttgatggccggagtggccttaatggaatttattcttcttctttttttcttttttttttgtaaagggcctaaatggaaattccacttattactaataataaaaatgtcttttcttaaaaaaattaaataaattagagaattaaatttgtttgtttggtggagaaatactaaaagataaaaaaaaaacattattagtgagtaatacctttctcagtgtcacatagtattattagtataattaaatataaatgctatataacttaaaaagatatcattaaccaattataattcaccacaaataaaagatgctccaataacaatgtttttgggacaattgacaaatttcatacgagattaaattgggaccataagagatgatggatgacaaaagtacaaaacattgaccacaaaaatttgtaatataaaatccaaaactttgatttgaaaatcagatcccaaattaatcacacgagacgcattatcaatactattgtctttagggttttcagagctgaaaaaaataaaataaactaataatggcggttctgagaaccaccaccaccaacgtcattctcaatagacttctccaaccctcgctttctctttccctgctgctctccgattccagtaagctcagcgccactatcaatgcgctgccgcaccgcccagctgtgcagcgagggatcagcttggcccgagtacggtgtacggcttcgggttccgacggtggcgggaaggtttcgtctcgattgtcgcatgtgcagcagctcttgcaggaggctgaggagcgggctctcgaggctgacgacggtcctacccctaacatcactctgggtatgcaaaatttaagatgttggggctcatattttttatgaacttaattatattgactaattgatctcattcacaattatctatttcaattcagtagcgtagattcgagaaaaacttaatacaaccaatgaactatagaagccctttttgaaagattgcgatgaaggaagatgtttctttagtcgtcattcgcctcttgatgagtaatttgacttgtgataaaaattgcttggagaaaaccaaagatattgaccataaatagaagtacgtttttttctttaacatctgggagatactctgcaatagttatagcggttaaaccaactctcataggagcccctggtgattcattcgtctaatcatagagtagagtgatttttgattcggcttttaactgaaggctaggtatgtggaagaaaatgagaggtatttagaaataaatagtagggatagaactttgcccttgttttgtttggtatcagaggaagtaggaagaccaaaatctttatcttgtttgatgtagcaatactagttaagaagaggaaatcacagtcgagtgacgttaaacttctgagctatcttcaatttaaaatttgttgatgatcatttaaaatttcctacagagcacaaatggtcaggtatatagttaaatggtttacttctagatgtccttaggtacctacctagtaattgtaataatttcttgatccccaaatattttttgtttagacagagtacctagtttccaaaaataatatgtgtgtgtacatatccattgatccactctttctacttctccctggtaaagaacattctcatttatgtgttgcagactacagaccatttgttgttgttgatggttattagttcaggcgtgtcagactagttagtaaaatcaataggtttgtattggataattttcagcatcaaatttttatttttacgtaattagagagtatcttcaaaaaaattaatcaagtcgcctaatataggatatttattttcagtatcctacctagtcttctgacttctttctccatatgtacaaaagtttacaattttatatatatatttttttcctcataattttttgtagattaaagttcatttcgctcctttttttcttgttcttactttcttaatccaattcaattttatcctatatattactcaccaaacaagccttactacacatggaaagtactatctttaatcgccattctgttatttatttattttccattcttttcttcaccagaccatgtaacagtgagttttgctagaagtggtggcccagggggtcagaatgttaataaaggtttgcttaaagactattttagatcggtattttttatgtttatctcccatcttattttgatgcccaattctagtttttttttttcacttacagtaaatacgaaggtggatatgcgcttcaatgttaaaaatgctcattggctaagtgaaaggatcagggacaggattatgcaaatggttttccactgctcattagtttatatgtttagttttcaactcactatgtttggatggggacatttttctttttccgtctttcgacaatgacttgccattttccttgtaatgagcaggaaaagaatcgaataaacaaggatggggagcttgtgatatcttcaacaaggactagaacacagaagtacttctttcctcttctcctttaattatccatgttgcttctgagttgccaaagcctttggattgattcaaccattcttcttcaggggtaacattgaagatgctttggagaaacttcaggtattaatgaagggatttgtctttcttatttctatatcgagttatgatgagtattgaaatttctcttcatcatttcggcgatgatgtcaatgaaatcttaaaataggcaatcattgatgctgctgcttatgttcctccacctccttctgaagaacaaaagaagaaaattgcaaagatgtaagctctctttccattgtttttacctgccaatctatgatgtcttctacttcttttactgtgttattgcacggaaagtgagtgtatccaatctggattttcatgtcgatctttgttgcttttgaagggctgctattggcgaacaaaaacgtcttaaaagcaagaaggttctttccgataagaaggcattcagaagaagtcggaatagttgggattaacataccatatggtgtagagatcatcatatatatgttagtgccttttcttcatcacttgggagtatgattgttcatatatgactcctattattttgtttcgatatctctatttttccttttcacccatttctaataaaggttattctttgttgttttttgcaggggtctcggtgatgcattttgcattagtaatccatacaaacaaaaatctagagatgaacattattgtaaattcgttgaagaactctgctttttagattgattacacattaaaattactgattatgatataacattgtacattgtagttctccttctcgatggagaactagtctaaaagtgagtgcgttttgtaaatctttgaattgaattggttctcgacagaatatatgttaagaaaaattctcacatgggaccttaacaaatgacaccaatattggacttttttttatccaataaaactgtgataggttaatttatttttctttcattattatggaagctgatattcaatcactctacgacgaaatcgtttctcttcctccaatcactattaatgagtcgatcgtggatttggtcaatgatagcttctattcaaatgggtcaactctcatattggattgaaatggttaacctgcttgcgttgttggctcaagacaatgataggagcaaaatattatagtcgaggaagatggggtttcgccattgttgaagcctttggaggagtgctcttcatcagtcttgaattgtggccgccacagtgctttctagtgccgaatgagcgagagagggttaggagtgttgtgagtgaggtcgggacattagttattatgcaggttcttctcggggactcacctatgagagttcaagctcgtgttgcaagattggtggctatgatggctaagcaagatcgtgttacccaaaatacttttgccacagaaaatgtgaatagacctctagcaacattgttatcatttgacatggtatcggtattcattctattgttcagattaataaggagttggagaaaaccatttgggtgtttcaagtagtaagaattcgtataataatttgaatgtagtcacaaatttgtattcttatttgtatatgaagggtcataatagaagtaggaatcataggaaagagaggggaatgagaagcgtgagttgaaacttgagcttaagattagttgtgttgagggctattaaattggccaactctttttgccgtttcagccaacttctttgtgtaatataattgattgacggttatatgtaatatttattaaattaaaataggtgagatccgacattaaattgtactgatattacatcttacaataatactaaacaccacgtttaggtggcaacatttcttaatgtttatgttatttttctttctttcgtactctctttttctttactcatatggtatagaaatttagattacaatcatgaacttctcttattagaaactaggaaacaaactgcgcttcgcagcggtttataaatatatgcttatacaaaagaaaaaaaaattatgaattttctaaaaatttgatagataatatatgcttatacaatatctataattgaaaaaatatgtaatacattacatgagtatttttatagacttctttttaaatatctaggagagctttttaatttgttttttaatcattgtgtacgatgtagttaaataagattaagtgtaaattttctaaattttttgaatgattcaccgtggatagtccttaataactacaacatatataatcataaaaaaaataaactaaagaactttcttgaataccaaaattgacaatattctaccaaaatgtcatttttaaagagtactatagacgtaccctctataatttatactgtcacttaaaaataatcataattctttccataggtagagacatatagtgtcacttttatatcgcaattctaccaatatattaaaaaagggttatttaatagtattgtccctctaactattattactaccaaattgtgctttctaattttttttttgagggttttacatatatattagatttgggggtaaatattacaattatactgctacaaagcaacaattacaaaaatattgtcctggcccattttatattacttctatattgtacggacaaaaagtacatatacgcctccaccttccaaaacaacaaacataaccagaaaaaaacccaaaaaaaaactgtttattttggtgatatggaggaaacaaagtaaaattgacaacaaaacaacaacaaaaaacaacgaatcaaaaatgttagaaacttaaacccaactaaattcttttaaatataacattaaaaaaaaggttgaaacatagatctggaaattaataaaaaaaatagactatagcttctgaaattgtttttatataaatgcataattgaagtaaatgaattttaatatacataatttctggaaaaaaaatgttgattaagaattaaaataaaattttaaattatctaaagttgttctagagttgttcttctttaattacatgaactttattggcaaatatggatatagataaaatctggacactcaaatgatagatggaaaattgaaacaaaaaatacaacatcgatggttgtcttcgcgttattttacaattattgtttgtttgtgaaaatgttgattgtttaaatactgtcaaaaaattgcaggttatggaatctatacccattcttttgaagagcaatgggcaatgggaagaaagaaaaaattatgtcaattatgtggctagtggagaattcata

SEQ ID NO: 18121 - DNA, 1720 bp, Cannabis sativa
gtagcaaaacaagaagtagcaagtcccaaaggcaaggagcagtcgtgattgttgacaccataattcatgttcaatttaaatcatgaaattcatcttaccaccccacttatccgagtcgagaatccacgcacaatactcttcatttggctttccaagaaatgcttccgaatactttgctggatcacttgccacagttgcagctataaccttcaaaaagacgaatgaaacaacaagtataagaaatataaaaggccataaataggtcatttcaagtaagaggctttctagaattttaaattattaagcattaatttttatttatgcaaaaattatgtttatttatagaaggaacaaaagacaatagtataaaaaatatctagaaataaatgtgtctgtctcggttggtgtatttatagccaacaacctgtctcagttgtggagcttttagtttgtcatggtccatgacatacctgaaaatgaaaatgatgatagattaatattcaattgttttgtgttttcagccattcacaacgataaaatagtggatggccagaatctgtaatatggttctaaagcttacccaactgcattgaaaagacaactattgtctgatggaatcacccttctaacgacaataccttccatttttatgcacctgagaggtttaacaactcaacagtcagatgccttatattgatttatattttataacaggctgacaaactcaatcaaagaatagtaaaaagtgatgaaataaaggaataaaactcatgaagtaacaatccattcaaatggttaaagaagaatgtatcactttatgactagaaagaacagacagttattttgaaaaaccaactagaataaggcaaagtttatgatagtttaatatatatgcgtacaaagtttatgtaactgagaatgccaactattggtgtgtacatgatatgattaaacatggaaactttgagtttctatgctcatttgtggcactataattagaaaaaatctctcacattatttacctatgctttattgatttccaaaattacctatttttttcactttcccaatatcacgtattctcttgttctctctctctctcaacctcacctaaaaaaaaaaaaaaaacccagcatccaaatctctcaatatcaaaacccataaaaagatcattcaaaatattacattcaatcacaaatactgcaaaaaattgtttgtgctgacattaaaaagcagaaacacctacaaatcttaagaaaaaattgaaccttaacttttgaaatagagaaagaagatggaatcttgggattgatagagatggctccggtctcgtggatattggcggcgacgggtgcggttggactccgtatgcggcgaaggaggctatcggactcggtaggcgacgacaaggctcggtcttatgggtgcggcttggggtgcagctcgtgggtatgactcaattggatccgaccgtcacttatgatggaggaatatcgccggagctacaaagttggtggtaagagagggtatggaggctagttaagagagagaacataaaaattcgtgcgattgggagaggaaaagaaaatggtatgggtgattttagaaatctgaaaaataacgttgacaaatgtatcaaaccacagtcacaacaacttctccaagttaagccaaataagaattgtaaaattttttcttttttttttaataataaaaaaaa

SEQ ID NO: 18122 - DNA, 2576 bp, Cannabis sativa
gccacaaccaacttttgtgttatcaattcaatagcaaggtggtaggtgtactacaacaacaccactgccactactgctactatagtcactgcacaataaattttttattacattgaataattgtatagtgaattgtttttggtacatttatttttatctcatttgatacctaagagaggttatttttagaattattgtaaattttttaaaagattcaaaataatttattctgtcagtttagctaatttttaacacatgtaactatttttttttatactaatagtatgtatgtaactgtttaaaatttatttttaaaactataaattatttaaaatttttaaaaaattaaagtacaagattataaaaaaaaattagacttaagcatataaacaaacttaaaaaaataaaaataaaataaaacttgaatctttttttggtggtttagtataaaatttagtaatagccaaactattattagccgtcagatagatctagtgatctacgatagaaatcgcatcacataacaacacattgaatttcaaccaaactgattgcaccattaaattttaatgtagtatacaagtaagtatatcttttggcaaattaattaaacacatcaattgaaataatactccaaactgaaccattttgggaaaacccattttaataaatcaaatctatacaaaatatatttgtttatacctggattgccaataaaggcctatgactgccctccaagttaagtacaccattgtagggaatcaaacccttcaagctagatgtaccttcctccactaagagatcatcaatactaatctcatcagccaaagcctcaacgacctcaacaccttccatttcatcgtcgtattccactctaaacactccttcctcgtctttcccaagcttcccagccaattggtagaaatccaccaaaaccacactaagtccttccttaagtttctccacactaccctcgaagttgtcgtttcccttgtaaagcatcaacttttggttgtagtaaaaagccaagtaagggagatcgaaggtcactagctgacactcttttcttcctatgtctttcttcggcttcacgtgggattttccgaccactttcaccttcggaatctccattgtttaaactctagagagaaatggggtcttggtttttttttgttgttgagaaaaatgtaaagaggttagaacgttacttatagtagtcacaagataaaaaagataaaaaaaagtactctacttgtgtagttgggtagcattaatgagtttctaggggtgtagttgtgatcatttaattcttcttcctctttaattttaatgtgaatttttggtgagctatatatagttttaatttaagttatatgtgctgtgttttttttaagaaaaaattttcattatacgttactaatagagtatatagtgtagcacaataagtatcaatgattccgtattagtttttggcttttttttttaacaatttactggagtaacatataaggaaatattacatgtttttccaatgactatctaagaagagtccaacgagcaaaaaagggctatttcaagttaagaaggccataggaaagctaataatttcaaacttattgtgattgatgggaaaacgattattggatagtaggaaagaaagccttaattaattagtagatcatcatttactactatgccaaccccacctgtactgtatgatccccaacaacgtatggtagggattagatgtacaactctttaaggatttgatgtaggggaatgtgcactcactacaaaaacgatgacttttgccggtactcttaggattattcgccgcctaaaatagggtttttcgccgttttacatgattgtactgcaggtaaaactacagcttttatcactctgcaccttttattggcattaaaacgtgtcagtagcacattatcctaaatgtgccagcaaaagtagttttagtggcgcattggattaatggcgcctgcaaaagtgtggaagaaaactccatgcatatgctggaaatttgggcacccaatttaagggtcttactgacacattttagtgtcgacaaaagtttaggcgagatcaattcccctacatcaaatcttaaagagaaataaaatacccattaatgggtaatatccattaaaaagtattccatatatatatatatacacaccctattctaccaccggaatcaccaccacaaccaccaccacttcttttttcgttgaatgtgattaagaaatttggggtgaggagctgattttgagattaaaagttttattttaaaatggataactattttagggtaggagggtaattaagagatgaaagagagttgatttttgggttcgcagatgatttttggtggttagtggcagagaagggaggtgaaaaatcgttgctaagaaaaaaaaaattaggttgaatgaatggggaagaagaagatttcttattttaaaaactcatgcaaagtgggcacgacactgcaatttcgtgtcaattgaagcaaatggcacgacatgtgtaacactctaaataattaggcacgctaccca

SEQ ID NO: 18123 - DNA, 6138 bp, Cannabis sativa
  modified_base (256)..(260): a, c, t, g, unknown or other
  modified_base (4701)..(4702): a, c, t, g, unknown or other
  modified_base (5011)..(5017): a, c, t, g, unknown or other
  modified_base (5439)..(5447): a, c, t, g, unknown or other
  modified_base (5520)..(5529): a, c, t, g, unknown or other
ttgtaaacatattacggtcaactttgtaattaactgcccactatgtaattataaatagtggcaagtaagatgaaaagggggacgaaaaaactcatacaggagaggccccgaaaacaatcagaaatctgtataagattgactcgtggactatgcagaattgtaactgcaaaaccacatagaaaaccctgtgttcatatttttatttttacagcttttattgtttctgtgtgaatcactattgtgaggctcaaatttnnnnnacgaaaatctgcgttaacaaaaccaaaaacatagctaagaggatcgccaatgtagtactaaatttgtgatgtaagactatatttttttatttttttcataaaatgtttctctaatgattcgataaatattgtgctaaatttgttactagataatacttcatcaaatgattgtacaaagagggtggtaggttatcgaaaataatgggtggaaaagaataaaaaatagaaataacaagagagcaaagtaattttttatcgtaattgtatcaaatatttacttttgaattcggtatggataaaagatcctccttgttatactattcaatttctaacgatgcatcgatttgtcaaatattgttatttatgatattaattcaattcgattacatcaataattcatttaaatttccgtgcatatgcaaaaaatgataataaatctcgtcgttagttaataaataattaaataaaatataaatacttatagactaacgatagaaattgaacctgtgcatggtggcttctgatcgatccatattttattttaatttcattagtaatgagattcaacaactaaacaaaagtggattctttgggatccttcctttctttaaatagaagccgattttataaatatctttctggatatcttatttattcacggaacataaaaagcaaataattattatatagtattgtgttaaatttagtaaatacacactattttttatttacatgtatatagtttaattatttatttttccggaccttattgctttgttaagtgttaaggtaataggattaacacatgggccctagttatgctaacattcaactctagatcgaatcaatcaatgttcgacacctagctagcacttgatgatgccttcgaggaactcgtcagtgttggcatgaacttcgtaatgggattgatagttgaagctatcggagtccgtgaggttctgagttggatcagggagcgccattagaaccgatcgagtggtgttaagacggattgtttgagagtgtggttcaagcaattcctagctctccttttacactacgaattctatctaattatgatcataaaattcagttcatacttttggctcatgtctgaattgtagtaacaaaatctggttcatatcaatccaaaagtacgtaactttgcaacttgcactgttgcacaggcaaaaaccactttttagataagataatgagatcatcacttcttaaaaataataatataagaaaacacagtacatattttattcattaatgatcaattgaccataacacccaacattaataacaccccaacattaataacaccccaatccaaaaattattaaaattcaattactagagaatcaaagaaaaaagggtggcgggtagtacttaattagtgtccaaccgctgccaaattattctgtctgtgtctctgcctttaacaaaagcaggcagagtagaccagaatccccattttcttaaatcttttatttctcttatttcttttaaataatacaacaaaaataggtttaggacccttttaaaataagccctagttttctaacctataacatgactcttatcacaaaagaccataagaagtctatatctataaacccaatccaacttaatctttttatttttgttaaaagaaattataatttatggaggggtttgcctttataattaatttgtttctttaatggaattgtaagccagtaaaagtctgaccaaaagaccagctagcaggggcaacattgtacgagaccaaagttcgaccatcactagttgtgaccttaaaggagagggcttgtccattgaggtaagagttactttgccaattttgaccccagtttcttgacatggattgccaagatgattttgaccctttgattgatacggcggtgacgtcaccagccccaccaacgttggtgatcagcactagattgaagtatgaatggccgttgattgtgaatctgatgcctcctctcttttgacaagggaccctaaatataatacaacatacaatttttacacatacatgtcattaatttacccaaagtaataaaagaaacataggaattatgcatcaacaaaaaatgacaaattagcattgtcatgatgcgccaagttcagagtactgtcatacagtttcaaatattttttggtttggttttgtcttcaagtagatgtttatatttatcatttttacatataagtacaaaacaaaaaatcacttaaaaatgaccgtatagctagtaattattatgtcaagatatgtcatgctgattttgttgtttgtatcctcaattaatataatcttaattttcttttctattttctttgttctctttctctttttgtacaattgatcatcattaatctcaccatgcatgtatcaaaattcaaaacacagtaacaaactatattaacaaatcattcataagcaaatatattggacaactccagaagctcattaatatcgaacattggtattaggcgttaggttgttggtatttggtaacacaataattctcatagataaattaattaattcccatgatcatatacataccttcggtaagctacaggaacaatcccagctttgtattgggcaatatgttgaaaaacaggctgagagagatcaaagtgttgctggggagggttgcaccagccgccagcgttgttaggcagagcattattgggtgggcagaaattggtggctgtgaccacgatggtcgaccctaaacaccacttggggtcgttcacacactttatctcaaagcaagctccgcagctctgcccgttgttgaacagagctgtgctcagcgccgccgtgttcgttccatacccttggctgtacaggttcccgtacccacaagccccgcctatatttacataggtatttatgtacacatatatatggtcacattaattaatttgttactgcaaattaataacattactgggtagctagtttagcttacttacccattgtaccagaagcgtctccccctccgtagaaagtggcatgagcattaatccaaccttggtctctcccataaacataaccatgacaaaatgagctcatcaagaagacaattattagccaaattgccatactatattgctctgcatgcaaaaatgtattccaacattaactttttatagtacatatatatgcactgttgcattaattgaagtttgcaagaaatttggacaaatatttaaaggccataattgaattaccaggtggtggatagttgagaattatgaaatttgaacaaggtagagagactagacagagccagagagagtgaggaagcgagatgcggtggagtaaagatgaatgaagtagtggaataaatagaggagagggttggggtggcaatagttaaaacattgaaaaatttggtccttaactgcaaatacttgatgagaaactgacactaaattgaggtgtggggaccttaaaccgccaagtcgaatggatttctatgtactcgggaaacaggttactttcctcaaaccacgtggtttccgacttattcttactgttttttcctttgtttactctgccaatactataatgataatgaaggtcacgtaaaattgtatatgttaaaaacgacaactgagattttacaggttcgaaatcccaaacctgggttttcagtattgttgcttcctaaaggccgataaacttttcattttagtaatacactagcgaggtagcacgtgcttggcacggtgggtggctccttaaactatttaagtataactatattttatgaaataattaatattttgtctcttcaatttacaacactataactatataattgtattatttaaaatatatatcatgttgaaaaaaatttctaaactcttttgtttaaagatataatatttttgttaactatcattcttttttaacatttaaaatttaatgtggcattattaattagtatttttttttctcaaaacattatgtacttctaaagcatgcttctttaagaaagaaattaaaaattaaataatttttcatattttttatttaaaataaaaaaactcttacctaaagtgtatttttgatcaataaatatattattattaatttagatgagaaacttgcattttcatttttttttatacttaatattaagagttagtcccacatagctaatgtgtggaaataaattgtgatatacaattcaaaataataataaaacaatttactttttctatttatctctctaatatggtattagagtcacttgtgatccgttgtgaacccaataaaatttactcacaacatttatgttgtcattttttccaggagggcaattggtaaaatatgctagtatcagatgtatggagtatacattggactggattgatattgaacatgataaagatatcataaacttaccgnnatatctttctaagtcaatatcatcaagttgatctcagatcaaaagattttaatcttgatatggttaggtttgatctcaagagtgttatttatgttcttagagttgttcgttaaagcttgccaattagttcgagcaaaaacatacatcttggagacatgatagtacaattgagtagaagcgcaaaatatagatacagaatctatagcttctatctagatatagaagtgaaatgatgatttctttcgagcttggcttaatagagataaatgaaagagctcttatttcagtaattatattaatttactgaannnnnnnttataggaagctaagtgttttaaagataaaatacatagagggataaaacggtaaatttgtccctacttgatgtaaatcatctataaaagatatttgattatttagattaaaacaatggataattcatagtgtatctatatcttggaacatatagagcattctatataattaaaagtacaattccaaatctatagtgacgcaaggaggaattaataagctagagaatttactcgataaattctagatctactttttggaagcttgattatataggcacatggtccccacactagttgagataatactgcttgtagactcagttaattttctttaattaattaatcataattctaaaattagactatgtcttcttaatgaattttcactaagcatgagctttattgtgaagaaaagagattttnnnnnnnnnttgttaattaagagactttattaattctaattaataaataagttgaataacaattttatttgataattaattnnnnnnnnnnaataaataattttgacatttaaaggattaaaattagaaaatatggcattagtgaaagaaaagataaattgttgaataaaataacaaaattctaactagtggggcccattgtatggccgaccacttaaggagaatttttagccagtttttatcttttttataattccatataatttaaatctaaccctaaaataattcctatataaggaataagatggctctcattctcattcaacctaataacctagttttctaactttgttggacaactagaatttgagagcctccttcctatagtattttgaaatcctctctctccctcttcataattttcgagcctatagtggaagagtacatgcccactcatagcaagtcaagtactcaatcatagtgtggaagactgtgaagaatccaacacctaaaggagaatcgcgctcaaatctttagtggaaggagacatattattttgctgacaccaatgtaaggtttcttaactttatatgtgattaattccacattttagtgagttcatatttaaggtgttaaacaacatacacgttagtaaatctagatcctagaaataatccccaacaactagcctcagagccat

SEQ ID NO: 18124 - DNA, 7402 bp, Cannabis sativa
  modified_base (7341)..(7352): a, c, t, g, unknown or other
atacaagggttagaaatctaagcgaaatgagtcatttaattccactgcaaccaatgtaaggtttctcataccttttatgtgtttattttcatcattttagaagttcatttttagaatgttaaaaatatactggttactaaatctaggtcctagtaaaatatattctaacaccactatgtgggaaggtgtttcgagcaatggcaagtttgcctttagtatgttgtactaaattctacagggtactcatataggcctccaagcaaagcatatgtattcaggagattacatatctaaattatcaatgaaatgttgaagttctcactttacatatgaaattcgtcactctccacgtgtctgcttggcttgctgactatacttgtcaattaaaattgtcaaagtgaacaaagtagttcaaaaaaatgggagagagtacaagaaagaaaatacgtgcaaaactaagtgtagagttccatgaatgacactacacactttggggcaaggggagaaagtaatttttttgaactcggcaaggactagctaccctcagttgacaaaagaaatacactcctcttcgcaaaattcacttagccaaaagaggtcttgaaagacactcacaacccattgctgaaacaagagggatgcctctcaggcgtaagaaaacacttgcaaattaagagagtagcgctgtcaagtacaataagctccctcacatcggagtaaaaggaataaacaaacattcacaaatcaaaaggctatagcgcggttaagtatgataagctcccttacatccgagtaaaaggatgaataaataagtaagaggatgacaccgcttaaagagtaatactcccttttatgaaaatatgcttaccacagcgggaaaagtcacttggtcaaagaataacactcagagtcattcgaccaacatctgttacaaatgctatttggcctcatgacgaccaaagtcactcgaccaaagagtgaaaaaatatcaatcgacctcatgaaaaccaaagtcattcggccacaaagtgaataaatgtcactcagcctcatggtaaccaaagtcacttggccgaagaatactgaacaaatctcactcggcctcacgtgaccaaacaaatgtcactcaacctcatggtgaccaaagtcactcagccaaagagtgaataaatctcactcggtctcgtgatgaccaaagtcactcaacctcatggtgaccaaagtcactcggccaagcaaatgttacctggcctcatgccgactaaagtcactcgaccaaagagtgaacaaatatcactcgacctcatggtcaccaaagtcactcagccaaagagtgaacaaatgtcactcggcctcatgatgaccaaagtcacttgacataagagtgaaaaaatgtcacttagcttcatggtgaccaaagtcactcggccaaagagtgaacaaatgttcgagcctagcaactcttgtagagaaggatagacctccaccattagaccgaggaaaaagttatgaagtgaagaagagaaaggttaaagcctcctatctatatatactaactgcattatcgaagtacatgtcgagggaaaaattcacaaggtatccaaaagacaccttaataaatagtccccaagaacacttaaaagaattcttgaagactacgggggcaagtgctaaccccaaaaattagcacttgtaattttcgaggttagctaaccaaggcatgagggatggcatcgaaaagatcacccaacccaagaatgactcaatgtcattattccttgagagcgactaatgtcactcggccatgttgcatccaaatgtcactcagccatgtaacatgcgaatgtcacttggccatgttgcatgcaaatgtcactcagccatgttgcatgcaaatgtcactcagccatgtaacatgccaatgtcagtcggccatgttgcatgcaacccacacttctcggcttggtcggccataccttgggagagggtatactcaaggccgaccaaccttcgatttgatgcttgtacatggccagccagccctaagctgggcagtgcctggcaacccacacttctcggcctggctagtggagtttgtgcgttgacatggattagatcacaccaattgctggagtttggtggatccaaatgtctgaagtgattaatttaacttctcaaattgttgttttggatatttccttctgctcccagtctttgtcggttgaaaattgatcttcgggtgactcgctccccttggagagggagtgctcttatttggccggccataagaacttttgaaggagtctggccgaccacagaaacttttggaggagtctagccggccatggagacttctggaggagtctggcctgccatgtggactcttgttggtggttggccagccataggatggatagtgggggctgttgttgagcttgagatccctggtcggcccctatgtcgatgcttgccaggatttggcaattttttttttttctgttagacctttaaagcaagatctgtcccccctgtagacaaggaagatctattctactctctgaggggacaggttggtcagcttgtcaatagaccctccctatctatcagcttgtcttccttgaagtggatctctgatgagatcctagcctcttctaccagttctctggttgaaccaccttatcagattgctagcctctctattgcggcgatctaatttttcttggtgagattgaaggacgtactcttggtcaaccatccatctcaggaatttgcatctctggtgagcgagcacatcgcaatttgtagtgcgtggttcttcaaggaattcgtgtctctactgagcaaatacatcacagtcagcagtgtgtggttctttaatttggctggcttggcagacagcctctctaagtcttaataacttgagatcttctcccaagtccctatgggactcgctaatttctggtcttgtctctcttgcatagtatgggggtaaaacccggttgttgttcttgggggtgcccccaaggattcttccttcagttagaggtggttgtggagggttctcccttggagacaagggccgactattcatatccactaggatgcttgtatcatcctgacaaactgtagtgaccaaattcgtggtgcctattatgggggcaggattgaccaaatctgtagtgttgatggagattatagttgtggctagatcataaacttcgggatctgtagtctgtgggtcacgagggagacctagagatgcagatggtgcaacttgtgttcttttcatgttaaccatggcgtttgaacagatccgatatctacgctctcaatgaaagcacctaacttgtaacacccaaatttatagggataccacgtgtgtaattttataaactagtttaatactaatagaataattaattattaaaaaccatgataatattaaaaacttgactaaaagaaaccactaaaaacggacattataatggcataaaaagcgtgtttcgaggatccttgttataaaaagttttgcaaaagaactatatacgacgatgcttcaaaaatataaaatcaaaatacacaatacataaggagttccttgagcaagctgatggcttcacaaaattggaaaaagctatctggcaagcctatacaagtgggtaggacaacgacaaataaacatatggcctcatagcgccccaaacattatccagcatgccgaccagcgtagacaatctctattaattctcaaacaacgagaatggtggaggcaagcgtaaaaacgatagctcctttatgccatgaagtccaaggaacaaggaggagaagtgtgtgtgcttcactcttctatcaaaactcccaaagcatagcatgccaagacatactagcaaggcgtgtcagcaactgccagtccaaaggctggcctcctgttaacgcagattttcattaacaaatattcgtaataaactaaacacaaatttttatatatataagaaaattaataagtataataataataatgacactaagtattttacgtggttttgcaattaaatttgcatactccacgagtatatcttattcaagatatttttgagtatttacctacaacattacaatttgtgatctttttctatcaaagattttctgtccctttttctgtagagtctgtcctatttataggaatatacgttggcagttatttacatttaaatttgaattacataaacgtttcatgaaacgtgggctttgatcacgtttcatttaaacacgtgtagataacaatagacaattgcataaccatttatcattcttatcgtcaaagcggttgacgctgacgtgggtataggcatatcactttgcatatagatgaccaaataataacttggtttaattatatgccttctatcaatggcatgagctccagtgtactaaaaaaacttaagaacttctctttgaccataaggtctcgcagactggacaatcatgtcctacatgtttccaagttgttacacttatatattataatgtggaatacacgctaagtgtttcaatagcagattcgtctcgtcaatatttccttatatgtagcgaggcatatgtctcgctatatattacccgtagtctccttgggattatgccctccgaggtagatggtctctcgtcaatacaggaattgatagtttgtgtatccttgtctcgcctaagactatacagtcagcaagttatgaatatactctattagttctatatttaatgagttattctattttgaattaaatgatacaatcattattatatctggtggttcatattccacttgattgacatgtgtcactctctgaagtacagccaaatttcaggtataacacctccatctccgaaggctgacctctgcctctcaaggttggccttccatattcgaaggctgacctcttccttcaaaggctagcctctacctttgaaggctggccttaatctccaaaggctgacctctacctctaaagactggcctccacctccaaaggctgacctccatctctgaaggctgacctctgccttcgaagtctggcctacatatccagggctggcctccctctccgaaggttgccctccatctttggccaggcatacaggcaggtaccaccaatctgcccaaacctctgatggcagaacacttagaggccgtcattgatggaccccatattacaggcgagaacaataaagctagagagtgctatgctcggacactttgtcatgagcccaaaagcgactccctagcaggcaaagaacaaggctctaagcaaccaaagcttggagagcccacgatctcttcctcagaaaggagatcctgcccaagatagtttcctgcacaacgacccctggtcattactacacaaattaggaatataattgtagcaagatacatagtggataatggagcctcactcaacattcttttgaaaatcaacacgtgaaaagatgaggctctaactcgctgacttggcaccttgcaatcaagtgatgtatgacctatttggctgaagtatcatactcattgagtacattagattagccttactgttggagaaaatccaaccaccagaactcagatggcatagttcgttataattgatgttccctcaactttaaatgccacgataggctaactagccttatacaagttgatggcgtaacatccacctaccacctcttcctgaaattcttaacaaggcatgagtttagatatcaagaggagatcagtaatcttcatgtcattgttgcaagttggccttgcccaaagccctgaaataaaagaagcgtccatcatatcaggagcacacaagcttcatgatgttcaatgatcctatcagccgcaactttgaggtgtgcgtggagaacatgcttgtcaagtccaaaatggctgggggcatatggaggacctagatagacaagatccaagcccttttgaacatgaagtcacccacaataatcaaggaagtaaaaagctaaacaggatgcactgctgcactaagcagaattttgtccaagtctacagacaaatgcgtatccttcttcaacattctagagggaataaattcgagtggacgaaggaatgtgaaaccacattctaagagctgaagaaacagattggctcggccacctgtgttgcccaaatccctagacaaagaagagctaggcattcacctagtagtcatagaacatgctgtgagtgctgccctcatataagaagaaaacggtgtacaacaccctgtatactacaccagcaagagacttatcgacactaaaagtcagttcccactcatggagaagctgactcacaacttgctcttggcttctagaaagcaaaggccatacttccagctacaccctataaaggtgtacaatgatcaatagttgcggtaggttctatagaaacctggagcatcatgccaactactcaagtgaaccattaagactcggccaacataaaagcacctgacaacctagcatggccactgaaggccaagtgctcaccaacttcatggctaatcatagaagcatatctccccaaatctctcaaagtttgggagacaagcaggagcaagagaagaagcgagaacaagaacccaagaggtgcattagccatctactcaatgcgagcatggtccccaagaaacctggggacaactaatgcacgaggcaacaaggtcgattttaaagcttctaacaatgaggttgaacactaagctctcaatgttggccccaggctagtacacgaagcatgggctaagaacctagacatgcaccatgactctcagctagtcgtacgttatgacctcgatgaatatacaactcaatatatgaagatgatggcctaccagagctgttaagacagttcaaaggctatactagaaggcaagcccccaaagacggcacaacagctgatgcactcactcaactaactacctgcaccttaacaaccaaggaaaagtttctaccctctcagttatttaaagaactatgtccttacattccaaaaggaacagacatgtagaccatcaacatggatacacctacaatagcatacctccaaaaatgaaaaacttatcaaaaagcagggactaggagggcggctacaaggtgtccaatcttgcataacataacacatagaagtggtatctcaacaccaccaagaagcgtttccaagaaagaagctatataactgttgatagaagtgcacaaaggctctacgacaatcatgctgggggcaaagccaatcgaatgtagatgggattaaactacaacattgattgggtgtgacagttagtagtcccgtgnnnnnnnnnnnnaaataccgggtaagctgtgcaatcccacaccgcttggggaaggtcaagtg

SEQ ID NO: 18125 - DNA, 3950 bp, Cannabis sativa
aatcctacaaacaatccaagtaaaagaaagcccaaatcggcccattaattttaccagctacgggcccaatacagctctaaagatcgaactctgtggaaagaagcagagaactgtggagaaaagagtttcagtttcgggaacgaacaatccatagccatgtctagggaagcttacgcgtcacgaaacccaaatgagatccacacagacgttctctctgaagccaggaaagcttgctataaggtaatttatatcttcaattttgctgccatttctgtgtattgtgttgtttttgctcttttgcttttgggttaaaaagtgcgtttcgcaaggctcgggactccttctacgcgtgtttggaggaggaatcggagaagaagcccactgaaatagcctcggcaggtctcttgtacccatcagaatgcaaagctacgagagcagcgtttgtaaaactatgccgctcttcttgggtaagaattatcacaaaacccaattttttaaaatctcgtttttggatttgaattcagggtgtttgattactgggtttttgtttttgtttttggtaggtgaatcattttgatagactgtactgtaagaacaaaagggttaatcggcttttggatgatagagaaacgaggagaggtccgttggttcttccacaaccttatactttcaagccccctactaataatactagctgatcatttctatggaatattttgaccatctgagtcagctaaaaatgctgttatttcatagctttctaatcaactttaggctctatgactatactgaggattatatacatgtcttgtagttcatataaatgatcaataaccacatatatacaagaagaagaatgaataaagaaggtggtttttgtttttggtatacaattttgatataatgttagaataaataggagttttacctgaactatgatacttgtagggcttggttcctaaattatccttcggttgcatttcgttcatttctgcaaacaatgttatggatttaacgatgaaatatgggaatgtgtatccataattttagtattaatgtttgaatatttaagaccatcatactcggtttcagctggtttaagttagttaaatagtctctcgtattgtcgttatgtgcgtggcttgtggccacaacagtaaattatctcaaaaaaatgagggaaatgcaattgaaggagaaaaatttgctatcatttccataagtctagggagagtttttacaaaataataattcagggtgcaagtgtcctagtgtacagggtaaatagccagtttattctaatgttttacttccactaatccaacaatttctggagttctttgctatagatagtggttggattctttatctttaatgcatgtagaagttgttagtctgacactatgtgataagagtatagttgttattggattcaagcattaggtccaaaacacttgttattggaggattttaagtgaatgttgttgttacttgcctggcctcattaggtgggtttatttatttttggcaggggtatgaggcttcacttggcccctgatcaggtggtggaagtaaagttattgggttaaagttgcatgcatccccaattcaagtccaagaaagagcttctagaatttgagatctgtatcttgaataatgttcattgttttatggccttaagaactaaatgaacccaacaaagagtgcactttaaagctgacacagtgtgtgctgtgacaagaagaatgaaaatgttctatcttttttcctaattactaagggaaaagagaagaacgaacaatctttttagaactctatattgtttgataccttaactagccattgcaaaacaagcagtgtcatgttatattcttattcatatagtactgaagggtttttgagattgttttggtttggctgtggcaacatatgtctgaacctgatttactcaccatttacatatgtagcaggtatgtttttccttctagtatgcttatatgttgactgtcaatatcttagaactttccattgatgaggtgatagacttattgttgaatttggtcgataggtcacccttttatttctttctgtttatggtagaatgactagtagggtacttgtggttgtggaagctatatagcttcttgattgttttatgcaaattccttcgaagtaaaaactaataaagttactactcatcacattgcttgctgtggttattaccctcaggagtggtagttgacattctgtgattttagatgaactaagtaatctacaaataaagcatggatatatagtttacttgttaatgttaaagaagctctttttatgaggggttttaaataagggcgtcagatcagttgcctgaagcccttgatgaattgaaacttcttctactcttgaattatacagaggttggtatttttttttatttcttaatgtggaaaggttttgctggtttgtataggcgaaaagggttagtagatcttgcagatttgctgaagtggattatgattacttactctttaaaactgacaaactatttggaacttggaagaactatatcatcccactgtcaaaacctaatcttccacttggaatattattcctataaaattaaatgactcatttttttttctgttgtgggatggaatcttgacttcatatattccgggcggtagcatttgaccttatctcccaaggtactcccaacttgttcaaagcagcaatggtcttttctaccgccattggaagagcaaacggggctgttgatgcctctcccaccgaaaaaaatggaggaacgattttagatctttccgtcccaggatgatattgtcagttgacttggaggtttccaaagctcaactgaggaaagttgattgattttgttagggaaatgcacagctttgaattttgcaaagctgaaaagaatttcttgaacatatttagctgcatcagggagaattttctcatgaatccattaattcttgcatttctaaatagtatccattgggattgaaatggctgtcttttcaaacaaacatagttaggcgcataaataaacattggaatcatattttgcatctacacggatcacataattattaattattagaaagtctaaatacataaaattttcaagtttggagtatatttttgtgtcagaaagtttggagtactaaatcttaatataagtctataaacaaaatcctttagtacataatgagataaaaaagagaccaaaattcgctgtcataaaacattatgtaaagttaatgatttgtgtgtgaaagctaaactactaggattttgtttgttaagtcatataaagatcacattgtattaaataacaaataatattatatttggagaaaatattataccgaattaattattacgattataaattttaataaaatgtgaattgtattatttaatatataacaaataattcgtattaacttgtattataacatgtacaaaaggttttgagttggggaccccaaccttgcacctaatccccgaacctggtttcaaactcgaaccctcgcccggatatcttggattttaggttcaaggatcttactttactaagaggagagatagtttatggttgaagaccacaaaccttaggaatggagtccattccgactttggcaccggcctcgaaccttagacccagccccgtacccgaactagaaccacagacttggaccccgaacccaaccctaaacctcgacacaaacttggacccagattcgacctggactcgacccaaactcgaaccccgattccagccccggccccgaccctgaatcctaaactcggacatgaatcaaagtagaggtcgagtttatgctaaagaaaatataattttacataagttattaatacaagtcaataccaaacatagtattgtaacagataatattaatacaatataatacaat

SEQ ID NO: 18126 - DNA, 3997 bp, Cannabis sativa
  modified_base (44)..(54): a, c, t, g, unknown or other
  modified_base (3127)..(3135): a, c, t, g, unknown or other
aaaaaaattataaaaatatagttgtataaaattttaaatatttnnnnnnnnnnntttacagaaaatacagtcttttttatgcagggtcggtcctgagaatgtatgggcctaaggctaattagaatttggagccctcaaaaatatatataaaaaatattttttttaaaaaaagtattattagatttgaaccccatgacaatgtataatattttacacacctcaattaactataagctatgaatatttagatcaacgatgccatagccaattcaggctttcaaaatattaatcaaatctaaaaattgtttgaatttgaatttgaattttgtcacaaaattagtcattatattcggaagattattagtttttcaatcttcaacaatttattcccacacaaaatgataaaagacatttatatgttcttgcatgaacgatcgatttggttatttgctaaatgttgcattgtgattatcacaacaatacactttgatgagtgcttttggtctaaaacccaaatcttcaagtaaacttttatagtcaaatagcttactttcacaacctctataattgccatatatatataaatattggttgcaaattagtgccttttatcagaattatgcttatatatatataaatatatatatatatatatatatattgatagctccaactgtattagcatacaaacttttgacatgtattctcattcttgatgagtccataaagacaatttaacattgagctgttcatttttaccagaacgtcatagtaatttttttaaatattgactttgtacttaacaaaacttgcctttctttcatttttgatctaactaactaaacccttctgttattaataatatcatgtttgactagctagatggatttgtgcaggttcgggtggtcagagtggccagagttgggtttaggcccactcatggatttgcaaaaattccacttacattcaaaatttcacttaataaataatactcaaactagattatttatatatatatatacagggataaaaaaatttcatgttttttcacggaatgtattttgtggtacattagatgagtcaaggtacgttactattttttaaccctaattacccctagatcaatctcaaccctcagatcaaataactccctcatctaacggctgccgtatatcacggaatacattccgtgaaagtacaatcacgagacaaaatcatgtccctatatatattcatgacattagtgtgttaaaatgagaactcgagacctgctaaaatagtaattaggtgacacccaaaacttttgtatcttgagtttcagacttctaaatttttcaggtctgggtcgagggggtccattggataagttagttttgtgtccaaatctcaaaccctaaccatgaacattgtcttgttagataaatataaaaatgtataattcacataggtagtgcaaaaaaaaaaaagtaggtatttaatatagatccaaaatataattgaaataatggatccttttaaaataattatttgatgaaactaaagtatttaactttaacataataatttagttaaaggattaataaatcaatgtccaacaacctaataaattataaggactaagcaccataaaagataaaatggaaaatcgtcccaccaaactaattatttatccattcaaaaaatgtgtacatttaggtggcgtttggttagaaaaaatgaaaacataagaatgtgaatgagaataggaataagaatagaaattgaatgaaataaaatttaaaatgcataaaaaaaattcataaaaaaattattaaattttttctcaccatacattggaatggtctttcattccatttcaaaatggaatagtcattccatggaaagaccattccaacactttattattactgtttttctaatatcaggaaataacaaattaacttaagaaaatagaatattaattaaaaacataaaaaatatacaaaatatttaaaaacgcatgtgatgtttaatactatttaaaaatattatatggtgattgatataaattaaattttaaatttgaagcttttttatttttacacttcaaaacagtttttttttttttacatttttacggaaatagacagagaaactcctattacaacttgcgctgcaacctaaattgcaacaaaaaatcgtacagaaacccctattgaaattagcggtgcaaccactttagaaacccaaatcgtaaattaaaaaaaaaagttaaaaaaaatagtatatagagtaattttcctttaaattttacataatttaatttaataattattattaaatattactctataaaaactatgcattattaatggattaatatattttatataaaagaaaaaatgcatcaatttaacatctttagacttttgagagggagggagggagaggagcccatctagagccgaaagaagcccattgggccagggcgccgaaattgtcagttttggtattaatttttttattgcactcctaccataaaaagattattattaataatatcaacttattacacttcattctctctagtctacttcttttgctattactatttctgacacacaccacaaaccaaaaccatcgtcttgtcttccatcaatttttgggtacaccattctcaatttctcactccctccacaccattgacaaatgttaaacaacatcactatccaacaccatttaaaattgtcatatattgatattggtgtcctatattgatattggtgtcatatatgttgatattgactaaaaggcggaagtagaaaaatttaattaagtattaaatcacaaatattttaatggctaatatggattttttttcatgaattttgacatgtaccaaatcatgctccctgaacttttaaaatcgttaaaagtgtcatctgaactattgagattgttggatttaaagatttttgtctaattttagtaaaaaaaatctaacatggatgaaagttcaaagagcatgatttagtatatgtcaaagtccgaagggcatgatttggtaaatatcaaagtctgaaaagcatagtttactacataaacaatcactgaaatagtaaaattgaataaaattaaacaaaagtcnnnnnnnnnaacaatctcaatagttcatgggaaatttttgtcggcatgatttggtacatgttaaagtttaggggataaaaattttaattagtttattttaatttagaaaattattaaaaggtactgttagtgtctagtactcttttcgatattatactgttaatagtgtaattaagtatcgggtcctatataatttaaaaaaataacttttaagaaatatcactatagcgtcacatatagaaagtattaggcaccactagtgtgcaataataatactctttaatttaataagaattataaaatagtgttaccctttataaagtgctatgtatggtagtattaaacactattagttcttgttattccaaaatttagactatacacatagcccccgagcagttagctaagtggcaagtggaaaccgaccaaagggcacttaatagtaatcatctcttgaaagagatatggttagctccgagaggaaggcacccgaggagggtcgtgtctgcccagagaaattattcaagtgaaatataaaaggaaaataacgtccgggagggtcaaggcctcacagatccccctgatgtgtgtggccccaacttttgtagcgcataactagaaaaagcactatagcttatctctttcgtacaatcaacaaaagaagtttcccacaaagtaagtaaatttggagattttcccactctcttttctcacacgcctctttcccagtatatatatgcggttcatgccattaatagtcacatcagtcgtggacaagtcctgcccttttttaccaagcacctactttgggcatatgttgctaaatttatgatcactacgcaagtgcacgcaatcaagtagtatactcacg

SEQ ID NO: 18127 - DNA, 4611 bp, Cannabis sativa
gaatggtacacttgtaaaaactgtcgttgttgttgtttagaagagcaagaagagaaaatcaaggctgcgatctgttactgcaaggatactctgtcatcaacctcttctcccacgtccattacagtaccattttacaaggctaattaactagattctttttatgtctaaaaggattaagatagattaatactattattattagtgataaagctagtcttgttttatggaagaagaagatctttgattgtagttgttacaaaatgttggtatttttgcctcaataaaaagttatttaaagcacaaaaagatatctttaggatctcttactataatttcatgtgatgacagaatttatattatatattgttgtatttatttaaatgtgtaaactgattacaccaataaaattagtgtacataatggcttcaaatttcaccaatgtaatctgatgaaagtgtttaagtgaaaaagaatattttacgactcggaattaaaagcctaaaaaaggtgtgaataggaagacagaccctccctcctccttctcaaagaagtgatttgaatttagagaaatacaaacgaaggactttacccaccagccatttggtcttctattaatagtaaaatggtgccgtgtgtgtgaccaagtcacaaaaacgtcgtcgtttttcgactcttcccaccacaaacatttccagaagagatccaaatttatttctctgcttagaaaagaaaagaaaagaaagggaagaaaagttggagaaagcgaaggtggtagtgagtggcgattccaatgaagctatttgctagaagaaggagacacaatctttctcttcctactagggacgataatcgccctatggacactcaaggtctctctctctctccgaatcaatacttctttgtttattgcttggaagctgagaaaattttgtgaatgaaatttttcttatgtattattactactgaatctttgcaagaaactacatcttgatataaatttttgtacaatcgaggtcattgaactttctgttgcattttcgctgataaatttgatctctgaaattcaagaacttagtcagaaagtgtcaattgagattccggtttatcttcagatgcaaagcaaacgaaattggagatttgacttgctttattgggtgtgtaatttacagaacaagaggaattggttcgtttgttcgaaggtgaccaagccaaacagagtcgtttatggagggtgtgtattcgattttctttatcttttgtttcctttttcgttctaaatgttgttatgtaataatttgattctttttttctagtagagcgtgtttgcagcgattctcttttgttttgcgggttttcttgtgtactctatttttgggcaggtttcatctccgtgggaacaggtattgttttcttgtatttttgtttactatcacttattatatactaacaatgggatttgaaagaaaaaatagtgatgatctggtgtatgctatcattatttttcattagactcaatgaaatttggtttgattcaaaaagaactaaacgctgaatgcgcacattgttttttcttatggagtcgttaaacttgaggctgtgttatccctagaattgtaaatggtttttccttgtagttttgttgctttaatacttaaacagattgtcaaccaggttaaaggtttggctgtggtatgacatggttatgttagtgtacttatacttatgcttaaaattttgttattcttttgctcagttactttttaacttttgttttcattcgattaacagcgttattatgcttacttcatggaggatgtggagtcttggatgattatatctgcaggtatgctctaatatagtggtacgtttctgcatataatatgtatactatctgcaggtatgctcaacaattttttctgcaattagttgctcaagatgcattttacattgcgttggctgttaaaacaatgtcagatgtgattgctgacctgtttgtttaaacagggtgggtagctgttttggcatgttcattggccatcgtaggactacttaccggctcaaagtatcgcaggcgatggatgtggtgctcattctttgcaagtattatacttgcagttttttggttgtattacatgttgaggtatgtgaactctcacaagacacctctattgttatcttagatagttaagtttcagggctgatagagataagaaagtttgactctgaacctccttctattcacttggttgtttattaatgatccttatgtaggttgccaagattccggtgggacataatttggcttccatttggaacacttaggtacattgattttgttttcctccataagattaccatgtaaattttattaaaatatattctcatattacttacaaatttgacttgcagtggagctggactctccttgtatgtggatcatctccttaatgaatcagcggaagaagtgagaaaacttcgaggctacatgtattcttataaggcccgctgaaagttgggttcaaactttaattattaggaactatttcataaataccaagaaatagggatgtttttgttgttgttaggttgttatgagtgaaaggatacttatgtccatttatattagaagcccttttgaggaaaggagagtatgaaatggacgtaatctacaaattggcctgaaagtttttgtagcagcaatgagtctaatcttcttaacttttcttttatgtacgaattgatttatcttgagaagctttaaaatgtttctttatttttaagaagagaaaaaaaatgaaataaaattatatcattcgaacttcaaacttgtgtttctttctaagcacaaacagagcaaacagaacaagtttagtcaaaaggtatgcgtttgtacttaaacttgaaacatatgagatacggggtaaattatttactttatagttctttaatgattgaagaactgattcaaatatgtgtcactaatcttattttacatttgttcttgttttaggaatgtcgaaacctttcaagaaaaaggattagagcattgagaccaaggcgatgaagagaacaaatgatcaaagaacggattaattttgaaggaatttaattgtttttacacaatttaaataccttagtcattttaaaattgtagattttcacaagaaagaaattaagttctttctaaataacgagactttattttagattcacattttgatatattcagttgttatttctatgaaatataattgttcaaagttttgagtcagtgaaacatatatataaattaagtttagttttataattaattagaaacaggcaaaatgatcagattgaaaactggtaggtgtagcataaaaaattctcagaaaacacagttacactgcgtaaattaccaaacaaaattctagtcaaaaaacacaataaacaaaaacacataaacaagtcacaaaatgcttatgtagatcttttactgcctaagagaatatgtttaattaaaaaagacaaataatctaatcatcttcctcaatgaccttggtacccaatcccttcaatccttcagctgggatctcagcaacagtaacgagagagtagagctcttccttggcatcttcatcatcattcctcttgcgagcaatccgaaccctaatccttcttgggacactcctgattcctctgctccaaatctgcttgttcagcttgacatcaactctgacatcattggttcccatagccttctgagcaaacttcctgatttccttgatggcattgggagccttcttcttgaaggtactataatttcattatagcaaaaaataaaaagttagtaccactattttgacaaggattgacaatatggaaatgtaatcttgatctcacctatcagtcttttcacaacagcaaacataatttacaaaggctatactgacccacctaatgttataattccaattcaattctcatatgctaaaataaagaaatggattactatcaaaccctttcaaccatcaaatgacatttaaaagcagaagcatcaagaactccaaattcatatttgaaaacaggtaataatttcaggcttcagaacttcatgttttgacatttggtatttatacagaatgaaaatctggggaaaactgaaagcccatctaaaaatattaagagcaattccatgacaagagaaaaggttctacccaatccacaaatactataacaaacaacaaaagaagaaagcattcaaacaatcatcataaatatcattgaagcaaaaaagaaaaagaaagtaacaccaaatgcaacaaagtaaccagtaatacaaacaacccagtgtggaacttaccatccatggaggcgtttgtggaggttgatggtgtactcccgtgagaccacctcctccttcctgcccttggtcttctcaaccattctcgtggtccttgtctttcaaactacctgcaatcagtcgtagaatcgttaaaacataatacccacaacctagatccaaaattgtcagacaaattcctaacacatttccagtattctacttatcaaagagaagagtcgcccaatgtagatgcaaacagaggatcaacaagagagagagagagagag

SEQ ID NO: 18128 - DNA, 4099 bp, Cannabis sativa
tgaaatgatttttatttagggcataaaacccagcagtgtcgccatcgagtaatgccacgtcagagtgcaaaaattggaataacaattatatttggggttgtcccgacagaagcttggttctagtaatctcaattgcgagctggggccatttttacttataaggtcgacgatgcatgtcttgtgtcgatcgcggttcttatttaaagagttcttcgaagctcatttgaatgttagcttctgacttgccagggtcgtaagcctcgctaacgctaacatgatgaatttataagaaatcttcccatagcgagacaggcacctcgcttacttggtctcgatccgatccgattgtaacacttagtttgcacatcaagggctttcgcaattgatatacgccgctttcgtctgtgtactgtccttgatgcctcgctattcgcattaagcaacatatggtttctcgctaatatactaagcaccagtttgtatattgattcctcgcctaagactttacagtcagcaagttacaaatatactctgatacttacgtaattaatgagttattccatataaagcgattgcatcgatccatatttttcttatcgtgacacgtgtcctccactgagatggcagccgaattttgggtataacacttttatttttttaatttttaatcacaaaattaaaagtaaaatttgtgtttttaattttttttttaaaaataaaaatgtatttactcttgtttttaattttaaaaacagaaaacaaaagtgtgttatataactttcatttttatttttatttttttattttctttaagttgggagtccaagtttgaagccggggtgtggtccaagttcgggactgtggtcagggccggagtccgggtctcaaggttgaggttggagtcagagtctaaaatattaattaaagaaaactgtttaaaaaaattttgaaagaattttttttattattttaaaattttttaaaattttagttctcaattaccaaatggacttttaatatattttaaaaatattttcacatgtcacgcgcagggtcacgtgctccccttatctgaaaagcataaaccaaaacgacagaggcttgagagcgaaacgtgaagcaatgagcagcgcagaattatttgtgactcaaaaagccgaaaagtgtccttccattagatcacatttacagctctaagttgcttcaaaacgacgtcgttttgattctcatccaaacgctctccctcacaccatttattctgaggtggtaaagttggattaaataattaaacaaaattgtttttattttttatttttgaaattaaaagaagaaaataaaaggtcagaaaaatcagacccagttatagatgatctctaatctatcatgttatgtggaagaagagtttggattagaatttttgaattcacagagtgttagggtttttttttgggttcgataatggcgaacaacaggtggaactgggaagtgactgggttcgagccaaggaagactacgacgacgatgtcatcctcgtcggcaacgtcctcgccgaagtcggcgtctacggactttgatgattacaagcatggtgcgccactagtccggagatactcgatctctacgggctcggtgttgccgcagcattcggagctgtctaagcacaccattgcctctaaacttcagaaactcaaggataacattaatgtaattggatttgagctctggctaacagcattaacgtttttgtgttttgggttttgaattttcattttttagctggttacgaggtgaggtgaagtggtagtattggtttggttgtgtttgattgttggcattgtacttttaaactgaataggaaatgagtttatggtaatttgagttcagcagttggaagtttcctagttttttgttttttcccttcttcttctcatgaggttggttttaggggatttggttgacgtggtttgtttggttgatgtattttataacttctgtttcatttaaattttgggcagctagcaagagaggattacttggagttgagacaagaagcaagtgaattgcaggagtactcaaatgccaaactcgatcgagttaaacgatatctaggtgttcttggtgataaatcccgaaaactaggtcagctagtcctgtctatgtttatttgtaattttgtatggttgagatagtagctcaatttttggtgttgctttctgtatcgtgtaaacttgggtggcgtttggtttggttggaggtaatgtaatgggatggaatagaatggagtggaaataaaacaatttttattctatttctttgtttggttgcattttaaagtattgaaatctcatttcaatggaatgacatttctactattttggtagaatgaatatttcatttttaaatggaaggaaagaccattccaatgtaatatgagaaaaatttaatgatttttttttatcaattttttatacattttaaattttatttcattcctattcatatttcaattctcattcttattcttatttttatgttttcattcctcctaaccaaacgccacttaaaggtcttcaagccttttctttttgtcattgttcagtttttcggtatgcttcagaatgagtaagatggtcttttttgcaacaataatacttatttttgttggttgcattgtggaatagtttagaggtatttgacaccaagtttgtttcaaccatttttagtgttttatgtttatagtatgctttgatttcttggtggatcataaagtttatctatatatatgattatgatatcagatcaatttgcccttgaaactgaggcgagaatatctccactgatcaatgagaagagaagattgtttaatgacttattgacagccaaaggtactgaacttatgtgggttttcccttgttgacttctctatattttgcatcaaaaacacacacagaagccctattatatttcgaacttcatcatgcatttcctctcttttcgctaaagatagttcttatagtactcatttttaagtagcctactgctaacttcaggaaacatcaagatagcttgtcgcacgagaccattatttgaggatgaaggcccctcagttgctgaatatcctgatgactttaccattcgtgttatgactggtgatgattccttttccaaccccaagaaggattttgaatttgatagagtatatggacctcatgtcgggcaaggtgagctgcagatatgtctagtgcttgtgtgtttatgtgggtttgtgtgctaacgtttgtttttgttgctgttattaatatttgtaaaatatggtgattgcattgtgtattgtattccatagaataatatatatttatatacaaagctaggagactaaataggaaactactaaatacaagttaccctaatttttacaactaatattctaacactcttccttaagttgaagcatagatgttaatcatgcccaacttattacaaagataatcaactcgcttcccattcaaagcatttgtaaaaatatctcctaattgttattcgatcttcacatatcctgtggagatcaggtcttgttgaattttctcacgaataagatgacaatcaatctcaatgtgcttagttcgttcgtagaacacgggatttgaggctatatgaaaagcaacttgattatcactccacaattttactagaatagaagtcttaaacccgaattcagttaaaagctgataaatccatatacacagattgtgccatagctctatattctgattcaacactggatctagacacaacattttgtttcttactcttcttagagatcagatcaatttgggtatgtccatgatcttgtaaactatacatcgtccttgtgctcctttcaagtaacataaaatttgctctaatggtgtccaatgatgaattgttggagaagacataaactgagtaacgacactaagtgggaatgcaatatttggacgagttacagtttgataattcaactatccaaccaatctcagatatttctcaagagcttcaaatggttctccatcacgtgtaagatgcacagctggattcattggagcattacaaggttttg

SEQ ID NO: 18129 - DNA, 3233 bp, Cannabis sativa
tgcttatttttcttataatgtaagacgattcacctttttatgtacgtttgcttatcattttgatcttttttttttttatccaggcaggtttattgaagtgttagacttcttctaggttttgttattcaatgtttctttgttcttaatcctcattatacttaactgatatttatatttctacagatcgtggagaagcttctgattgcagctgttgcagatgctgatgttactgttcgtcattcaatcttttctgctttgcatgggaatagaagttttgatgattttttggcacaagctgacagcctaagtgcagtttttgctgctttgaatgacgaggtttgtttcaaattagttttgatttgtgttcactttgaaatatacattgtggaaaaggagactagaatatttgatctctactgatttattgactgcagtatacatgcttatttataggcaaatttacaactcagttcagtagagagaaaatagtaactaactctagaaataaggaacctatctaaccgttttagaataaggaaattcaaatttaaatagtaagtaataggatatttatgagtatttatatattaatgaaatacttgtattctaacacctccactcaaactggtgcattaaagttctacatgcctagcttgcaaatcatttgttctaaatagttattggacaagcctttaggttatatttggtaggaagagtggagacttggatggatggagatgatgatgtcttttccttatgttgttggtattgagagaagagtgggaaggatggatgaaatttataaatataaaagtactaaaccatctattataaactatatatttaaattatttaaagggcatttatgtgattttcccttatatttttgctctcccatatttggagggatttatatttgaggattaggagggagacctcatcatccctatagtgctccttccttataagcttccctctgtaacctaacaattgatttttgctctcccctcacccttcttcctcctattccttttatccttccgaaaatccttcatgtagtgagaagatttgcaattttctggttgcttggtacatgacaaaagaacttctctaattcatattttttccttatgaaatgatgatctacttctgcgtgcgttttatcatgatgaaccggtttttgagctatgataataattgataattattgtagtatatcacttgatccaaataagctcacacatgccccttaagctagagctctaagctttgcctttccatttcttctttctagctaccgcaacctatttcttctccaagttactagattaccccaaacctttgtacagtagccagtagttgatgttctatcttcgattgagccaacccagtttgcatcagtgaatgcttatatacgtagatcttcattcttcttaaaggagagtttattcccaaatattttcttttaaacactaattccttatgttgcctccaatggttggtgcatatattgactcaccaaacttccaatgtcatactcatgtatgtgagaaagataagcttgtattcgaactagatgctctacttttatttattggcccatttttgctagcttgaacactgacagagaagaacttattcttaagccaagtatagagttaagcattttcctagtcaaccttttatcatttgcactcgcatcatgtagttttgtagctatctatttctctacatttatcctttttgagtcgttaggtcttgttacagagagttgatattgttcatactttcttagttttgagtaatttgctttgattaatttacaaagaggataaatgaatgcaatgctctgagtgtttttttcttcttaaaaagaaatctcctctggaatactctctcatctcgtctctttttgatagatccaaactatgcatgctaggggcttccatggccctcccagtcatggaaggtctcattgacaccgtgactgcactggttttggacaaggatttttttttgtttttgattcctcttaaggccatgcttccttaacagaagacaatgactcgatcaaagtttgtgaaagaacaagattgactagttatgagattatcgtaactattgatgcaattgtccgattacttgaagcaatgggagacttacataagataagggtgcaacacaagcaaagttttaggaaatcattcttgagtaattctatcaactttgtttttgaaaagcttccacaatataaagggagtttttttctcaaagtttcacttctgaaaaacatcattacgaagaacgaaaaaagatgggataggttcaaggaaaaaagctggctcaagaagaatagctggctagaaagggaggtagtagtcactaattgtgggctaatgtgttgctggctgagtttattttctttgattattcttttctgttttaccatggtatcttcgccataagtgaggtttttattatatatcgggggaggccagtctaagtcaagtggtctttttctcctttttttttttttttagaaaaaaaaaaagatggtaaagccagaagaagaaaagttggatggacacaaggtaacaaaccagataagaagaaacagagggtagaaaataacacttgccaacaaggctttaagaaccactttaagataggaagatgtgagtttttaccactcaagattcaaagccaagaaccaacatctggaaggcagaatgaagcaatctaaatttttgaaatacactctaaagtttggagaatggcactaatagtgatgaaggataacattaatattccatggagtgcaatctttaaaacttgtcgagaaaattgagaagaagattggagattagctgattgtttgatgataggatagtaatgtggtgtaacgaggaagaaaaggaaagcttgatcaaagtagacaagatggatatcccaattctgacttttttctctctcctctaattatgctctcttctctctcctctttctgagaagtgtgcccatgcatacgagggggatccatggcccttctggtcatggtcgtcaccaaaaccccactggttttgggaagaaacatggccactaccctactggtcttggctggaaaaattttcctggtccttctggggccaaaaaattccaaaaatattggagttttcaaactaagcataaagtgtttatggttacactgtcgtacgatgggggagcagttcgta

SEQ ID NO: 18130 - DNA, 3479 bp, Cannabis sativa
acagggtccattttgtcatttaacaaaatacaaggtccaattggtaacttttgtaaaacagagagtccaaaatagtatttaccctatatatattattggttgctttattagcccttacaaatacccctttattttcctatatccccactttttgactcccagtctgccacatcttgtgtagactatgaactaaagtatatatcctactaatacacataagatgacaaagcaaataaaatttcatgtcgcaaaagatttttaaagtggtttaaaaattaggggaatcataattattgtgacctatatgcatgttatatgtatagtactataggtctgttttgataactttaaattggccatctcttagcatgaaagttttgaggcaaggagtacataattgataagaaagacaaaatacacacatacacacatatttactgtgccaaaacagtagtagtggatatacagatgcagcagtataaatatatatagtatatataataatgggtttcattcatgcccatatgtattggttgcactatttcatatagctataacagtttagaaagctgaaataagatattataggacaatgagagagaatcacaacgaataaggtaatatttatacacattgtttgtgtattaattaattatataatatgctattaaaaaaattaattattttatatggtcagtgggcatagaaagcaatatggaaagcatggcccccaaagggttgggttatttcatgaccctatataataagcttaagaaagcacatattctcctgttatttgtcttcttctcaagacacatgacctttaataaatcctgcaactttagaccctccttttaagggttttgccaaatttgacctaaaaagttcgatttacataaagcagcaacatcaatcaaggacatttaattaattatattaattggggaattaattaagagatgaaaaacacaagaaaagttataatctatgcatgcatgtattatgtaaatgttaatactattatcatgtgtactcacaaataaattcatgattaaataaaagaaagaaaaaaaaaataataccaatatatactaatgataatgaaatgtctctaccaataatgatttttgcagcactaaaaacacattatactaattgttatatatataaactctcaggagcggttgacccaaacattttggaggccttgtgcagaagattaaaattgggttttttattaaaaaaaaattatgtacattaagacttccattattagttttttacttctttcttttatcaaaaatatgtttctaaacttttaaatataatttttataatgtatttataataataataataataataaaaacattttctataaaaaaaaatgggcctttaaaattggaggccttgtgcaatgactcaagttgtccaaagcttgggccaaccctggttaagagaatatagctagatatctctcctttttcttttatgaaatctttcatacaaaaatctcaatgaaggacaattaataattgttagaaaatcaaataaatttaaaatataaaatttgtatataatataaaatataataataatagataataagtaggtatacatatctgattgatccatagtaattattttaatttaatggtacaatactatcaactaagttttcttctctaaatctctaaatcaaatgcaattttatttatttgattatcaaaagtatacaattgtaatgagataatatgtatttatagagttgaagggaacttagctacgtataaccctagttggacaggacctgctcatcaaatgtttcagttaactagaaaagctcacacttttacttcaactagactttatacacacagatattaagtcaattaactattgatcattaataatatgagctaacatagcaaagaactatctaatcaacctatattatattaaaactaataaaagttaatgtaagtccaaataaaagtctaatattctcctacttgtgttacattaattttaatacatatgtattatatatcaaaataattttaaaaaaaatggatcatgggtagaacaacaggaaaatatttatggccactttaaaaatgatagttctttgatagaatctcaacataccagtccaaattaacctttgatattgaactatgacaatcatattaattttaaatcaacaaaagacattcataaccacaaataccaaagtataaaatggacatggtcaataagtctagtagtgtggtaagaaattatgttcaacatgtgattaatttaaaataacataatatccttatcagtactcaatttcactaacattaatgcttaataaataagccagtgaaattaaccatacactacttaataataaactagtgtcactaaacatgcttaaaaaattaagcgaataaaatattatcgtcattaagcaaataaacttaaaagataataattacaacaagatataaattacatgctttcaatttaatcatttttgagaatataaaagataacataattgaaagcataaacatccgataataaaaattattggcctacaacacaaatcaactaattcataacatcaacaaaaaaattatttataaattttatctcaaacaatagaacaagaaactcccactaacctaaaggagcaaaagattattataaaatgtccatatcaacaacatatttattaaacaacacaacacctaatcctttgattagaggatctactaacatcgaattggtcttgcaatattctatcacaatatctctttttttgaccgagtctttagcagtgtaatattttatttctatatgtttgaaaccactgctaatctcattattttttttttaaaaaaaaagtactattattatcattgtcatgactcgagccttaagttgtgacagatatataatattcataacttgagtggctaaagatcacactttgacacttgaaggaagataatgcttctaaatgatcatttaatactgtcacgacctgagccctaggtcgtgacatatatgtaatatctataacttgagtggtctaagatcacactttgacccttgtaggaagataatacttttaaatgatcatttaatttatattacaaaatacttattcaaaaataatagaataactcctatatctataaagaaaatattaaaaataaaatcaagaccactcaacaatataaaagaacaataatatccccacaattatgtagtcactgaatagatagatttaataagtcaataaaataccaaaataatatttagcatccatcattcctcctttttaactagtacatatctaatttaagtcaggaccatccattcaacattaaatatgttaggctatttttagcctatattttggatcgattttatgttcgcttttcactgttttaggacggaattacgcttgttttctatgttttcag

SEQ ID NO: 18131 - DNA, 1927 bp, Cannabis sativa
  modified_base (1341)..(1367): a, c, t, g, unknown or other
ggtctaccatgttacaagaaaggcttaatggattagcatcgatagcgattgaaaatgaggttttggagacgataaaatatgaagagttggttgatgaagttgtttcaaaaagcgttcataggatgaccttttttaaatagaatattgatattggcttgaagttgtattggaattaatagcaattttaataaaattgtttgagtttttaggtacttaattaagtaaaatatactttcgtaatgtgataatatttaaaaatattatttacaatttatattttttttttgttaggagcctacattttaaaattaaaatacagtatctaaaatatttgaaatgaccctcgtaatgatataccttatcttcaagaataacttgtatgctatgttatttaaatataattaatgtaaataaaatatacgattaaactagatataggagttacattcctctaacacatctccaaataactactatatatttatacataaataaactaataaattgttgtttatttgtttggttcatctcataatttgaaaatatcacaaaccaaaagccaacgataaatagacaaaattagaataaaatcatctactgatttgattttgatataaatgaatcttaaccttccatttcactgtaggaaaaaaaaataaaaaaaaaatctaagtttgcaagtgatgataattaatatataatccctgattgatattgtaccatatatatgtaaaggaataaattattggtcaaacttggaatatgatatccaatcagaactaaatataggatataagatcctattgaaatccaataattttacttgaaaagtgtgtatactaatacagctatctacatattatctaatatataaagtgatgttagatttttgttttaacctacaaaaaaaatacataatcaaagccaacaagccagtgtgaagagatatttataatatagaaaaatgggattaggacttcaaaagttttttatgatctttctcattgctatggctttcatttctctagattttcattgctctagtaatctctctctctttgctcttattaattaaattgttaatataattttctctcaatggttttctttcactattggtatattaatatatatatatatatatatatattagatgcaggtggtggtatagagatagcagaagcagttaacccaaattgctttatggaatgctcattcacatttgggaatgctgagtgccttgctgattgcatctcaaggaaattcaatagtggctcctgtcagccagataaaatttgttgttgtaatctttaatcatcaataattattattattattatnnnnnnnnnnnnnnnnnnnnnnnnnnntattattattattattatacgtactagtaataatttaccaataataatttctaagtagaaatttaaatgttataatctcttttttctttttagttaatatatagtccatattattataagtagaatttcaatgatcaacccatgaattttatttttagtttggttatttttgattgtcaaactttattttcaataaatcgagtaacacatattgttgttagatactttcgatttctttctggttgcagcatttttgaacataatgtttgagctgatttacaagccttattgtattcagaatataataatatttcaatgaaattaaaaaaaaattaattaattaattcaagactttttaaataactagtggagtctcacgtgcttcgcacgtgtagctcattaggtacaattattttaaaaaaataattaatattttatctacaaatttataatactgtcaaattgtatactctaaaatatacattatggtgataaaattttgtgaactcttcaatttacaaacatatagtacttttgttcttttttatcatttcacagtt

SEQ ID NO: 18132 - DNA, 2755 bp, Cannabis sativa
tataatcttaatagtaaattaatattgttttaaaaatatttattttttattattatttacctattataaactttaaaaagtaaaagaatttactacagaaaaatcaaaacacttatctatttgaaagtggttttgttttgtttgagcatttaattgatctaacttaatttcgaattttaaaaaaccagcatattggactaaatcgatgagtaaatacccatacctcatttaatattttcaaatattataacagcaaataattagctgaaaaataatatacaagaaatactttttttttttgagaaatatacaagaaatacttaaacatcgtatcatacacaatgacttattttattttatgctttcagatgatgagtcagcttgaggatcattaaatttaattctaaccaatgtcgtttcctatttatcataacaaatcatgataatcattatctatacaacaagataaacaaagattaatttacgtatttacctaagactctttcatcataatcatcgaatatgttaacctttcacttctataagtactaaactaacacattttcattttccctttcgaaaatcttccatattttcaattttttttctttaatttattttcataataattctaattagtaaaacatatatacatatgagaatgagtgaaattcttggggagagagggaaagtgaagttggtccatccgggtcggtacgttgaggtgttaaaagacccgatcacagtagccgaagtcatgagaagaaacccgagacacctcataacccgacccgacatattcaagtacccatgggtcgtgttaaaacccgatttgattctgccacctggcaaagtcttccttttagttccaaagcgcaccgtttacaatctcatcaaatcagggaatcatcgggtccaacaaacggcgtcgttttcgtctagttcagaatcaaacgacacgtcgtttggaggtggtattaatgaggagagagattcgatggcggtggtgacgacgacgccttggctggatgagaagaacagttatcgagaatttcaacggcaacggatggaggagaggaggtcgagtagtagttcggaagtggtcaacggtggggattgttgtggtcaacggagtgaggtggtgagggaattgaaatcttgtatgaggaaaatggatagtgagaggagattggttgatctgaaagtgagatttgatttgaggaatttgggtatggagaaggagagagatgattatcagaaacgacagagatttgaggatttgatagattggtcaaattgaaataaattctaaaaagcaggttgttattaaaattagaatttgggtttgagacaattacaaactcattgttcttcttccaaataaaaatctcacataatttgattagtgtgaacttcatgttagagaaaaaatctattaggacaaattccaaaaaaaaaaaaaaaaagcatgtacaatttttatcttaagaattttttattctaattatgtaatacttatgtttataattattttatggcaatattttatttttttttaaatatggaatacaataataaaataaacacttaaatattttattgcaagtttaacggatggcaaacaaaatattatttttattattgtttgggagaaaaattaatggccaacaagagacccatgatgttaaaaacataggaaagacccaatacatgaatacaaataaagctcataaaagattaagaaaatcaagatcaaaagtcgaacgggaatcgaacaaatcaaacttatatttaattcgaatcgatctggatgactcttgtatttcaagcgattggtcgaatgacttgtatcttaatcgttcggttgggatgactttcatatctcaatcgatcagtctaaatgactcatatctcagtttattaatcggccagatgacatatctcaaacatacataagtataaataaaatgaattacatacatctaggatggaagatacattcaaaaaaagtaacttacattcaatatatagaatacaagacaaaagacttaaatatcctaattaagaaagttacacattatgaatagaagagatataaaatatggacacctaagataaaataaaagacgcttatcaaagtatgtaaagataccttgtaggaagtgaagtacatatatcaaaacgtcttgttaagttagcacttaagggtaaaaaattgatataactagaggaggtagtgtaggaggaaaggagagatagaaaagatcaagaatgaacaaaaaataaagagtttcctagaaataaaaattcttagacccgaaattttgtgaacaatgcggagtcgagtttgttgattctcgaatacgaagatatcaaatgggttacatcaaattggcatgcccaataacccatgtgtgatatttgaaacgtctttttagttatatcgcaaatcttgacatttttttctttttatcaatgataaaccaagtcaaaaggactataaactatcactaattactaaaaaatttactagcatggatgctgtaatagaccgaaagtgtatcaaaatagtattttgaggatgtaatatagatttctccaaaatcgtatattaatttgcaaagtacaaaacatttgcttagcattcatatatgaaaaaattaatcaaacgtgcaagtaatattccataaattattcggagttttaagaaactttacatacatacaatcataaataactacatcaagaaaaatta

SEQ ID NO: 18133 - DNA, 6220 bp, Cannabis sativa
ataaatttgtaaaaaatgtatcgagtagcaatctcactaattcacaagaactcattttcctatgttttgtatttgtttcattattatgagggtgaatagggaacaacctcgatccaactataagaagctatttttcttactccctcctctcttgtcaacttcctcactgccttaacatcttcccattttccataagaagcatacatgttggaaataacaatgtaggcataacccttgtcaccctccaactctatcacttttgcagctgcaatctttgctaactttaaatccgtacaaccctcacaagtaccaagcagagctctccaagccaaagcagaacccccgaaacccagctcatagattaactccaccgccctcctcctcagctcccctctctgtcccattaaccggatcatacaacaacagtgttctatacttggttcaattccgtaatcctcgatcattattttgaagtaatgaaatgctgtttcgaatggcattcgattatgagcgcacgctgataaaacgttaagaaatgtgatttcgtcgggctgcacagttctctcgagctgcagctgatcaaagagctcgagtactcttgaagagtttccattgtgagcaaagccagaaaccatagcattccaagtgatcaaatttttatctgccaatgatttgaaaatcaattctgcctttgtaacctctccacatttggagtacatatcaattaaagcacttcccacaacagtacatgtatcaaaacctctcttcatagagcagcaatggatcaacattccccatgttaaagcagaaagccctgcaattccacttaaaatacttgaaaatgtgaactcatctgttcttaaattttccaagtgcattttgcacaagacagccaaagcttctcttgcttggtttctatttacaaatcctgttattatggagttccatgaagacgagtctggatttggcattcttgacaaaatctcaacagcttcttccatctctccaaactgtgcatacccatttatcagctcattatatgatattgtatcaggcttaggcatctgctgtaaaaaacaaactgcttgttttaagtctccatttttagcacatgctgcaatggccgaattccatgagattatgtccttttcaatcatattactgaacacaaccattgcttcttcaacagaaccgcatctcccatacatatcaatcaagcaattggaaacaacaatgccattttctacaccagatttcactatcttagaatgaactgaccggcctaaccgcaaaaggctcagcgggccacacgcagccaaagcagccgtcaaggaaaacaagtctacaaaaatatcagacctgtcaagctcaagaaaactacccaatgctttactaaactgagcagagcccacgaaccctgaaataatagaattccaagagacaacactacgatgaggcatttcaacaaacactttgtgtgcaccattcaaagaaccaagtttgacataaaagcgaataagggcattggagatagagacatctgagccaaacccagatcgtagaatgtagctatgaagctgatgacaataaaaatcccaactcatgtctgtggaagctcttagcatgtggaccaaggtgttccaatctgctttaaacaaggcctgctcactttgagaaagatgttgttttggacataatgaatgtaaaagtaggttcttttgtaccaatctattgaataggaatctttgcatagctttgatgattaaaattcacaacacaaaccaaccaaccaaccaaccgacgaaagagaaagttaataaagattgattttttttataaagaaagatgagttatttacgcataggaaagttagctgtgaaaggtttctacttatacataggattctacgtaccaaagttaaatgctttaccactcgcacattaaaattagtcctgacttttggttgtgtatcttatctatttgtccactagtcaacaaaatataactcattgcaatgaatgagttttaagaaagtcatggctacatcaaaatgaaaaataaaaagtttggttgtaacacatctcacaagttacaacacaaagccacctcctttgtttcggtggcaacatcttatgatgcatggtatgatataatataagctaaattaatttatatatatgtatgtatacaactcggttggtatctaattttagattgactaaataaagtctttctacaaatttagatagatggagagatagagagacaatctagctagtgtgatgtaaatttatcctataattctagaaaaaataggtgaaaacaatcttctgggggtgttctgttctgttcatacaagcctttctttcccccaaaagaaaaaaaaaagtttgaagagaatgagagagagaaagagttagagaattttgtttgaaaagataaaaagagagaagactggtagagaaggagaaggaggaggctcttagtcaaatcaaagtgaatggagaatgttagttgagatcatcaaagtttaaaccaaacaaaacaagcaaagaagatatgaaaaagaaagaagagaaatttggtttcttaaaaaattgagaaaagtggggttgtgttgaaaagaaaggagagaaaaattagtagaaggaaaaagaagaataatgatggattatttgatgaagaaagatgtatttgaagaagtggcaataataagtggtttgatagtaatgcaatttgtttatgctggaaattctattgttctaagttatcttatgtcaattggtcttgcttcttctaccattgttatttactcttcctttgccactttcttcatcttatctccaattgcttttctctttgaaaggttaatatatatattatattctttctttcatcaattctattacaatacaagttttccttttcccaaattaatttttatcttttttttttttttttacagaagcaaatggcccaagaaattcagcttgaaactcataactcagatggtggtaatagcctttggagggtatgtgaattaattcaattttctttatactaataaaatttcccaaaattggtctgaataagattttgttatataatttgtatagggtaactttattccagtctcttctgttaaagggtattagtttaacatcaccagcaatggcaacatccatgccaaatctcactcctggtctaatttttataattgcttggatattaaggtaaccaaaaaataaaagaaaacacttgttcttatatacatatattcaaaagggaatatgataatatttgtatatatgttatataatggcagatatgagaaagtgaaactaagttgcatgtacagcaaagtgaagatagcagggacattgctgtgtgttgcaggtgctttaacaatgagcataatccacagtgcaaaatcagcaacagcaacaacaacagtaatatcaacaagtaataatgtttttttcgatgaggacaagatcataggatgcttctatctaatggcagccatctttgttttgtccacaaatgttgttcttcaagctgcaaccttggctgattttcctgctccaatttctctatgtgcatttacatctttgattggtgtctttctcactgtaactctccaaatactatgttaccacaaacttgactctggctttccaattctcagcctttcaaatttgattatctactctctcctggtaattaatcaattaattacttaattaagaatgaaaagtgtttatggccctgagattggctgagcttttaaaaactgtttttgggctggttgggtaaccggtgtatatatgtgtattaactcaaaaccattgatgtgtgtgtgtgtgtttgtgcatgtagggaggtgtagtgagtgggacatgtgtgagcttcaatgggtgggccatgaggaaaagagggcctgttcttgtttccatgttcagtcccattgggacagtttgttctgtagttctctctattttcactttaggagaatccctcaaactaggaaggtaacacaacacaacacaacataagaaaatataacacaacataacataacatttttttcccaatattaacaatgtgtaattgtatttacagccttgttggtatggtgctcatgtttactgggctctactttgtgctatgggcaaaaggcaaagagggttacaacacttacagtagcagcagcagcagcggtggccgaggccgtggtggtgctaatgccttagctagtgagtttgatgcagagaagcctctcttaagttaacatacaaaacctctgtttttttttttctttctctgtttatctttgatagctaatagtttaagtagtaactagtaactggtaaccacattcaacctcaaaagaacaatcaatcaaatggaaaaatggactcttgggttgattttgtatatacatatataaaagtagtttacctttttttgtataaagcttcagcattttattttatttttgatgtgatgagatgaagaaaaagagagtactactacatgtctaaacaacccatgttgagttgataaggataagtttttggaatgtttaatgtggcagacaaacaaagtaagtatcttatagcaacaacttttcaaacaacacaaaactttcaacattcttctattcaccttttccaatataacaattctcctcttcttcttttttaatttcttttctactattcctaaaaagaaatgaatagaaaagaaaagagtaagaatttcgattgaagccttaaaatatgaaaatgtgtaaatatcataccaatataggaatgtaaatgcaacaacctcatttggtataccacttttaatttattttataggtgggtgaaatgtgaatagtgaagtgaacaactgtgatgtgtgtgtgtgtgtttgtgtcatttagtataaagcataataggagtgattttgtgagaaagtagggcccaaaatgaggccatataggtgtgtgtggtggccacataaaagagtaacaacaacactagtagtagtagtagtagtaatagtagtagtggctagtacttgggacagtggcttttgccttttcctagtcttgaaatgggaaaatggggtccatccatttctagctatttggaactcattcaatggaaagtgacaggtacagtacagggtcccctcttcccccctatattttcaactgcttgccaatcaaacccatcttttagttttacctcttttttatttatttatttatcttttttcaacttacaaaccaagtatattcctcttggacccacttggtagtataaagatcaggtattgttagttagacacgtcatttgcattgggcagtccacaatccacataatagtgttcttcatttctttttctcttacctaaatatatatatattattaattttgtgacttttttctttctttgttctttgtgtaatctttatgataagcagaaggatattgaatattgctgaatgttatatcaaatcacagttgtctttttcttcaaccaaaaaaaaaaaaaatattgcaaattgctgaaaaaatgaaaatgaaatttatgctgaaaaaatttataagttgttgttgattcgaaataaataagaggtctattatcgagataaaaggaaaatatatatgggccaaaaaattggggccaaggcaatgggtttcttatccatattcccaaactcagaaccatatcctccaatgataggaaagtggacccacttaagaatgactcaaaaaactcaaacccatttctctctctctccaaactatacacaaatggatatgttatataaaaaaaaagaagaggcttggttgatttggagttaagtataagagaagagagagtgtaatgaaaatgggttgtaaagtgagtgaaattgagtcagagttcacgagctcaaatgagcagatatgatattcattacattttatattatttatttaattaattaatatcaatctacaactactacttctcaatcaataagtaacagtaaatagtagccaattcatttcattttgtctcataaaaatctccattggtttattattatatgtaaataacaataataagtgagactagtctagtgtgtagtatggtgtggtggggttggcatgcagccacacgaaagccacgtggcctgggaataataacgtttcacaatatggtcatatatatatagatg

SEQ ID NO: 18134 - DNA, 3939 bp, Cannabis sativa
ctgaaatgtccccacaaatactaataaaaaatatgatcacaacaacccagaaaaacactaacactcgataattcatcaaaccagcatagataaaaattttctgatgtaatttcggttatcggatttactagtacaaaagaagagtaaccctcaagagattaccccataattgtcctgatcttacaaaaacaaaagctacttttttgagttgcccacaaaagatattctctctgaggctcccaccatcatcacaaagagacataaacttgttcgaaatagcagcaaccccccaccaaaagcagagtgcaatcaatgattaaaaaattaccagcaaacataataaagtccaaaagcaagtttaagttaaacaagtaaaccaattcaattccgtaaactcgaaagaatcttctttttactaaatcactaatatcaactttgcagattaaagcagtaaaggagagagtttattataaataaagatttaaataaaggaaggacttgggaacaaagaacaatactataatgtctatactattcaacttaggtagaacatacctaagtctcccggagtaaaaagtcaatcttctggtttgaactgatcgacgatcgttagcagagtcttaactttccaactgccctctacagctgctccccattgataaaggaagggcttttttgaaacaaaaacatgttcttcacaagtcaagattcaccatctgtaaaaaaagtgaaccattctcaaggatgatcagcatagtaaaaaagaggttcattgtaatattctatttacatcaacatgtgattcacctttacatcaatattcccaattcaaaaagagacttattttcccttctaaaaatataaaaatcaaaacttttgcactttttttcccacaatcagcggcttagatgtgacccaagaagagtctactgaatattgttataatgggtatgaatctcccaaaccatagcataattgagtcacaaatgttagaagatctgaagaatgcatagtatggacataatcaaattattgttacataacaatggttaaaagatctctctccttcaagaccatcactcttcctgaaaaaaaagttaaaaggttagtctatgtgactattcaaatagcttgacttgaaaagattcccaagccctatcttcaaaaaagtgtttctctaaaaagagaaaaagatttatcactaaattcaaaccagaagaattctgcagaggcttactggaatccaaaacaaatggcattagagagactgagataatatacctattctattacttatatattttaattttccttaaatatgaatattcaatatgagattatggaaatggtggatcatgctgatcaacaagaaaaggcatcaataaaagacaatcatggtggcccattccaccagccgctatcttctcaacttcacaaaactaataactttaaaaaatttgatgatgattcaaactccacaaagaaaattgtaacacaagctaaaaacaaagctttctgaacaaaaagagcttactttacatgttgaatagaccagcacaatcttctgccccccctcattcagtagtagatttgcaaggttaatatacaagttgatcccatatgcataaaaaaaagtgagccattcttctctattgtgcaagaacaagataaatgtatagttgtcttttctgaaagctttagatacaaaacaggtcacccagtactaaggtttcactacacaatatctagttcaaggttttctttttcacatgttaattttagtcaagtgctttcctttttgaaggctaatgcccattaaagtaatctaataacccaactaagttttcaatgtagcagcatttggatcatttggggtcgacatttgctcggttcagagagtctaagatgtgcttgagccttgaatcgagagttcatcaaggatggaatttttgagagaaagccgtctatcccgaaatgaaatgggatggaatagaaatcgcgaaaaagcactagcactatagtattgtttttattaaggaaagataagctagatagtaatcttgatttaatattctgtaatactcaaaaaaaaatgactaaaactacaaaaagtatatgaaacactaaagccaaaattgaatacaaatctcagagccacatataacaaggtgaaaattttcatacttttattgaaattatagctataaactttacaataactcaaaactcaataatgaacacaatacttctcttataaacataatcattcttatgtatacagtcccaaaaagagcttaatttataattgtataagcaatttagggatcaaaacctataaacctcctaaacacagattatattatgcatcaaataaaaccccccaaaaaaatgatgatctcaaacatacccacttggaacaaaatcaaggtttagccaaatcatcactaaacccaaatcaggctgaataagctagatagtaatcttggaattaatattctgtaatactcaaatcaggctgaaaaaaatgactaaaaccataaaaaaaaaaacaaaaagtatattattattcaacactaaagccaaaaatgaatacaaatctcatataacaaggtgaaaaatttcataatttaattaaaattaaagctacaaactttacaagaactcaaaaactcaaaattgaatagaatacttctcctataatcataatcattcctacgtatacaatcccccaaaaaaaagcttgattatattatgcatcaaataaaccctaaaataatgatgatgacaaaatcatggtttaaccgaatcatcactaacccatctccaaaaatgcttttttacagacacagcttcatctgcaaccctagaattttcacaatccttgtattcaccgtcctcaaccgtgcaaaattcaccatcgggaagaccatcgacaaaagcttccaccgaatgcaattcataccgagcaggcaagcccgggtacgaaaccgaattccgttcctccaccgtcttccggtacgatccaggaacgattctcacagcagaagaaccattaacaaccgaaccaagctcttcttcaacagccctaaccacagccgattcaatatcctcaaacggcttcatcttctcagataacggtctttcacggcttctaacggtaccgtcagataactcttgatgagactcgatcaaaaccctacggtcgtcgtcgagaattcgaactgtgacgacttgaactgtacgaaccggaggagaggaatcggcgagagaggtttcgccttcggagagttcgagccagagattgtgaacgttcttcgttccgggcttaactccccatgaggcgaaggagtcggagggtaaccttggcttgagccattccgataaggacttagggtttgcgaagcgagcgacggttgttgcagcggtccggtggtttagggacatagttggaattttgagaaaacgacgagggcaaaatgggaaagataaaattgggggcaaaggttgttgttttgagtagagaaaacaaacggagatagctgtgagaaaaagatcgggtaaggttgggagtttgtgtgggaggttgaggtggcagtttctgattggttggtgagagtgcggaggtgacatgtcaaaatttaagtggtttaaataaagaggggttagttgttgtgggaagtaggggataggaggtgtaatggaggagggtgttaatggtcaatttctgtcagaagataagattgagagagagggagaagaagaaggagaggttttgagtgtgtgtttggatattgagattataatattctgtgtctggttactgtcaaaactctggaccacacaattttatgggctttcacatcatcaaatgtttgggcctaatgggcccaaaactaaaatatggtatttttttgggtaagttgaaaaatacctatttta

SEQ ID NO: 18135 - DNA, 3308 bp, Cannabis sativa
  modified_base (94)..(99): a, c, t, g, unknown or other
  modified_base (3243)..(3272): a, c, t, g, unknown or other
tgataaagtgaaccaaaacatacgcaaatgaatgaaaaatatttctgtttctttattgatgttgaataaaatagattacattgaaatggagttnnnnnnagggcataaaacccaacaagcatcgcccgccctctgactgaccaactcaaaaaagatgcctttaattggtcaatggaagcttaggttggttttgagcgggtgaagcaagcaatgtgctcagtgcctgtcttggcactccctgattttaatactccatttgttttggaggctgatgcgttcggtgttggtctaggggctgtcttgatgcaatatggacgtcctctagcctatttcagtcgcgtcttatctcctagagctcgcatgaaatcagtttatgaacagaaattgatggcaattgtgttagcgattcaaaaatggaggccatacttgttgggtcgtaagtttgtggttcacacggatcaacgcagtttaaagtaccttctggagcagtgtcttgttgctatggaacatcaaaaatggcttacaaaaattctgggatacgactttgatatccagtacaaacctgggggtgataatcgtgccgctgattctctatcgtgagttgagcctgctgcttctctcgcagccatctcagtcccgaacctcctctcgattccagacttacagacctagattgtcgcggatcccaccctatgtaaggtgctgcatgaacgatccaagggccatgattgttgcgattactcgatggtccacgggtttccgtggctgcttggtgttacctacctcgtcctcttttgtttctttgctcttacatgagtaccacaatggacattccggggtgtttaatacattctaatgcttggcagcttacttttattaacgacgcatgcagcgcgatgttgagaaattcgtggctgaatgctccgtgtgccaacagaataagtacttcgctcaatcctccgtgggtcttttacaactattgcctattcccaacagaatttgggaggatatctcgatggattttatcccaggtcttctgttgtctaagggattcgactctatatcgcctcactaaatatggtcacttcatacctcttcgccatcccttttttgcattgacagtggctgaagtgtttgttcgcgaggttgtgaaacttcatggcattcctcgttcaatagtatcggacagggacaaaatatttttcagcttgttctggaaggagttgtttcggttgcaagggacttcgttgaagcatagtacatcctatcacccgcaatctgatagctaaacagaggtagtgaaccgctgccttgagacatatttacgttgctttgtcagttccaaacccaaccagtgggttaagttgttgccttggtctgagtatttgtataatacttcccatcgtacttccattggaatgactccgtttcgagctgtttataattgagacctaccgcccctcctccgtttggaaccagcaagcgccaaagtttctgcagttgagcaagagctccaggcccgcgacgatgtcctccagctgctgaaacaaaacctgctatgcacacaacaaagcatgaaagcacgcacggatcgcaagtgtcgagatgtccaatatcaagtaggcgacatggtctacgtgaaacttcgcccttactgttagcgatcagtggccaaacggcctaatgagaagttatttcctcggtactttagtccctttcccgtgctagcttgtgtgggcaaggcatcctaccgtctccaactgccaccggatgcctccatccatcctgttttccatgtttctttactgcggaccgctttgggaccacaccagcaagcatctcctcttcctcctggcctcacggatgacttggaatggctcctggaactcaattctctgctagctatccaccccggctcccacaagaccagcccccaagctctcatcaagtggcagcatctaccagaatctgaagcaacatgggaagattttgtagtcattcgtgatcaatttcctcaatttcaccttgaggacaaggtgagatttctggccggcggtattgatagacctcccttaacatatgtgtatgctagaaggaacaagaagtctctcaaggagggtgctatagaggatacaattctctaattatgttatttgagtattattcggatagtgctaaggtgcaccttaagtcctagggactaagtataaataagagtttcatttactgggattattcagattgtattgtctcttgtaaggagggtccagactctcaaaattcctggttattatatgaatataaacccaattttcttcaactattcctctgttctttcctttaattgtttaatatcagttttgataggataattcctatcacatttcaaaaaattgctttaaaaaaagaattttttattttattttatttgtttttctagagaggaaaatagatgttttgatattaaggcatttaaaaaatatttttttaaaatttcatcaagataaatagtatataattatcatatttactataaatattaataaaattaaagaaactggttatgaacatataattaaaattacaaaatattgataccttaaaatttgaataatatgtatctactagtacccgcaaaacataccatatcctacaaacaacattaaacaaaacaaaaaataacttataaccaaattaataaacaaaaaaaaaataaaaaaaaaaacacccacaatacataacaagtgaaaaaaaactattttcacaaatttctaataaagtaataaacaatattataaaaccagttttatctaaaaaaaaataaatgaattatctacaaaaataagttttaaaaaaaatgaaaaattcaacacaaaactactctataaaaaccaattttaggatataacatagtgtttttgaaataacacatccaaaataacaaaattgaaatataaacatttaaaccgttaagtatcatattcattactaaaaccagttatctaaaaaaaaaaaaaacaaaaagactgctccaaaagatccacatcctcttctcaaacttcttttcctttgcctttagcatttcccttctcctttagtttcatattagtatgtgacgtgcaaaacagacgatactaaaacttggatatattaagttacaaaagtctatttcgatactaaaacttgcgttatgtatttatgtttagcctctacaaaaaactgttacttttagtgataattttnnnnnnnnnnnnnnnnnnnnnnnnnnnnnnatgtgacttttagtcacaacaaataattatttgtga

SEQ ID NO: 18136 - DNA, 4001 bp, Cannabis sativa
atatatctgtatactaataaaaatctagctactcatttaaactaaataaaaatactaattagttttattttatgttagatgtataatattttttaacaccctatccaacatccgattcggtctaattggatatttaaaaataacatctaattcgattcgatcacaattggatattcaatatttgacggtcaattataattgaatcgatcgattgtaattagattgaatttatttatgcacacccttaatcactctatccctcctaccaaacttataagttattactcaaatctcccatcttatattctctatcctctatatccaccctattctctccctccgaaagttatgaaatgtatggagacccataattttgtaaaaatctaataaaaggcctgtctaacttcacagcccgactaatacttggcataattcataaaatgggccgcatttaagcccaaaatagtaacattactattactaagtaaagtttcctttcctcctaccaaacagaaatatagtgaattttagagccattatactataaaaatatttattaaatatccagtaaggataggcttatccagctctcgtccacgtggcagcattcatatgatactccatattctcacgagaatacccgtttgccacgtgtctaggtgagatccatgcaaaagctcaaagacaccaaattcataactcaactcaatagcctcaaacaaacacacacacaattagagaaagatcatcttagctaagccatggcatctctggcgaccttagctgctgtgcaaccagctaccatcaatggccttggtggaagctccctcacaggaacaaagctctcaatcaagcccacccgccagagtctcaagcccaaaaccttcaggttaatttgtaaccaattaactttcaaaattaattcatagctatatataaatttaatttgtgtaataatgtttctttaaatagaagtggtgctgttgtggccaaatatggagacaaaagtgtctactttgacttagaggatctgggcaacaccacagggcaatgggatttgtatggttcagatgcaccttcaccatacaaccctcttcaggtatttcactatctcacaacttaagttagttgtaaccatgtttaggtagttaagtattgtttaatgggtacttaagagttaagacaattattatatatgttgacagagcaagttctttgagacatttgctgctccattcaccaagagaggattattgcttaagtttttgatattgggaggtgcttccactcttgcttaccttagtgccactgcctcagatgacattctacccatcaagaaaggtcctcaacttccaccaaagctaggaccacgtggcaagatctaagctcatcatttggttttttatttttcaactttgtatgtaccttttgatttcagaatttgtaagtatgtcccaaaaagcgtacttaagacccccttatttgattaatcaaacaaattaatgtaatctcaaatgcaatttgagggggactgctttattcaatcattctgtggagtgctgtttttctatattgatatttttaatccaaacaaagaaacaaaaacaagatttgagtacttaaaaactacaaaaccatcttctcttgtacaaaaagaaaaacatcatattgcaaaatgtttcaatccccaaattggcttccctatatacaattaacttgatcacaatgaaaaataggtaaccataacttggacaacaccctcctttccatatgggggttctaattagtaaaaatttacatttgaaaagccttggctttttgtttttgtattttgttttcaatttactttataccttaaacttatctctctttaacactgtctctactacttcttcttcttccacactctcaattgtcatcaatggcgcgccgttggacttctcaaccctcccaatgtctcaagataagaagtcttcttgttagtgacaatgttggcaattttttgcatatggggatgttttactccttcactaccttcttttggaacatcttcaaataatcctgctaactccttctttgcagcctcagggtcaccaccctgttccaaaccccatcccatgaaatcggacagtgtcatggtctcggctgcagagatggactcatctttcgggctagagaatctgtccggtggagatgtgcattgaggggtagcagctcctgtggattctctcaatgaattcctcctatatgaagcttgtgatggattttgtgtcacataatctgcatacaaaacgtcttcaatccttgatgtgactgtaaaagctaagctctctaatattcttgaatagctttcaagaacggcttttcctacatcctgtcaataaaaaaaacccaattaagaagagaagttttgaatgtaatgacttgaatttgaatatgattatttggtgtcttactcggttgtattggattttactgatgtctagtgcagattgagggattccagggaacctttgcttgagaaggagtaaaatagtctcagctctctcttcaaaaagttctcttttttctaaactaacagctgaaccccaagctgatttcccatctttttggttcatttttcttttccaaatcacaatggaagcttcaattctgttcttaaggtctaaaatcttgtgttcagaggataagtctagagtggtaagaaattggtcagggtcaaagaactcaactgtaatacttctataaattgaatctcctaaacttgctcttccattctaaacacattagaacaaaaaaagggttagacaaagaaagaaagaataaaaggaaaaacttttgttgtgtaattattatttaccttggggagggattcaatgtagttatctgggatttccatttctgacaaagtttgagcatttatggccattgctgctttaagcacttggtttacacaatctttctgatactgcaaaaactttcttgacatttctgatagaccatcttcaggaactttaggagcaggtaaccaccatttatcatcttttctctttgcatttcctttctctgagtctggtgcatcttttgacacataagagaattcattttggtccttgaagttatcaagacaatcctgttttcatttcattatatatacataatttcattagagaatgaataacactcatatatttgtatttggtcaaatgttgtgttcttacaatgagcatggcatcaagtttgcgaagagcaggaatgttcatgtgaagatcagtccgttgccttgtcaccataatcttttagaaatcaaaacacacaataataaacactcatcaaaatctgatatgaaacatagagaaataatttgtgtttaatttaatttatttgattacctccatacttattccatctttggatttctgttgtgaagggacaaattcaacaatgtaatcagtaaccgataagagccaatctatttcttttctccacctggcttttctttctgctgacattggctctaaacgccattgttcaccaaaaacagaggctgcatttcatatccatcaaaaatcaacaataaccaatcatatataatagcaaaatgacttggttttggtatatagattatagttatatttttggaaatacgaaaaaataggaaaaagaaaaaaatcacctgcaaggtttgtaatggcatttgataatgctaaagctgaagaaacaccctttccaccaccagacatatcttcacccaaaagcaatttagcaaacctttccttcatttgttccatatctggatccaaaaaacacaccacaaaataaaataaaataaaaaagaaatacaacttttaaattaaccaaatttttatgtactgacaaattcaaccacattctttaattttccaaccaataaaaacaaacataaagtattgagttgtcaatcaaacaattagaataaatacaattctaagagacagctaacatataattattattattat

SEQ ID NO: 18137 - DNA, 4130 bp, Cannabis sativa
aatctgttgtttctcacctaaaaccaacccaaaatttgtacaaagctccagatcacctatttaagccataaataacatcatccaacataaaaatccaccatcaagcaccaaaaatgaaaatccttgtcaaagagctaaatttgagctttgaaagctcaaacctagttcaatcttgctacaactcaccaatagtcataaatcatgtaaaacaaacctaactctgccataactactcagctctaacaacctcaaaacccaacagtaactagaattcgaaatgacatgatgaaacctaacttttcttttaaaatgagaaaggaatatgaagggaagatcttaccttgatttttcctctactaactatgttggaaactaacaacaacaccataaaattgggtttgaaattgaagagaaaacctcagtttctcttggtcgaaccctaaggagaaagagagagaattgatttttttttttattttttagtgaattaatcaactaataataaacttatctattattatctaacagtaaaacatatactagaaatcccactaaatttaagttactacaaatgggctaaaagatgccatttcctccactaattaagcaatctacactcatagcggtaagattatccaaaattataaccccaaacaaaacctgacattctaaatgtctaactatcttgccctgctaattctaaaatactacatcatatctaagtgactctaacggtcgaatcatcatattctactgttaccaagtatattaggaaaaacatgaaatctcatgtataacataaataatatacttagaataaaaatatatctccataattataaaaaagaattatttaaagtttagttttaacactactacaaaaccattattcttgattctcctaaaaatactttttttggggggtcatcgctaaaaaaattaagcgagcattcaaaaatgttggaaaaacttgggtattcccaaaaattttaaacactcgtgatgtattctcgatagtttttaagtgtgccttaaaaaatacgaatttttttaaaggagaattctcgacagtttcaaatagtggcctatagtataggccacagtttaaaactgtcatctatagtgttattcccgatagtttttaagcgtgccttgaaaattgtgaaattttttgaaaggagaattgctgacagtttaaaaccatcacctatagtgttattcctgatggttttaaagcgtgccttaaaaattgagatttttttataggggaattgctgacggataaaaattgtggcctatactataggccacggtttaaaattatcacggtttaaaaaccgttgcctatatagtgttataggccataatttttaaccgtcgactatttgttcaaatctaaaaatttctaaataatgtattttcccttgctccaatataacacgttttagatctaaaaattttcaaatctatacatttttaaaatgtcagactctctctatctctagagttctccctctttgtttctcatagagggcggtccacgagctccatcactcgtctctcgctctctctttcttgatttccccttcacgagctccaccatagacgaaagcccgttcaagctccaccatggtcgaccatgaccacgagctccacgacgagaaccatctgttagtcttctctttctcgtccactctttctcataatttctttattattatttttattttgggatttatgtatttttgagattttcatatttcacagatcgtcggagatcttgactattccgggatcttaaggccaaacaaaactcccatcttagtttcgaggaggatgaaggcgatgatctttttaagaaaatctactatagcgacgatttaaaactatcaactatactataggccacaatttaaaattgttacctatagtataggtggcgattttaaacagtggcctatagtctcaactatagccgacatttttaaactgttcggaataattttacatcaacatttttttactgtcgtctattctacctagtattcgtgatgctcatttaggcgatggttttatagaccgttaggaattctttacccgacggtgtaaaactatcgagaattcagagtttttttagtagtatgacgataagccctaattatttattgattctaactcgtcattacataatctgtcttcatgagaaaagaacttgtagtacacatagctccattaccatcgtcacagggggagtgaactattataaagttttggactctctcttatttagttaatttcctatatttgttttctcactaatctagcgagacaatgttggccagatctctgagtcaacacaagtcattacaaaactgtaggccattatttgtccttaaagtctttattcttgagttacacatttaaagatttgtaaaaccatcattttttatgatgtaatagaaatacctaattttttctagaatagtcatcaactatagatagaaagtagttacacccaccatgagttaagagtttttttaggaccgcatatcctcaaaagtttatatatatatatattctataatgtctttagacttgagagtaattatttacccgaaaactgtctctaataacgtggacatgatcatttttaatacatggcaagaaggaaaatattcctagagtcatacatctcttgtcataacagttaacctcaagatgggtccctagcccagcgcccaagttgacataggggactcctgagtgggtatttggatcccaccaagttgtttccaaatcaccatttcaataatgtgagccaacaagtcaagaatgctctgagtcgtagacttggaagctaaggatgtcattttgacatctcgaatgccaatctggcgtctagggtctcacccagcgcccagattaatatatgtgccctatggtgtcaatttgatcctcctctttgtttaaactactcaatatttgaacttgaacgcatgaaagatctaccataagcataccagaggccccagaattaactttgaagcacttcccatttagagcatctaggcacccagtgcccaagttaacatcacgtggtgcccaacttccaagttgacatattatcaaccgagggagattccaaagaattttctgaagatttttccaaggcattttctttgccttaacaaaaatagatatacaagtccatttagggaataaacggatcctcctggtggaccaaacaccaacccagctcctaggttgacttgggcttggtgtacaatgcccaagttgacacattgtcaacttggggtgcttccaactactttgtgtgagttgtcttctagaaattttctccattttcattaatcataaagatacatatgctttagggaagcaaactagaccaattggaggccagaaaccctagccagtgctcaggttgacctgggcaccagcttcaacgcctagattgacattcaacctgatgtgtatagtttcgtcactcaaatgccaattctattctgggaataatttttattttagtcacaaatgggggaggagccctcgtacctagataaaaatatgatctaagtacctgaaaagcctagtgacaagcacctatcgctcaggttgatacttaacttttttttttttgaaagaaaggttgatacttaacttggtgtgttgggttctgcttgtctgttttaagtttcctctcgagcatctggatatgtttccatcacaaatgagatctacaacttgtggcaagccgaattcatactttgagattttttaccttttcggcaaagtggaatatcggcaaattatatgcaaaactggtagtcctgagtcacttgatttcgtaaaagaacaaaacctcctaaaaatgtcacttttaccagtataattttaaaaaacacctgacaaaaatctcatttcgtataagtgtctatcaatatatttaacatatagataaattataacaaagtaaattaggagatgataatgtttaataattacaatataaaattattcaaccacaacaactttaacaaggtattaattagtgttgaataaactggtagcaaaataaaagagaaacgatattatcgaatgaaaaaatt

SEQ ID NO: 18138 - DNA, 3585 bp, Cannabis sativa
gtgtatgtaaatcctttcttctgagtttctgttaaaagtcaattttcaagagtaaattctgctcatagattcatcagaaaaagaagggaattcagtgactcacttaaaatccgagaaaggaaaagtaggacattatatggtatttatgctttttgcctttcacttttgcagcattggttctctcttgtcgttgctgtcactgtgagtggtttattggaggcctacacaacacaacttgataatgctttcataccacttgttttctatagccttctttgtctgtaaatggtgcttccaagttccaacttttgaaagtacaagaaaccgaaaatgatcaaagccttccaaagaatacaaatacactagatacagacaaggtaaaagaggaaaaggagaaagaagacagatattcatcactcaatttatgtgatctctcatgattgcgttttgtagataactagatacgactgagtagagtggtcaatactaacaagatgacttatttgttctatgtcaatttttcattggtctgagttgggttcttaataagggttagatttagcataaagtattccttttgtaattttttaccatacattttagtttttagagagagttacacagagtaggaaagagttaggacactacactgatcctatagtaaagaaaatttaacacctttatttcattttcaacctctcaaagtttttgattatgtatctgctattatctgacattaaaacccaatgatgccttactggacgccatggcgaatataagcttttcaaatcgtgcaccaaagaattttatatttatatatatatttttagcaataagtacatgaaaaaagaatgaccgtattatgaaaagtaaattattcttagcataccaaatagaccaaacaataaagataatattctagagtgaactaaagatgtggcaaacctgatctgaaaccaaaagaggtaagtcgaaaacatgtaaaattctattccaaaccaaatgagcacgaacactcgtagtgaagatgcgatcaatgagaactctaggatttgttcccactttactataataacccactttgaatcccatttcgtccaaatcactactatatcaatgaatggagctatttcttgcagtgatcataattaatgaagatgtatgtgtgtagaagaggtaagattggttatctaactagagatactgaggcaccatcaaaaactcaccacaactatggtgttcgggatgaggaaaactctatgattatggtctagctagtaaattctatagatgaagatattagtcctatctatatatgttactccacaacaaaagaattacgggataaagtgagtaaatgtattcagatttgtcagttaaaaaaaaatgtattcaaatttgtttaacaagtctcaaacttttggactataattgaagcttggaagtgtacttaacaaggagatggcgatgtgacaaagtaatttgattctttgatgagaatgtgacatggatagtaatttgattcataaatatatattgtggatcaaattactatttgatgactatatagtaatcctcgtgttactttggcacaaataagtagaagtgctaatgctctttctagttctctaatttttgaactaatatgtccttcatgtctctaaattgtcttgcaaccttttctcttttagcaagctatcaaaaaagattctgttgtattgttttgtctaattcttactgaattttagaaccaactttctaggaagacgattgactgtgccaaaataatcaatgatctctactatttcgatgataattgttataagtatagacaagttcaagaattaagtggtagtaccagttctacttatgaaacaataatgttttggcatgccatcaacgattaaggcccctaggtttatttgaaacaaccattccctagtttgtttaaaggtgtgtatttaaaatctatgtattgtgaacattttatttatctaggagttattgtactttttttttccaaagcctactggatatttcatttctagtccgttctatctaattcatagtgatgtatgagaatcttcaaaggttaccactttatttggaaaaaaattatttgccacttttattggtgacaatacttgtttatgttgggtgtgtctaatgaatgctaattctccaagtttaaaatttgttcaagtatattttcaagattattgaaagagatcattttagaacagccaacagtcatgtaaatcttagctcgcagttctagcttttttctaaggacatgagcaaatgcacctccaaattctataatgacactaggtatacgtttattttatcattctaaatgtgttttgggaacagacttagatgagacatatcataatgccagattccattgtggaagacagattttttttttgaagaattcgccatctacgcagcttttctgtatgaatgcattcaaaacgacctgctttctatatgatccttatagaaaggaagaggcgttgatagagaaaggaagccagaatggaatgattttgactatcgatttattagtaaaaaacatttgctgtctctaaagtatatcctcagaaggacattggcagagtagagtaactaatgattaaccttactattttcattaatgtacgattctgatgttttgcaacaccactatgttgtggggtttttagggaggtaagttgagatacaatttcaagtttaactaaatgatctttgaactgcatatccaaatattctccacccctatcagttcgcaagatctttaaccacttaactaactagttttgagccattaccaggaattcttaagacttctcaaacgtttcaaatttttgtgcatgagataaagatgtgaatatctagagtaatcattaatgaaagtgacgacgtacttataaccacctctggcttgtatattcaaaggtccgaagcatctgaatgcaccatcccaagtggttatgtagcatgtgttccctttgcagagaagaaatgtttagttattttgccttctagacaggacttgtaagctgttaactcacccagggtgagttagtttcaaaggtccacctttggttagtctttgaattttatcataactaatataaccaaaacgtgggtgccaatagattaattattatatcgttattgttgcaaaattcatatgatatgcttacaagtgtacaaaattacaagaaataatagtggttaagagattgatatcatcccatagagattaaaataatcaacacaattatttatagcgaatattaaaacttaattttaactaagagatcaattttgaatgatattagaaaagaatatcaaaaacgagaataaaaagttaaagttaagaataatcagataaaataattgtcaagatttcgatttcaccctaattaaactacggttttgattattaatgtgcctagctgtatacccaaattttaacgacgatgacatgtcaacagtagcaacacttggcacaaaaatatcgagactaaattaatgaagaatatgtaaagccatgaccgttgggatgaccgttaa

SEQ ID NO: 18139 - DNA, 3612 bp, Cannabis sativa
  modified_base (3293)..(3293): a, c, t, g, unknown or other
tggtgaaatttttgaagcggcggtggcctgggaacccaataagcccttggtgatcgaagatgttcaggtggctccaccgcaagccggagaggttcggatcaagattctcttcactgctctttgccataccgatgcttatacttggggcggcaaggtttggatatttctatacatttctgctgcttattataaattagtttacttatttttggggattattatattgatgaacgcttatattgtataattcaaattttaatcatttaattatagtgacactgagctgattagtttggtaatgaatgagtcttcttaactattatgaagtgtttactgagtctgaagagtgaagccccatttgacagattatttgtatcttgttcatattaaccttatttatttccaattggggtgctatgggaaattggccaaactaataacatgaaaatgttaaatgtgcaaaataaccattatggtcactgtataatggctctttttaacatgaaaatgttgaattaagtctccattatggtcgtaaagtgtaaatttatagttgcaaaacgacaataatagttgttttgttgtcgcgaagtgtaaatttatagtcgcaaaatgatggtaatggtcgttatttttggtaattaaattttttaggaagttattttgctaatacatttcttacagcgcgtttagaaagtcacagtgtaattgaatttgtgcgtaaatagaggtaattacacaatttgacatgtttgtgtgaccatgtaattacactctaacggtgtaattagaggtaattgaggggttctaattacactccaattctatttgaaacattgcttaccaaaaatattattttctcgtgtaattactaactattttgccaaacaagatattaagaatttttatgtaattatcacctcatatccaaacacatcttgttttttaaaatgtggtgtaaatactagactgtgtaattactaccttagaaattacactacttagtaattatataattactttcaaacacactcttaatatgactatttttgcacaacactctcttgtagcaaaatttcataaaagcccatgatgatcggttagtacacattttgctttaatgttataatgttaaatcatatggtttgcaggatcctgaaggtctctttccatgtattcttgggcatgaggctgcagggtatgtataaacgtggttattcgatgttagtgttgatattttttccattaatttagtttgatgagtggaaagagttttggtgaatttgacacaggattgtggagagtgttggtgaaggtgtaactgaagttcaggctggagaccatgtcattccttgttaccaggcagaatgccgggaatgcaagttctgcaaatcagggaagacaaatttatgtggcaaggttcgtgttgcaactggagcaggagtcatgatgaatgaccgcaaaagtcgtttctctataaatggaaaacctatctttcatttcatgggaacctcaacatttagtcagtacacagttgttcatgatgttagtgttgcaaagattaatccacaagctcctttagataaagtatgccttcttggttgtggtgttcctaccggttagactttcttgtctttactttactaacgtgtttgtgttcttgaaccggatcaaaaccctctatgacctttgtatgaatgaaagatcttgatcttgttatgtatgtctctttttttcaggtcttggagctgtttggaacactgcaaaagtagagccaggttccattgttgctatctttggtcttgggactgtcggtcttgctgtaagttttcttgtttggcctttttggtcatttctttctgatgaatgcatattatttcagttacactcaatttgatcataacttgacaggttgcagagggcgcaaaatctgctggtgcttcccgagtaattggcatagatatcgacagcaagaagtatgacacaggtatagctcgaggtcttccatagctcatgagtttgatgtagaaagtgaacaaaagtagatagggaaaaaaacttggaattttggatgatgatagttgtagtgttgattgactgatgtttcgacttatttgcagcgaagcattttggagttacagaatttgtgaatccaaaggaccatgataaaccgattcaacaggtccttgttgatctcacagatggaggtgttgattacagctttgagtgcattggaaatgtctcagtgatgcgagctgctttggaatgctgccacaaggtgagtgttagctgaacttggtggctcgattgaattatgcttaagtggagctaacctcaccttctatgcgtttttcaaaactaaccctttcagggttggggaacatcagttattgtgggtgtagcagcatcagggcaggaaatatcaactcgaccatttcagctggtgactggccgtgtctggaaaggaacagcctttgggggtttcaagagccgaactcaagtaccttggctagtcgaaaagtacttgaaaaaggttatacacttacgcaaaacatagaaaaccaccggttcatctacatcatcagttcccaattaaaacgttacttatcatccttccattgcaggaaatcaaggtcgatgagtacattactcacaacatgaaactcggggagattaacgaggcgtttcatctgatgcatgaaggaggatgcctcaggtgtgtgctctcactggattgatcaagtgtttcgcaagtctctcgaggcaccaagctttgtcttttaccttttccttttctctttatgatgatgaagttgaataacttgggcttaccttatttccctcttttgtggtaaatcaatcaagcttaataacatggtaattggacattgtgttgttatttcctttttttcctaatctaaaatgagaagggttattggtgagataagttttactttactctactggtctttattttagttctagatcttgatcttcaccaagtgttggtgagaggaagtagataaaaaacccaagaaggtgaagatcaagtacttttaactctctatctcttcttgctattttcttgatatattttttcttctttattatctatcagttaaattatatttcagaacctttctcaaggtcttgtccactattactattagagggttttatttttttaagaaatatatatatatatatatataaatgggtggtattagccatttgaatgggtaaaattagaaaattttgagtttttatgtttaatttttctatctaattaaaanaatctctcatttttatatcatatgtgctgtgagattattctatcggcaaattttttttttaaaaaaaaaaaattaaaaaataccgatccaaaataatttaatatttttatgaatttaaattttttataatcttttacaaaaatatgaatggttgttttgaggttgttttataatattaggtattggtaacatatttgcttgaccttgaaaaattaaatctaaggtagttttattatatttttaaatatataaaatttagatttatataaattagatttatctgcttaattttattactatttttaaataattatatact

SEQ ID NO: 18140 - DNA, 3457 bp, Cannabis sativa
agtgtgcggtcattcaattaccatcccagacgctgctgctatctgtttctgacaaagcttgccgcttaattggaatgctttttccaggggtgagaaaagatagttttaattatcagggaacaaaataatgccactccttttattgcacaacctggtttgaatgtttcgaaagatagttgattcttaaggttcctgtaatatttatgtctatttttttcatgtatcggcaaccaggacatggttgtatttaagccgcaaatatcaagtcagcagcaacagcaacagctccaacagcagcaacatccccaactccaacaacagcagcagcacgctcaactccaacaacagcagcagcagataccacaactgcaacagcaacagcagcaaattccacaactccaacaacagcagattccgcaacttcaacagcagcagcaacaacagattcctcaactccaacaacagcagcagatcccacaactccaacagcagcagcagcaacttccgcaactccagcaacaacagattccccaactacagcaacagcaacaaattccacaactccaacaacaacaaattccgcaactccaacaacagcagcaaatccaacagcaacaattgcagcaacagcagcaaattcctcagcaactgcagctgcaacagttgcagcaacaacagattccacagcagcaacaaatggttggtgcaggaatgggtcaatcttatgttcaaggtcctgggcggtcacagttggtttcacaaggacaagcatcatcacaggggcctcctaacatgtccacaggaggctttatgaattaataattgtttcagctctttataaagaaactaaaaagaaaaaaaaaatgaaaaaatagaagaaagaaaaggtagtgccgtcacagctaattggaaatgtcagtagttgtcatgtgatgaataatatcaaaagacatttgtgtttcaggtcctgttaatgtatggaagtacatgatttgtccccagctgatttctacgtgggtaagttaacctcaagctttagtaacgttaagagattaaccacttatattttgtctgattttcatttggtataaggtttaatgggtagctctactaccttaaaatctggaatttgttttaacttttgatttcccaaagagattggaagcatctatcaaatgatgcgagcatgacgttttatacataaataacttattttcttgctcaaagaaaaggggtttgacaacgtatatcatatgatatgttgactaaatacattcggattaatttatgtaaattattatggtaagcggttcctagcagtgaccttgagagtcgatgccagtggggtcaccaccagctaaagagaaagaaagattgattccaccaccaactttaacattacatgcatccttcttaactttaatcatcattcctgaaactaaagctcttttaaaaggtcactggtgcaagtgtaatcatttgcgttaagatggctacaattcaccaaccaataataatactcataaatgtgtattatttttttatttcctttttaaataactcataataagaaactaaaaagaaaaggaatcccggagtgaagtttcaactttcatccacactttcggaaaaagaaaacagaaaaaaagtgcagagtaatggttctttgtacgatgaatagagatgaaaatttatattgcggaggtaggtaactgcagggactcgcccttaatggagcgataattttttggcttagcggttaatgagacagtggtgggggataatttcaaggtggagacgagataatattatctataccatattcaattccaatataaatatatagtgtttttttttttttttcaatgtatatatagtataataaatatttgtgagaatattaatttaatttaaatttaaaattttttcaattattttattatatatatttttttattttatcttaatggtttctattctcttataacttgaatatggggtaattagacgagaactgggtgaaaataaaaggtataaataagtagcagggatggcagtggggattagagaatacataatcccccaatttatgattttttttgttgaaagagtaattactaagtagttggactatcaagtatcaatatgcatatgctgaattttagaaatttctcattttttttactgaatcgttcaagatcaacatttagcatgaatttaaagtttttaataaagaaaaaaattataaaaaattcgaaaaagaaagaaaatcagaatctctaataaagtttcttgtacactaaataaaattattgtgaagcttctttcttagtagttgacagcaactttggcataagaaaattgctcaatattcacgacgaataagaatcatgtactcgatatgaaatgggagagtacttaattgccctttccaatcctaatatggataattataaagtataagtgcattcttaattaccatggaaattattgatatggcaaattctttatttggataaatactaaagctatggtccaaatgggtagctcatggcatttaaattccctgcatactattactaacatttttaattgctggctaggctattttctagagaacatgatgatttaaatgatttaattcctggtggataatgactaagaattaatgcacaatatgtacttgcctataccttaatgccacgcaatacaaacggctaactcaaattcactcaaaattttgagtagtgcgttgacggtttttttttttcctaatctatggagtgggatttgctaaatatcatgcgagttcagtctatctggctttagttacaacaacaccttgcttaattcctcaacttactcaactgggtcactcttgaaaaagtacattccctccctagcccaacaggcaacaacactaatataaaatgcaaaaacaaaaacaaaaacaaaattggttaatgagtacccaagtcatcaagtggacagtgcagtactctatattccttcccaacactttttcctatcactctttcaccaaccgctatatatacatcatgactaccataacttaagctcccacactctcacacatattgaacaataaaagaactctttgtgtgttcatcatcagctgcaaaaaaatggtttcagcttcttctcctcctcctcctcatcctccaaaggtaaaactcatgcatatatgatatatgtatatatattgtctatgtagtagtgatcatgttggctatgtatatatctatatttatgcggttatatattattacattaatttcaggagttaggtccctcagacaacaaatgggcaggagaagaaaacgactctcgccgagccaaatggtggtactccacctttcataccgtcacggccatgataggggccggtgtactcagcctcccactagccatggcctacttaggatggtattgtata

SEQ ID NO: 18141 - DNA, 4498 bp, Cannabis sativa
  modified_base (29)..(32): a, c, t, g, unknown or other
aatttcccccccttttttttttttttttnnnnttttttttttggttaaaattacaaaatgaaaccatttgcaatggctctattggtaccgaaatgggtagtttcataaacaggtaactcttcacgatacctttcgattccaatagccgagagattatccaattcaaaaagatcagagcttgcacaactagcgtcgtcgtcatcgtcttcaaacgcttcattgtcgtcgttaccgtgtacgacatctctcatatcaaactcaacgacatcgtttttattgtcgttttttagagcgacgacgtcgtttagactactatttttcttctggtaactctttagcaaatcaatcgcaacttcttgaacccgacgatgaccgtcgtccacaacgtagtacccaacctgttcgacattattactggctaacgccattagagctgatgttgctgaatcttgctcttcatgcaagttcttatgtccacaaggccgacaatcctcgtcgacgatcacgcttaccggacaaaaccttacagacctttttgctccggtgctgctgctactgaattttcctcgtgatgagggtgtgttgctcaggcaagacctcgaaaaagatgaagccgaagaacacgtcgttgtagacccatttgttgatttggattttctttgcgaacccaattcttcaattttggttttctttgtgttaccggttgtgaaaagcgaattgagaaagctcgcgagccgaccgccgggggatattggctggtttactttctttaagtctccgtagatctttagagcttttgatttcgttttgacaaacccgttttcgtgcttgggtttttgtgtagtcgaattttgagctgaaccaccgatattatatgactgttcgtaacgattttgatgatgattgtcgtagaacagaggaggctgattagacttcggagccgatacacttgtccgaatgggcttaggcttctgaattgagtaacaggaagaagaggacctcgattttgagcctgtacggaacgattctgactcggaagatgaaaacccacctccacaactcgattccgaagagcttgaacttgagttgagaagcataatatctctgtgctgatgtttagttgattttagattgaaatcctccacggagtttctgcggacgacgactttttcatgactgaccttcttctccatccatttctcgatgatgcaggctcgacggagactgttgtccatgccttcttcttcttgttttaaactcccggaagttgtggttgtactactactaatactactctgttttttcctcatactctctctgtacaagatcagctctccttcttcgtttcctttcccttcgtcaatagaacggtaaatggtgtcgagaagagtggaagagaaagaaggattttctctccgatgacgatgccggtggtggtgaagatgatgatatctttgagagttgttatcccaactctccattgtttggtttcaatttatagtactagctagcccaaagtaatgagatagagaataataatggaggaaagaaacagtgtgtatagtactgggttttggatttcaaatgatgggtaattatttgttttccatcagagagtgtcaaaagctgagaaagagaaaaacaacagagattgtagtgtgtttcttaggtgtttgataaaacaccaaagcagaaaagaaaagaaaaaattgatgattaaatgtgtaaaaaggacaaattcaagagacaaagactcttagatttgttctatcacttctactcacactctctctctctttctctctttcactgtttgggaacaaaacaagagaaagaaaacaaagcagacatgcgctttgatgggtgttcgttaagctttagagaaagagagagagagttttgagtatgtaatcaaaagccagagaccacgcctgataagaagagagagagattagagaagacgatgattgagagagagaaagagagagagagctcttctttgtgtgcttcttttttttcacacgctttataagagatggttttttttttcaagcgcgcgcgtgcatgaaaagtccaagctggatacttctagccagatggcatgatgacgtggaaattatcttaattttctttattattattatattattagctctccttcctggtcatcttcattttcgtttctttttcattattctttcttcattgttctacacaacacactacactttgccttctgatctcctggactgctcactagaaatgacataagatccttgcttttgttccaaaaagataaggaaataacaataatccaaaagaaaatttaattaaatataagttaaatatgtgtacggtaggacccgatattgatcttaacaactcaaaccgatattgattagggggtctacaattattatatatattttaaaatatatatcttttaattcttttctcttttttatacacatattttgtattggtttgattagcaggccaggcaaaaattttggcacaccctttaattactttagccacaaccgatattgatcatctgggtccagatctcgttggtacattctcatctatttctttttcttaatttccctttttaagcattcaaattattgattaaactatttgtattatttagttgtaacaaataaaatataacgtttcgtttaattcaaaatttaattacttgtatatttatatatatatttgtataagcatgcactactgaactgttcgtaaagtactcatgcttcattagtatgattgtttaagtagagataattttttggtagcctgctttggcatgcacagtcaacttctgcggctcattactataattcaaatccattataatttatatccatgtacaaagatactaagctagcaattttttatttacgtgtgaaatttaataataacatatataatctttatggatctttcattttcttcacatttttgtattaattatacaataaatgaaacaaaaaaataaacgttattatagaatatatataatatagaaccgtggcaaaaattataacaatgaatgacctgatatcttatatataataagggtcaaagttaatattaacctatgatcgatatacacacaacaaatcaattgtgtctaaagatgattggcatatcgtctcacaataatcacatatctactggctccttttacaacggcaaatgaggaatataattatgcagtagaaatggtgaacattgccttgactttaccaatagaattataatatatactagctactatatatttaattaattagctggtaaaaaataacacttcctttacttaatttcatcctctctaatcaattattttggctttgctttacttgagataattttattaatttttttttaaataattgtgtaaagaaagatatgaaattgtttttagctttattaagtgtcatggtgggcactccaagcttttagggtgtatctctactactgagtagtgttctccaacagtttgattacagtgaatcatccatataatttaccgacaatataattacgcagtcctttcttgtgatcatattgtaacactatatatatactctttttctttttacatttaaaccccttccaatcaccttaatttcttacttacctctccatatatgttttaattttattacccaaaaccatatgtttgttaattaattccagcgtaattttaagatgaatattattcaagtatatagatataaatcacttataaatactgttcaatattttatataatattagtatatttttatttcattaattcattatgtatatagatattctcaagcaactatagctagtagaaatatatacatatttaatatgatttctttgataggtagtgcatgcttttgtttcctacgtacgtacgtatagaatgaaattttatataatttaattagctttccaaatgataatacactatatatattttaattatagtatggatgtcataagttttcaggaaatcaaaattatttatgcacaaataataaactcaaaaaatctatttctccaggatagaacatgcttcaaataatttattttaatttgtgtttggaattatgaatatgttacaatttttttattgtggcatataatatatttgtaattcctaaaacacaaaatgagttgttttgaatattttatattgttaatgaaaatgtaaattaataagtaatgtacatgtaaaatataatttattttattaaaagtttattttaatagtatgctaataaattgtgatacaaatatgacacaaaataaaaataatttaaatttgaatcacaatatatagtatgatgcgaaatttgcatcacaataaatgttatgcttttgatatttactattatgtaatttttaataatttattaataaattttagttaacatgctcttttgcaatttaatgatttacattatttttattaaattttatattt

SEQ ID NO: 18142 - DNA, 3535 bp, Cannabis sativa
gagccgagggccttcgcaacaacacatcattatcatctccttcaccatcatcgatttcatcttgttggagctgattgaaacttctcattgctgggggtgaaagcattgaaggagccgagggccttcgcaacaacatatcatcttcttcatcatcattaatttcatcttgttggggctgaacaaaacttctcattggcggggttgacattgtcgaacgagctgaacgaattcgagttggagctgaaggccttcccaacaacacatcatcatcttcatcatcatcatcatcatcatcaatttcatcttgtttgttaagattgaactctttctctataccagcccatctatcttcaaatatcttcaacaactgttcagccatggaatgaacatcttgtcctttcgggttatacaacatggcattattaaaagtaagtctaacatcatcagcaaactcaattggtgacttatacaatgttttgtttaacaatctactcttaacagttcccaaatccattggatgcttaataattgaattataatcaagtaatcctaaccctttaacatctacaggtacattaaaaacccaaccaaacttatgtttcatcaatttctcaagcaaattaacacaactcttaaacaattgactagaatacttatctttactctgcccaaatctccctactccatgatgatgatcatcatcaactcttttcccacctttggatgatgatgatgatgacaatgacttcaatttcttgttactattctcttccttcttcttcttcttcttcttattcacaaaatcaccatggctgctatcctctgctccaactcgaactgacctcgaatcgcgatgcccaacagaacccacctcagaattcaccctcattgtgctctcaacttgtttagttacataataattagcagaaaactgagaatgagttgttccaccactctgctgattattattattattactattattaacaacaacaaccctcttagccaagcacctaacttgatcaagctccttaatgagcttttctcttagctttcttaaatcaatctttgagcatgaatttaagctaaacctaactcgattctcaaactttgaatacccatagccattgaccctatcggagggatccgatacagggcaactctcgctcgatgagtcgtcggaagccgccaccgccgccgctttcaaccgcgaaaaaagttgcagaacttgatgtaaatgatggaagtgacttggattttagcaagatcaaccatacatggaaataaaaatcgtaactttgactttgatcgaacaaaaaaaaaatcccaaaatggaaactgtttgggaaaaaactagggtttctgattatgggaagagacgtttggagaacgctaattgaagaccgaaagtgaaaatcagtgaaattaggggggagattagggttgttagtctggaattaggggttggaaattagggttttgaattcggggaagaaaatcaaaccctagaagaatggaaagttggaaagtgatatctggaaaagatagtttttaggggtgtggaatacacgcgctcacggagcgcgttagtgctttcagtgtggtcctaaggtggatttggacttggatcctttgtttaggtttatttaaggtttacttacactcgagttggagtttaatttaagttatgttttttgtgtcttaattataattttttattacaattttttatttaatttttatttttgaattatatgttaaaatattttttttgaatttttttgtagagatatttgttatagttacaatataatctctataaatttttaaaaaattatgaatagtttataatacaaaaaaaacaaagttcttgatattctaattcaccacgcgtgttcaaaaaacttcatacatatttttgatactgtaaattattcaaattgttttaaaaatttgcagaaataatgttgtaactaaaccgaataccacaataaaaaaattattctagtatgtatttttgagcacagaagttgatcaaaagattataataggagattgacggtaatactccttttttcattttaataaatgagtttctatttttttaaacaaaaaaaaactttattaaagaaaatcattcaagattacatcaagaaactaaagaaaatattatcatttcaaataacacgaactaaatagaagctcttgtaaaaaaatgagctacactatttacagaccattctatataacaaaaaaaaatagaaattaacatcactaatttacgatcaataataacatagataagaggcttcgaatagcttgtaccaaaataagactatttgtttcaatgaccattttactctatgctttctttttgatccaactcaaagcctcacacacctccatcgccggaaaaatctacccttctcggtaggaggaaataacctctaaaccatacgtgaaacatcaacaaaaacaacaaaaacataacaaaagctattgacaacaaagaacaaacccatatttactttaatcacattcttagttggtttctcccaaatattcttattttgtgcacaagaccattgctagagagaactcatagccaagtttgtaatagcagttgcacctactcctttgttattctaaacaagatcattcctcccttgctatatagcccaaaaatttatagctaactggttggaaaattccttgccatgtccatattcaccccaattccaatcttatcccaattaagcaatgtgaaattgtttttcaaatagcttggcaagaaggacagattgtatccacattaacatgtaaagctaaattaaaatcatgtaaattcctaaaccccattcattcttttgatttatagaaagaatgatttatagactgtcatcttattccaactcttccaatgaattccttcatcactaatacttactcatcatcttctctatttcgttacaaatctagcaaaagaaatacattcatagttgggcaaggattgagcaattgttttgagtaacaattctttccctacttttgaaagagatttctcctctcaatattgaatcttcttccttattttctccttcaaaaaatccaaaatgacggacttatttctcccaaaagtattgggtagacctctacccagacttgaacatcaatattagcattaaaaaacacataggatttattcaaattcacttgttgtcttgaagccatttgaaaacacagtaatagctccagcacattacgagctcgctcctctgttgcattgcagtataagtaaatatcatctacaaatagcatgtgtgagaaacgacataagcccctctctccaccttacatcctttaatcctttcacacttttcacaatctgaaatcaaagctgagaaaccttcaacataaaaaataaaaagtgtcaaactcataaatttgtgaacattgatcgagacttaataattaatacttttgaatatatattactaattacatgcaatgaatttattactgagtaataaacaaa

SEQ ID NO: 18143 - DNA, 4690 bp, Cannabis sativa
atgacttgacatttcaatattgtagaatgaaaatgctactgtcagtatagtccattctcgtaccccgaatgctgaggagctaaccaggcaggcagatatagtaattgcagctgtgggtgtgccaaatatggtgaggggtaattggataaaacctggtgctgtcgttattgacgttggaattaatccagttgaggtgagcttgtttgttctcccttcccttgtggttatgtctagaattgttgctcttttcctccactgaagcatgcgaattggatgctgcagtgtgtagtttctattgctatgtaaacttgaattcttcatttggatttaaatttcatgtcttattataagtcaagttgagattctatgtttttgagcaaaatattgtcattattgcttctgataggatgctaagagccctcgaggttataggctggttggggatgtgtgttacgaagaagcgtgcaaggtagcttcagccatcactccagttccagggggagttggtccaatgacgattgccatgcttcttgataatacgctcatctcagctaagagggcatataacttcaagtaagaccttcagaatctgtggtccttgagcaaaattttcaattagcagctattctaaaccccttacggatgagcttctctgtattactttctatttttctattttataagagaggatctaaaacagataattgggtttcgcaagttgcctgattgtaaataacaaggctgatagttgcctactttttgatgcaatatttattcttttcccataattgagtttagattagaaaatattgtagagctctttgtaaacagagcatctgctttttcatttccttattgcgatagaatacaggttggtatttttgtaacattgcagcaccatcaatctcgcatatgtatgcatttatggttcaatctttccctccttttctaattaaagattttgctaagtcgtaaatgactgttggggcaacttatacaagatttaaattgccaactagcacacctgagcttgtggcgatcaaattaatgatacaattgatttgttgagataaaaaaaatgagatcatcgaatttcaaataccatgcctacggtaaacaattgtctcatccatactattactatataagtgggaacaaaacattgagttccaaaatttcacctttggttgtctaggtctaaatcattgagaaataatataagatgaggaaaacctaatggccatttcattccgaaccaatattcgattcacacaacctcaacattggatacaagtaatgatatttgcacacttatggtaatttttcaaccattcatattcatttaagatggatcatgtttgtgtgtaacatgtgtgtgaacatatatcattactcttcttaagttacagataaaagaaaaaggtacatatacgaagcctcaactgttaaacttcacccactccacttaacttaaaagtgttggctcattttacagaattctctgcagtcaaagtcttttttcgcaagaaagatcaactctcgcttcaaaacgttctatttctgttttgttttgctgatttttactccttagaatcgaaacctgggaaaaaaaaagaaaagcttcaactgtgaaaactactacggttctcaaaatgttgccagaaatcagttatgacattgctatcaataactaaaaaatattaattatcaatggaataaacggttaactggttccggctttgcatctcaattacttcagattcatattaaaccccgagtacagaaaagataaaaccatcaaacggctaaaaatgatcaaattagcagtaccttggggcgttccatggagcttccaaaatatcctatcccaaaggataaagaagaataagcagccgcaatctcaatagctttcagtttcggagtacttccagaaacctaaagtaaacatctactacataactgttttcggacaagctaaactaaaaaatgttccaatcaagagcatggaactcacccctgtgtccgcttgtacaagtaaaattccagcacttttgtccgttccattatggttactctcttgcataaaagaccgtaaaactttgttacaagctgaggcaggaccaacctgtgaactatgcaatgtatacgactgtcagacataaaaacagagtctgcctgtgaattagcaggggcaaaatctaagttttgctaagtttctacaaagcactgtattcaactttgccatctcaacataatccaaagcaggaaacaaaatcattcggtaacaaaatcgttgagtttttctacccctaaatccttacctattttactaatctaatgacagcgttcctagagagaatagtttttgaatcttaacatactttccgagagaggagtcaatagcaacagatcttatgtgatggaaaagtaaaaaaaaaaaaggagaaatcaaaaggcagtcatacattgatgaagaaacacagcactctcgggctgcaaatcctttcattagatattcaccagcaccacttacacaacaaccaaccacaaatggagctccaaaaggacctttagaagatgcccaacaacctgaaccataaagtcctgctaatccgacacgtcctctcacctgtaatatatgtgtgtatttattattattaatagtatgcagacaaaatgttgggtttcttaaaatagatggtgagtaaaatagtagtctatactataatagtccattaccttcatggcaatgcctccacttgaagccccagatgccacatgtccttcagtgtccacacaaataacaccaacagtgtccatgacgcaatctgcttcaggcacatccctttctgaaggataacaaggtttagcttcttttttctgaagcaatatgcacgtaatatcagtagaataatagaaagaaagatgaggtaaggtacctaaattttgtagactacatgactcaaaggaagatttatctgttccagattttgcatcaatcatcatagctttgtattttttccattgtgcttttgccctttctgtcaccagccactatcgaaattcacaatgtcagttgagacaatactaagatataagaagctgaataatttgctcacaatgggaaaagaaaattatataaggacctcgtcagcctcttttaaagtaactggcaaagcgatacccttggattttgcccattcacgagcaccttcgccaaccaagaacctgtgttataagaaacgttgttttcaagtttgctaagtaacacaaaaataaaatgaatgaataggcacgcctactaatctatctattctagtctgtaaagagaagcatataagaagtcaacagcagacagtcctaagttgaactgatgatgtttatacaaattgtaggcagaaacacttcactcaagtacacatttgcttaaaaaggataaaaaagaaaagacaactgacaaaattagaagaagcaattcttttaagcagagttcaaagcatgcctatttattacaagagacgtaatcagaaacgtaaaaacatgcctgtaaactaaaattagagagagaagacagttttcaattacatgggaggtattagacctagcaaagtagatttcgtcatttgctccttcaccagtaaagctgcaatctggattgcgtttttaacacctggtctaaaacatttgcagtggatgttcagtaataaattaaaagagagtacactaccaacagtttcaatagattgacaaaatgaaacaggcaaaccaataacgaacacaatgatattagccttcacaatataactaatagaatatgcatcagagccataatgagattacctggaaccgctccaacggctccaaatgttccagtatcaccattcataatactggcatcacattccaccgaaccttcttcgttcaaattggagcctcggccagcattggtgcttggatcatcctacattggaaaaaaaaaaaaatctaagtgaatctataagctataattctaacaaagatctataaaatatgtaatctatcaaaaagatgtaacatttcgaatcatgaaggctacatcaaattcgtttttttcaatgaaaaacatccgtaatgataaggagcacttagtccctactcaatacttataaattcatataaatgtacctccaaaacttgaatggcggccgaaacagcatcgacacatccaccagagtcctaagtaagataaacaaataaacaaaagcttaaactttttgggatttatgaacaagctcgatataaagctgcataaccagtatataagatataaggtaacgatttccatgaacctaataaattaaaaagagacgaaaccttgagaactgaagaagcagcgagacaagctcgtttcatggcggacctgagggctttctcattggacggcgagtgaaatcccgcgcctacgtgaactgcaacgaagaacctagggttttgatctccttcgacttgatccaatgccatcgatcaatcctgatttgtgaaatctcaaattcaaataatcgacggtgccttttccgccggaagcttcctttaaatcccgtccaggtctgtggcttctcaaaactttaatttaaaagcgcgggtagattcttggatattattctcgtttattattataacaaataaatacgaaattagcttagggcgttca

SEQ ID NO: 18144 - DNA, 6633 bp, Cannabis sativa
agctaattcatctcctcattgtgtagccgagttcaagagctagaattcacgagtaaactcgcttttcctttcccagttggtggtgcgagctggttctggggtcttccggtctcaatggctggtgtgatggagacagtcactccatcttgctggttattcactgggttgcccttgggtcgctattcccttctcccactgagggttcataaccattcgtgcctcctccattcttaggcaccttgccacctgtacctcccccttgcggcgggcattggcgagttaggccttgaggcaatcagttgaaggccatcaagtcgcactttcacctcttggcggtggcgagaacgtctcgacatcttctcaacgatcccaggtaaagaaacaacgttgcttttgcatgtcatttcccacagacgacgctaaattgttgacagtaagaactcgtcaacaaaataacaggtactcaaagtggcatttaaagatcttaatataagaatactcaaagtaaaaatcttacaatcttcactcttcagaaaaattactgtttcattaatatcttttttttacctccaagaggtcctcattacaatgagttcaagggctctatttatagtgagatcttcacactttacaaccttattagatccctaaatcataggatgtcaagtcactttcatgcttgataacacaatatctctagtagcctgatgtatcagacatcctaagttacactaaaacttcctcttttacttgtacctcaaataaaatgaactttgtctcctataccagtattcattgcatagtcgctatcttgtctgcgatccctggcttaaacatctctagcctcgataccttctccttacttccatttgtatgactagaccagatatgtggtaatcgaaggttgtaggtgtgcgagttgaggaggttgctcgctgctgggaggagcagcttgtgcgaggagctgcccttagctgcatggagcagcttgtgcgaggggctaccctcagctgcgtcgagcagcttgtgaaggagctaccctcaattgcgtggatcagcttgtttgaagagctgccctcaactgcgtggagcaacttgttcgaggagcctgctcctgctgcatggagcatcttacgcgaggagctatcctcagcttctactcaaggagggtaggtgcatattgcgtggagctgcccatcgttgtgcgtggagttgtaatggagggaagaatgtaataagatgtggggatgtgatgaggataaaaggacaaagaaggtggggacctcctcttgttccttttgtttgtttcaagaatcttgcaatatccctccctcttatttgttgtccataggaatactcacttattgaacttttgtggtataggagaaaaggttcatttcattcgaggtacaagtaaaataggaaattttagtgtaacttacgatgtctgatacatcaagcgacctgagatactgtgttatcaggtgtgaaagtgacttgacatcctatgatttagggatctgataaggttgtaaagtgtgaagagctcactataaatagaacccttgaactcattgtaaagaggacctcttggaggaaaaaaagatattaatgaaacattgatttttctgaagagtgaagattgtaagatttttactttgagtattcttctattaagatctttaaatacaacttcgagtttctattatttcgttgacaagttcttatcgtcaacaatttgggaccgtctatgggaactagaggttgcaggggtgtgagctaaggagactgctcgctgttgtgtggagcagcttgtgcgaggagctgccctcagctgcgtggagcagcttgttcgaggagctgccctcagctacgtggagcatcttgttcgaggagcctactcctgctgcatggagcatcttacgcgaggagctgtcatcaactacttctcgaggaggctaggtgcatattgcgtggagctacccgttgttgtgcgtggagttgtaatggagggaagaatctaataggatgtggggatgtgatgaggagaaaatgaaaaaagaggtggggacctcctcttgttcctttgtttatctcgagaatcttgcattatccatccctcttatttgttgtccataggaatactcgcttattgaacttttacggtttacaactcccaatattgagatttgatggatattgtctgagattattttatgagttaatattatttaactgcgctttcttccttgattatgtgatttattcatctttctgcttattacatgtgtttgattgaccaccttatgcatgatctatgatttcaatacaaaatctgaaaagtgggtattgagagttctctaaatgaataaacatagattttaatgtgaaacgaaagtattttcacaacttatgtgacttttagattattgcttaatgcgaattatttgttgtactatcttagagatgcattagttgacatgcaatttaggatctttataatttgaaaagagtttaggttaatctataatatgtcatcacataagagggataataatagtcaatcagtattaacaattggataatcaaagtaattgaaatcagttccctaatttcttatctattgattgaacctttttattgcttattttgtttttctgcattattgtttccaatatcagtgtttttttaccaaaaagaaatataaatccaatttggttagtacttagttacgattcccttgggttcgacctcacctgtgtgagtactacttgtttaacgatatgtatacttgcgtagcttgaatacttcacaacattatttacacacaaccctgctattctaactattcataaattttgctctgctatttctaggatactaaaccgtatctaagtgacgctaatggccaaatcatcgattctactgttatcgagcataaaataagaaaataaaaaaattcataattattatgcacggtacacctagatttcaataaaatcaaaatgattgataaattatttgtcaaatacctatttttgaatataagacttattttctactaatacacatatattcacaaataattaattaagttactaataagctctaattttatgtctaattatgtggtcattacaccacttgccttagtataaatagaccgcatcaccgattatcacgttagtataaattcagtgcactaattaatctcacgactaaaatatttgaatcttataatgataattattttctattgatatgaaattacaataattgtgaattaatatatgttttgaatttaatagaatttacataataaacgcataatcatgcaaaataaaatgtgtaaaccaagcaattgacatattcataaaagattttttattttatttattgattaaataatgagtttacataaaaaagttttatttaaggcatagaaccccaacaaaaagaccttataagaccctaatctttaatggaccctattaatgggagaatttacgcaagagaaatcctccgttactcattaagatatggaaagaagaaattaagatgaagttacaggaagacggagtaccgaggaccacgagaacgcccccttcaagaaggcccttacgatgaggtacttgcggggccccacctgtggggacactcctgcgaagaaactcatgtgggtacacctccctgcgaaaaactcctaagggatcctcctacgcaaactccttgcgtcagggacacacaaatgatgaaccattgtaaggacctcaatcgttcggtagtctggagttttttcattgtctcctaagtcttggtgatgctcaaatgatcctactactacaaacatagtttacttagtccatgttaaggaaagttagtgagaccagcttaccaggtagaaattattagttgttttaggcaatgatgtgtttagaactagatccagtcataaaaaaaagtcatagatcactttcttatctttcaaacacatcttgaatcattcaatttaaactcatatcgagaaagttatgaccaatatactaagatcactgagcctgtaaggaggccccctacgaggagagacctgcaagaagggacctgcggggacccttttggcgtggactctttgtgttggggacacaccaatggcgaccctttgttgggaccttgatcgttgggtaatacagagtttctcttcattgtctccctagtactgttgatgctcaagtgtctcgatcaccgcgaataatatttacttactcaatagtaaagacacatgtgaagctggatacccaactaacatgaagatggtgaaacaaagatcctgaggcatgcaagagggggttccctatgaggaccctaagacctgcgaggagcggatcccctgtgaagaccccatgacctgcgaggaggggtccttgcgaggacccacatggagctgattcgtcatttccttaagagcacaaccattcaaaaattcgccatagtcccctttgtcttggaaatactcaaatcgatcaattactatgagtacaacttcaacacttagcccatggtaaaagaatacgggagattaagagcccaagcttggataagagtgacggtacaaaggtcctgaatctggaaccaccaagcatggatcacaatgtcaagtcaatcgtggaagaaaaggcttgggcgagtagtggcgtcaccacaaccctgcaacacaagtacactataccaacaatactctaaaaccactagtctaacccaacaaccactactctaagtcctgtcacttgaccagtgtactatgtactagttgttctcccttaggaaccactagagaatcaatttgtaaacaagagccatgagagctcttctctaaatagagactaatccctcattcaaaggggttggaaacttggtgtaaccatagttaaaatatcatcaataaaatatactaattttttctccattattgttttgcaagtttttaagttttgctttctttacacctacattctaacttcccaatactcacacattaagtttcccgccactaacttcgttgatgagttctcatcgtcaatagcctcggtaagactctaacaccgtatatgaccttttcccccctctttgtcccttagggctatctagtagtttccaatgctactattctgtttgaagcaggcaacaatgtttaaaactaagctttatatgatgatgtggcaactattagttttactccataagagacgaggaaggtgaaatgtaatttctcaattgttggagtagacatagttttaatcaacagtagacaaccctctataatttatatagaggtgacatatgttattgcactaatagactttcagagacccaccatgattatattgatgaccatgcatatctcttaatttttcatatttaaatttaagaaaatataaattttatgatatttataaattaaaaattacaactacaatgttaaaatatttattttaaaattatataatagaaactatctcagttataataaagtaatgtaaccaatgcaacatagttatgtaaatagttatgtaataactaaaacaattgttttttttttttaatttttatttatactcatttattttttattatgcaaaatgacaaaaaaaccttagcatctagtagaagagatttaccagaaacacctttaatttttctcaatttcaattgtttaaaaattaaagtcggtattattaaaatagggttactgtgtaaaaatgcaccttatactgtagctatatatagtatcagattagtagctttttactgtagcaacaaactccgttagtaatctttcattgtatctacattgcacttctgaaagataatgttttttttcagatgttttttctatatatatacactgtgtatacatacatactatattcaaatttttatatgtttagggttgatatggtctattatattttgagtttttttacattttttgctttggatcggttttatactgatgcaagtgagtttgcattctttaaaaattaatgaaaatgattttgtgttagttaaacattaacgcaaaatcctaacagtcaaaatcgacacaaaatttaaaaaatgtataattgcgtcgcttttggaagttaactgatgcaaaaagatcatgggtaatgagatattgcctcaatttctgaaaggcatctcaattttttttttcttcatattatagttgtatacaaatagcatagaatagtaattcatataaatcatacattcaatttaatgaatatatctttttattcaacacaatctagtgaaactaaatcacaaacccgaatattattttctggttcctacttatcatagcagagactctccctaatcagtttgtcaaaattattataagaatcaccttttatatcagtagtttcaaacgctttcttcttccaatataaacttttttccttcattttctttcctttctctccttccatcatctccttcacaagcattgagacttcttctcttttgacatcaggactaagttccacccctatacccaatgtgttacaagcaaaatggcagttggtttgttgatcagcaaagaaaggccaacaaatcacaggaacaccagca

SEQ ID NO: 18145 - DNA, 7330 bp, Cannabis sativa
  modified_base (6930)..(6953): a, c, t, g, unknown or other
ctgaagaggttgttagtagtgcagctacttaccttgtataatgttaagtgctcaagcttcgaggttgaatgaacctactgcaacaatttctactgttgtattttctaagcagtagatgaaactaaatacatatgttcttaaagttaactgtgatgttgcagtctttttcatcttattttatctatagttttttgtaaaacgatttgaaaattagattgttgattatttagctcattttttctaattctaatcttgaccatgtctttaaaaggtctttaacatgtgagatatctccattagattgtatgctattattaaaatgttatgattttttttaaaaaagaattattttgaattatttttcattatttaattgttgtgtatgcatatttgtccgaaataataatatatattttgcacattaaaacgacgtagttttggggatgaatttattgttagatcttaaaccctaacctaagcccctttctcctcataatcatatctctatcctctttgttgtctcacagtttctccgccgtgagtcgtcgccttccgccgcgttttgtcttttcacattgatttgggtacgtctgttttatttatttatttggttagttgtgctctactgtgctaaaagtttgattcttttttctttcctttgttatgatttgtcttgaactttttatcagagtttctgtggtgtcatttgggtatcaggttgtgaagtagaggtttagtttaatcttgggtttgttaaatttggttgaaaattgctttttggggttttttttgtgtgtttattgttttgagttttgaagattatttgggtttgaggccttggaatcccttctagttttgtgattgtgattgatcaaatggcttctgagaaagtatgataagtctgaacaaataattgaagagaaagacaaaaatgctttgtatgtttttaatttggagattaatcacagagtcacagagtcaaacaagattgatagggtataatcagtgtgggtgagtgagataattcttctaatatgttctactcttttggtatgcaattggaataaagtaaaagctaattcaagtaaattgtgttctattgtgtagttggtctggtcctttgtctgtattcttgaatctccaggctcaaataagctctttttaaatgtatgttgtagcttcttgaccacatctcatatgttcattatttcattaggtgaaaaaaatttaacatgctagtccaatcttcaagattgaaatcacttcttaaaaccatattaatcacttcttttagatttcatttctgatcaatattaatggttttggttatgaaattatattctgtgaacataaggaaaaccacacttcagattctatttctagggaaaaaattagcttggaattgatttatccatttcattcgaatttttaaattgatttatccagattgtgttgtatctgagacactttcaagggtttgactcactaaatcaaatgatagaattgcacattatatgttaatttgatgctatatgggtacaaccaaatattacaacaatttaatataacttcaattgtatatgtataaagcttaatcctcaacccctctttgacttgggttgtagaatctgcaaattaacaattactagtttgtgaagtgtttgaaggttggtcttttcaacaacaaagagcaacagaaaagttagtgaaaaaccatgagaaagctaagtttccacgagaaaaagctactgaagaaagtcaacttcttggaatggaagagcgaaggaggtcacagagagtctcatgtaatgcagcgctaccatgttactggtcgtgacgattataagaagtaattaattctcttttaattctttgtgctttttggtctatttgatttctctatcaattgtttatttataattttgtttaggtattcgggtttgtgtcggatggtgcataaattggtaaacgtattgatgaagatggatggaagagacccttttcgtattcagatgactgatatgctcttggagaagatgtgagtcccttttctttttatcgttttcttcaatgctatagttctttcttttttgggtctttaattttggtattaaaagtagtgcttttgtggtgagtgttagtgcacatggtttttagttgaggtatccaaatcagtaaattggttacagttcacattatagcttcccttttctttttcttctaaggatattgatatgtctctatgtatatgtacacaaatttatgtgtcaagaaagaacagaattgagtgatttaaggctggaaaggtttaataaaaaagaaaaacaggactttgttgtacttatgttaacaatcatgagattcgttgtatctttaatcaatccagtcacgatgatgatgttaagtttcgttgaaagaccttttcgagtgcttgttcttgttccgtacattccacttctggttgttattttcaatgtagctataagactttgtaaaaggtcttcttagatctaatctgcagagaaaaatgtgttccgaattcgggatcaggcacaaaataatgtaccaacaactatcatatctgagaatttggagtgttcatataaccaactatctatcttcatagttaactattaaggaataatatttggttttaacacaggtacaacattggtgtgataccatctaggcaaagcttggctttgtgcgagcgcttaactgtctctgctttttgcaggtaatgctttatatctgattatcggattttcatcatttaagttttgtaatgttatattaatttttacttttgcttttttttttcttgttctctgttgtagacgaaggctttcgacaattctggtgcggttgaagtttgccgagcacttgaaggaggctgtgacatacatcgagcaagggcatatacgagtcggtccagacactatcaccgatccagcgttccttgtgacaaggaatatggaagatttcattacatgggtcgattcatctaagataaagaggaaggtgttggaatacaatgacaagttggatgactacgacgcaatgaactgaagatagcgcctgcaggttgttgcggctataggcaagatagtatgtcaaaaaagaaaacggcattgattaggctttttaaaaccccatttagcttcaccgggcaatgagttttgaagaagcagatgaaatccgccaccagatagagcgatagtgccctaggcttcggaaaatcctctcacttgtttttctttctaaacaatctttcagagccatgtgatggtaaaatagctataaatatctcaaattttactttggaattggacgattcaaaatgttatgaaaaacttaaacgagtatttatagtttttgtgctttaaatgccccgatataacaattggatcaatgtaaaaattggacataaagttggctatatgttacaatgaactttaaactctacaaaattggccatgaaattcatatttgactttggttttctcccaatcattcaaaactcctaaagaatacaagaacatagtgcttattgataagttttttggttgaactcttttcaaggtcattttgtattttggtttagtagtttgcataaccaaatttttggacaaaccatcttacaaagaattattaaaaataagctaaattgcaaaatgaataatatcttataaaaactcataatttgtgtgatgaattttttaaaatattattgtgaaaataatattataataaatttatataattaaattctctaataccaattatataacaaaattaattttacatatagtaatatataattatactcaattactagaaaaaaaaattagtaagaaaaaataacaaactatatttataattactacggttgtcaaatatttaaaattacaattatctacatatattaaataatctatatagaaataatattaaatttacacctattgaatggattaatatatgcatatatttaaaaaaattatactaataaataaacaatgtttaagtattattgtataagtgaaaataataatataactaaatttaaataattaaatcctctgataccaattatataacaaaattaattttacatatagtaacatatgattatactcaattactaaaagaaaaaaattagtaagaaggaataacaaattatattcacaactagtacagctgtcaatctgaaattataattatccgataaatattaaataatctatatggaaaccatattaaatttacacctattgaatggactaatataagcatatatttaaaacttttatactaataaataaacaatgcaaatacaatgtatccgaatctcttttttgtaatataatttgtcttaattggattttttttacttttagagttatttttattgaacctagattatgatttcaactttctatgtgtatttttttttagtatatatagacctcaatatgcagcctctaaatcatctctctcaaatatattataccgtagaaacgtttttttctctgtttcatttgagggtgataaaaaaatggtgggttctgagtccaaccaacaacttgagcttactctaagccttaagccctcttatgtcccccaaactctcaccagtcttctaagcgatctagccaaaatcgatgatgttgaaaagaaaatatctattttgaatgattatttgaaaaagtatgaagaagaactctctcagatcaaagatctgagatatgacgttccccaatgcatgcttctccttatggacggtaataatttctttcatcatttatttgtctaatttattttcttgataaaatatacaaaaaagctttttgtgtcaacaatcttatatatatatttattacagcgattgaaatcgtaaaggatgaaattactaagacaacaatgaggaaagttgtttatgatgatcaagatatatctgtattatatgattataatcatcatcttgatggccataaactgaagaggcgagtttctgagtttcttacaagtaaaaaagagacttaccagaatgactaccgtaatgatgagatacaaatgaaggatatcatcattaataataccattaataagaataatgtaccgaaaaataaatacatatgtaacggtttaagtattcagaaggacaaatccaatattttaactgaggcgagcagctttgttccatggaacccttatcaagaccatctctttacaactcatgaggtacgaaatctaatctggtaaaatatttttctaaaatgactaaattatcctcaaaattatttattcaagtatttaattttttttaattattttaagtatttataaaaaataattaattacattgtctttttcagtcatccaatcacgataaaaggatggtagagatagataatacaaggaaaaatataaatgacaatgatggtcaagatgagccgatgtcaaatataatacataaaagaacggtgaaagagaacgataacaataatgagaaaagagaaagatcgaatgataacgatgaaaatatgccgaaattgaggagatgtggtagtgtaataaaagagatgaatgagatgattcatgggggaggagtaatgttgcaggcagagcaagaattacttttggatagcaattggaagggtactactataactaggagaacttggacacctcctcttcatttgaaatttcttcaagctttggatgtccttggagggcacgaaggtaatttcaacaaaaaatatatatatatatattttattataaattttaattattattctaaatataacttttcggttttgtaataaaaactaaattattttacaaggaaagaaatgaaattttgtatatttttttttttcactttcactaccattttgggtattcattcattccattttaacttattagattttttttttatttctttataagaatacatatttgactttattttccaagtaaggattataaaaatgcatttattagattcttttcaatcctttcaattgtaacctataaatgctaaattgcatttttgtccatactaaaatttctccacttaccaaacccaaattattattaatatttgtttaattacttaattttaattaataccacaatattaacattaatatttttttattataatatatatatttttttgtgtgtgtttgaacacagttgccacaccgaaacagattaaggagcaaatgaaagtggaaaacctcactaacgaccaagttaagagccatcttcaggtaattaattaatttattaattaaattaattagcactatgaatacttaaatttacggataaattaaaaaatatctcttttttttgttccattaatcaaaaatattctcatattatatttttttaaaaatatattcactttttttttttagtgagttgtccaatatactttcactctctacttaaatcttgtatataatttgcttaaggaatttaatgaggatatcatctttaaaagtgggtatatcttaaagaatatgaaaatgaagataaaaataaaaacaaataaagtaaaatgggtatatcatgtaattttatcttaaatttaactctcggttgtgaataatacatagatttaatttttaacagtaataatacttaagttataattctaaaaattccataaatacttgaaggtccggcccaaggcataggcgagttaagcttgtatctagggcccacctaactctaggatcccaaatattttattctccttttaaaaatatatatttttttattgattttagaaaaataccacattttttttaataagggctcaaaaatattttctttcctatgagtcacttaatttcaccgaccttagtacctagtcgttaagtattcacatattatttttttattggtatnnnnnnnnnnnnnnnnnnnnnnnnaataaaaatttaatgacttggactaattaaaaattgtcacgtgactattgacttcacacttaacagtcatgtacttacatgcaactagagttaaacttatagcttgtttacttagtgagaatgagaatcaatggtatgatattaatttacatacaattgtttactaaattttgaaaagaaagaaaatagtggggtccacacaaattaaagaaaaataaagaaaaatattcttccccaattttataaggaatgtttttttatttcctaatttattttattttaattttattaattaaaataaaaaaaaaataattaaatcattcgattatttttctaattttataaataaaataatgtaatttttattttttttattt

SEQ ID NO: 18146 - DNA, 3781 bp, Cannabis sativa
ttaataccacatatagttttacataaaattattgcataaaatataattcaatataatacaatacaatacaacttaatacggcgttccaaacgaacttttatagtgttaaacactataattttttcaaaatattaatatggcatgatgaggaaaaaacacacgtaattatttcacaccaccaaaatatcactatatgtatttcttcatttgtgtagctgttttgtactactacatatatagtactaattattgagcattgctattagacagcagtagtgtctattattttcagacatatcgtttgagattttttaaattaaaaattattatattaaattatataggatatgatacttaattggacatatagcaatattaacacacggtgcctttagtatttctctactaattagtaattaagaaaaatttgatttaattattatataatttgcaggctttcactgggaagacaatgaatggtgctacaacatacgtgttaatagatatacttaagaaaaatcctaacataacatatggagatctattggatgccttgtctgacatcttcgagcaaagtttagctgaccaaatcaaatgctttaattccagaagattagcaagacttttcggcaataaaattaatcaggtagttaatttcttattaaatttttattatcattaattatgtttcattacatacaatatctatatattttctcaattatttacttattaactataaaaaaaaaagtaaataatacggtttagctctaatttcagttacgagaacaaatagaaacaaaactactatagtgatgttaacgttattaataatttggtattttgctttctaataaatgtgtggatatataattaaggtgtttttaaaacaatgaaattattgttaggttgaatttttttttttgcaaaaatactgtgtaaattttatactatgaagttttcacggttattcaacggttatttttagttgtttcactgttattttaattgttctattttgttgttttacaattattttataaaaaaacagtaattttgtaaaaaaagtcgtgtgaaaataaaattataaatttttacctaaaatttaatattttttgtaaaaatcctataattaattcatatatatattctgtacattaatttagaattttttttttggaaagaatattaagtcttatggttatatatattgcagaagcctttgctgtcatcttcagaaaagtttgacatttaccgaacaaaattttccctataatggtggacttctactaaaggccatggatatgcataacaataacactttttttctttactatatagtttttgtactaaaccttgtcgtggtatacttaattggaaagatgccattgccaataagtaaggtaatttatagataaactatatagtacatatatacagtacaaatagttatgtactttatgtacctctatatgtgtaatatataattgggttttatgtaatgtgtacttatataaatgaaataaaatttgttttcggtttttgtggaaagaaaatttgctctctaattagtgtgccctcatttcactgttataagtctgccaacttacaagaggaaataatatactgaaatctttatcaaaatataattaaatgagtaatagatatcacactatgatatacaacaaactcaaactatccatgcggacaaaacaggacttggataatttaagtcttaactgacctagcctctataaatgttctaaggaaaattgtgcgcgtgaaaaaaaaaattatcactagatgataatacaaacacaattgttctatcatatctttgatttataactaaagagatcaaatcaagataaaaattttattttatgatatcttggaattaatgttttatgttattttattttaccacctacaagcttttattatcaatttcaaaattatgaataatgttaatataacctcattactaagtaaaaatatttaattaccaacttttaaaattaaataaaattattattttaatattttcaacttattgtttaaaataacaattagtttttatattaaatttaaaatttcttaaaattagcaatggccttattttcattttgaagcttctaatttcttaaaattaacaatctttatttttattttaaagtttccaattaatttaataaattaacaatattatttatcatttcaagtttctaatttgttaaaatcgttataaagtttccaattagttaaaattaataatttaatttgtaacatttaaaagttgccaactaatttaaattactaatttttttaatcattttgaagctaccaattttttatagtttaagtgcgagagtttgaggtttgggtgaaaaggctaagagaatgcgagaaatttccgatatcgatctagggtttgaggggttgtttccttattcatagttcttttatgtttaatacgtttaagtgtcaattaataccggcggataattactggcggaatccgccggtattaattaatgtcggcagtctcctctattattaccggcgggtggctccgccagtaatatcaaaatttgttgtagtgcattgaagatttataaatatcgatttaaacccgacagtactaattaaaatatatggtactctatagtgttagtttttttaatttattgatccgacctcgaaccactaaaattacattttgtagtagtatcaataaacttctaaattctaaatactcctcaaataaaagaggcagttttacttcttggacatccttttagaagttttagccacttttgtggagctgtgatgacatgacatgttacactcatgcccgaggcaccaaagccctattgttcatttgcatagccgagcaatacatataaacctacaacaactggtcaccaagcaaattaagaaataattttaaagtacaattgaacaactgctacagtaccacattgataattttttttatagtgtgtgaatttatgatgaaaaacttaatatttcaatacatatcaagaacagattcttatttatttatttatacaaatttcatcttataactcaattgtaaagatttttgtactgtatatatttgtgtatatcctgggtaatttatttgactaattaaggtacgatcaaatttacatgcctaaactaaatcaaacgtctctataataataaatctgataacatttgatgataacgacttctctatcaaaaagaaaacgacaaaacttctcattaatttcaagagtataaattctccatcttatcttcactgctcgcagtgcacacatgagctggtctcaagaaccatatccttctatttatatatacatattatataaacatatcccaaagtcaaaaaagataaaagaaaaatatatgtatgacaacattagtaaagcgaatctggtgctcttattccttttaatccaacaagagattattgtgcatcatcaacaagcatggaatatgtgtatagatatgtatatttatatactgataagaaaccacttcaccgacaaactaatatatatagaaaatatatattcatatcatcaatatatattgatacttaactgttcaaaaaaactgatttgcatattattaattaataataatgataatcatttttttcttcatatattactaataaaataaagaataattagcttttttagtccctgtacttatgacactatactatgatgccccttaatttataagtgtagttaaaaataccccctaa

SEQ ID NO: 18147 - DNA, 3806 bp, Cannabis sativa
aaaaaaaaaaaaaaattatatcgaaatgaaaatttgattttttttttttatttaaatcttcttttcttacattttttttttcttttcttatcgaaatccaacttctaaacattaccaaaaaaagcaagtaaaaaaatgaacaaagcataaaataaaaacaaataatagctgaaccaaaaatgaactttttgttactaaatttgctgaagcattgtaaaaacaaagtgattattattgaaacatatatttccctttattctgcctagaatggggattgagtatagcagctttaccccttttcttaatgtgtacataaaaaattatgagtaaccaaaagaattgaagctgaaaataccagacaaatttaaccaaccaaagctctatgttggcctgaaacataatcatgaatcccgccctctacgatctacaccggttctaacactacaaaaaagctataatctacacctgaaatgtacaccagcgcttggttaatgtgatcgggaagaatcccatgaaaacaaacaatgtgttgcctgcctcaacacataagctgccacaatctgtgcttctctccattctctggaaaattcgataaacattaggtgcttcgtaaagcaggaagctggaaacaatgagataaaaggatcggtcggtggtcatttgcctgtctgcattgtggactaggcaacaagttggaaattttcaaaggcaggaggagatagaggtgggattgccaaggggtggtgagtagaattttcggtgtattccaagacccttctcgcgattgattcaacatttactttgccaatctttcttgaagtgagcgaatcagtggaagttgcagttcgagtgagattgctactttctgctgatgataagaacttatcttttgaaagactggcttgttcagctgattcaattacagacgcgaaaacaccagactcccttaaaccttgaatgatcacctgtaaaagaattacatgaatgagctttaggatacatgtttgcttagatgaaatgagaaaaggatttgtaaacaagtttatttaactaaccataggtgcataaatcctagtcaagattcctttccttgtaagtttaatgtttagttccttatcggtccatacaatgcgttctcggtacctagaaggttaaaagttagaaacaaacaataacctcgtcgatattgaatattttcatccaattagattagcatgtgtaatattggatttcaaaaaaaaggtacagtttacaagatgtttaccagcgaagcatttcgtcatctgttgcagtagaagcaattataaatgcctgcagagaaatataaacacatgtaagagagattaaaacccagctggagtttctacatcaaaccaaaatcgaaaagcgattgtgaaatggattatattcaagacaaagctatcaaggatgacaaacatatccagcttgacaatattgtagatgacaaatagatgtgggttttaagatgtaataccagtcctaaatggatgaaaaataaggtacactaagcggggaaatcatgtaaacttgataataaaggccacaccacaacctcaagaagaaaacttgttgaaaataagagattaagcagaactcacagatctgtcaaattccaacatgaagcatcttttgacatcatcctttgtaggcttgcagccacatcgatcacgtctagaagtcaaatcagagaatttggtatacgtatagtgcaaaatagcagcctcttccaatttgatttcactattgaaagttaagacagattaattcatgtattagaaacttcaactcagcaaatcagccttgagatggtagctgtatctcatatttagcatgggcattgtctattaggggctgtacaataatgatgagcctaaaattgaaaagactgaaaaatatgagagagatgaaattatcatactggggtgtcttcatatagttgtgccatctgtgtgcaccgttggggcggagatgatcttgaattcgagcagctgacttcccatttccataggtcaaaaagtagtttggattaccgcgagttgcttctttataatttccaaaatatacatctttcggaagatggtcatagttcttcttgaacattgagacctattgcaaaacagataaagcagaattgattaatcataaatttagggtaaatagaacatagtcctttgactatttaagttttgatgaattggttgctgataattttagcaaatatcattaactgaatatttaagtttgagaatttggtcatgacatttcaattgtatcatatttggtcccttcatgacctatgatgatttttaaattgaattaatagagtagactaagaagatttcaaattaagtagatgaaagtaaagagaataagaagactttaaatttgtttaagcattttaaaatgttctttctcttgttttctaacacaagtccatcagaaaccaagatattcacaatacatttttcacaaaatacacggaaagtgtaaattaaaaacattatacctcactgaaaggttccttgatatcatcatgctccacactactctcctacaataaacaatacccccatcacaattttagctaattcgaacataaattatcgataacaaagataaaatgcaaagagaccattggagggtttgggcacttacataatttggaaaaataaccatatcaacatttccaggcacatcagacagtagttgtctcaatgagtactcccgagttccagctgggtgtatcagctcatcagtatccagatggaatatccaatccattccagcttcctaaaagtgtaaacaagaatattacattttctttttaaaaaaattattgaaagaatacataaaatgttgaagcccatacccttgccatgacaatagccatctccatgtttagtgattgcttcacaaacaactcataattacatggtttatagaagaagcttgccagccaagtctcattccatatccggctaataacacaaagatagattcagataacaaatacaataaataaatcatcaaataatccataaaattaaaaggggatggaacctaccttttcgcttgctgctcctctaattcccttgttctgtatataactttcacaccctgatattagtccatgcaaagaaatggatgatccgatttcaactaattaaaaaagacttcgtcttataaaatgaaaactaaaagctattaacattctagaaaattggatacgtagactcaccggaatgctttctaacactttagttactttaggagaggcagccttcccttccacaaagagtaaaaaattcgaaactccaagtactttatgataaaaaatccagggcaatatctgctgtaaaccagcggatgtacttgttgtaatacatatctgaaatacgaaaaaacatcgaaaaaagatcattaactattttcaacgataacactatgattcaatttcaaaacataaaaaataagcactcaaaaccaatataccagctaaaacttcataatgctttacttgaaacaaagaggcatagaagttcaaccttactctcataataagattacttaagtcttgattggttctaccatttctatttatccacaacaaacatcttctactattgtctccataatagcattaacttctaaacagttcttcatccatatattaagatcataccatggctcatagatttgaccattctatcaagttcaaagaacaaaaaggtgtggcatatcacaccaataaatccaaactctaatttaacaagtcatagtacaaa

SEQ ID NO: 18148 - DNA, 1941 bp, Cannabis sativa
aatgcgctgacacttgtcgcatctcttaggaaaattgattgtgtcaaccgggtcttctaagtgagtggggagctgtcttggagatgtgaattgcgcgtagaactctgaggcaaagacatcccacgaattaaattttcatggtgctaacttgaagtaccattccagggcggcctctgccaaggtaccaaagaaaattttacatcgtacatcatccttcactatctgcaggtcaatttgtatctcaaagtatttaatatgcaaaaatggatattcttttctcgtatacatcttccaagaaggcattttcaattttgtcagaagatttagggaattgatctgtatagaaaatggtgatcctcttgtttgatcaagctccaagtcaatgagttttgggctcgccagggcttgaatgaggcttttaagttgatccaattgggcttgtgcccctggattaacttgacttgcttgttgatcggcccctgtcacctgttgaccgagcatcaaaaggtacaaaggtgtgtctttgttttgtggaatgtatttctccacattactcagttgattgttaggcagagggaaaaaatgttcgtctcgattttctcacttacgattcaaatcctctcgaagataagctctgggccctatcttttggaagacagagtcacccagagctcttctacttagttggctcgtggaccgaggtggcctatggagattatcatcgtttggaggatttttctaattttttttgtgggtacgatgattatcacgacgacaattattgtgctgtccactattagctccaacattagttttgctcgagtacggttgcccataatgagaatttgtacgaccttaaggaggttgttggcctgtatgttgaggtagcctatagatttggacttgcccatcttggttgtacactgccacacgtcctcaagatctcttagctagtttgggaggtccatcatccatcctcccttcaggttagggtcaaaagttgtgtcggtcttctcttccaaggtgatgaccgagaaaaacttagtcatccactaggtttttaacagtttgatctcgagacctagagttttcaattttttaatattttgaatataaactagtaacatcaaagcctcagttatttttatctcttttgtgcaagttggatgttatgttgtgtcggggtgtttgcacataatttgttgggcgctcctctaagccatattgttgtcctctagaggggatgtgaggctcttttccctagttaggatctcttctgagcggtgggttttctagtactcgtccccagtttgttggtggaatcttctaattaggtcggtatcttcccttgatatgtgattgatttcttcctactgggcgtgcatggactcagctcgtttatccatccacacttggaatttacgcctctattttttgaacaaatggttcaccatagcgcgtgtttcctcttgattatggtgaagggtattagtgtgagtctgggctttccctaccacttctcttagggtctctagattagagttttctcccaaattgactcgaggttatcccactgacactacaacaaatatgctaaatagcggcagagttattagcggcggacaaaatcgtcgctaatattggtggtattagcgacaaacattgtccattgctgattgggcagttttttttaaaaaaaaaaaatactattagcggcgggcaatctgccgctcatgcccgtcgctaatactattagcggtgaggtccgccactaatatcccgccgttaataaatgggcgggatttttcctgcccattcagtacgaatattattagcggcggggtattagcggcggaccccatcgttaataataattaaaaaataaaaaattattaattactattagcggcggactatccgccgctaatacccctatatata

SEQ ID NO: 18149 - DNA, 5206 bp, Cannabis sativa
accacaattacacagtatctattgtttgtgtccttttattaatttagtcttatattttattggaggtgctactagaacaggcgaaataactttaaattctagaattatgtaacgctgtgtgaagcttaatggttaagatgagaaactgatttgagtctaataaaaccagtttggcgtgaaagtagctttatagaagttgatgaaaattaatacacaaggatttttcccattgcgggtttttgtggtaagagagagtagacctctctagttttaaagtgctgatctttctgttttatcctatcaaatttccttctaaaccaatagctcttgtccatgttattctttgcgcttgcatgaaaatatagtatgtatgcacgcaaggtttgttttgattgattatgctagatagttttctgttgttattactctgaaacaaattgatgatgatttagaatttaagtagtgtgtgctaaacattgtaacttcgtattgtttatcatcatttaaaattattaatgaataaccattaaagaataaaattagttacaaatttcataagtatagttcaatttttgttggagttgattcatctgcttaacaaaatgttaaagataccaatgctttctatgatcacattattaacacccacacccaccacccacccacaaaaagcatctactctttacattagcctaactattattatctatgtgctgtaggtgattggattgaataacgttccaatttctggggatgaatttgaggttgttgaatccctagatattgcaagagaaagggcagagtcttctgctgtgtcattgcgggaccaacgtatatccgctaaggccggggatgggaaagtaaccctttcttccttagcttctgctgtggctgcaggaaaggtgtctgggatagatttgcaccagctgaacattgtcatgaaggttgatgttcaggtatgtgtatcctgttattttatttatatggaaacctgccaagttagctccttgatcttgggagctttgactgtaagttatacattatcgtctacaactttatttcaatactgtctcatcaaggacataatcattcagatactttctctgaaagaaagcattgcttttaatatttaaagagcatgaataagtttagaactctctaaagttcttcaaaatttccccattcttttcaactggaggttttaactttaagtttatggcaccaaaaaagaaaaaacaatactctgactttaccgtgaaatataatcgatggagatacttccaccatcaaagatatattatatttatgacatttggtgaatgctactaaattttaaatgttgaattattatggctttcttaacttcttggatactaaactggtcttatcacagaaaccattaaatatttagaactccattattgtaatgaaattaaggttagttttaaaatttaaatttgagtgcattttgttgatttatctcgcctaaatatgatctatactattgtagctgtacttctggaaacaaattgattttatgcgaaagtatagccttttttcttttatggaaggctttagttatgaataatcataagtcaaagttcttgtgagagtaacattaggtgcctgttgtacttgtactagaaactccacatgggtgtaatacataattacagtttattttgttgaaaatttattatttctcgagctgcaattaaagtcttctctttgattatgaccagggatcaattgaggctgtaaaacaagccctgcaagctctaccgcaagataatgtcaccttgaagtttctcttagaagcaacgggaaatgtaagtaacagtgatgttgatcttgcagttgccagtgacgccattatcttgggctttaatgtcaaagtaccagcttccgtgaaaagtttggcagagaacaaaggtgttgaaattcgggtatatcgagttatatatgaacttattgatgatatgcgcaaagcaatggaaggactcttggatcctgttgaggttagttgagttatcaaatttgttatattttttatttaattttcaagtggagactgataagatgacaggttaatctaatgtatgctacttgacagcaaattatttcccttataatgcaatcaatggtcctgggatttaacatccttattcatgtaaatcatatatgtcacacataccgtgttcttatatatgcttggatgggtatacataataataatatatcgtgaatcagcatggattttcatttttctaagttcaagagtcacatggtgataacataggttattgctagatctcatgactccaagtccttttattttataaactcatactgcttcaccttgattgctcttaactttctataatatgcacaagtctcttatcactggttatctgtttataggaacaagtaccaattggctcagctgaagtccgagcagtattcagcagtggcagtggtcgtgtagctggatgcatgataaatgatggtaaagttgttacaggctgtggcatccgtgtcctccgaaggagcaaggtagtccatgagggcgttcttgattcgttgaggcgtgttaaggagattgtgaaagaggtatgtcatattatttataaatctaacctcctagtttcttatgcatttacttgtctagcggtattgcatcaattgaagttgtacactcatttctatagagttttttctttcaaattccaatacttggtatctctttacttcttgctctcttctgggcatgtaccaaagtttttgcaatggtttctaattttctgttgggggataggtaaatgccggtcttgagtgtggaattggtatggaggactttgatgattgggaggagggagacactattgaagccttcaacaccgttgaaaagaggcgtacccttgaagaggcgtccgcatcaatatcagaagcattggaaggaatgaaatattagaaagcatgcagttctaactttttggctgctgtgattttcttgaagaatatcaatttttgattatcattgacagacagacgtggcagcgctctccaacacgcaatcccctaattatgaaatcccttctctcccacttcccacctcggagcacaccgttctttgcagctatgtattggaaagcttccatcgtgcacacttttttggagtaaagggtgccatggctgtcatggcatgaaattacttttcttgtaatttatatactgtatataattatgaattttgtaatttcagtttcttttgtaaaaggaagaacaacattcatttagctattgtttcaatgtgaggatcttttttgccttgaagcaagccaaagaaaatgtatctatgccataaaacttgatatggaattaccaaaaaaggaaaaaggtggattcctcatcccacttttgtcttgggctactggtcttgttcttatttcttatttctttattttttaaatctaaattaaatagtgcacttaatggtagaagaacttaattcacaagcacaacccccttgttcatcatgttggtcaaatatcagcaagaagagcaaattaaagcaccaaggagatagtcaaagatcactacatttgtcaagtacattgatacaacagaaaaagaggactcacatcacaaacattaactgctgtttcaattcagtaagggagctggaagtaaaagttgatataataagtgctaagttagctggatagagaagaagataacagaagtgtcactatcactggaccaccaccacgagattcttcagaaaggaaaaacacatgcaacccattgatgtcaaactatgaacaaaaatggctgatgatgttgctatgactccattgctatagttggtatgtttttccttttatttgagatattggtttttatctgcaagaataaagtgtttgtattgaatgggcgcccacttgttaacagttttctatgttttgtgtttatcaagattcaagaggcattagttagcgagtttccatgtctatgtttattaaagttaacagatttattggcaagttggagagtaaaggggacagaacagatagaatgattgccatttgcactgaacgcagaaacgccagttttcatgccatggacatggtatggtgttcctattatgatatggcccatatggggtcatgaatgttttggttatgcaactaaaacaatgtcactattcttaagaccatttatatatatgggtgtttgtgtttgtgtgcgtgagagtgggagtagtagtgatatgtgtggtaagatctgcaataggtttctagcagtagcaccgtcctgaatctattttatataatataagagtactggtgtgaagatgtggtgtaatattatatatataaatgtatatacatatttatattaaatgttcatttgttacaataggacatgtaacatgatgcctgattattaaagaaaggctaccttcacatgggttggtggcagatgcggagaaattaaagtttcattttgtttttttccttaacacacaccaaaaaaagaagatcttttacatttatataaccatagaaattaagatcttgaatacccttttttgttatatatctctttctacttgtgttacagtcaacttgtccagtttaactgagaggtgagaaagagaataaaggagtttgactgtttacaagtagtttattttatatattcataatggaaaatccataaaatacagggagattttcctcataaaaaaatatgaatgaattgttggtcaattttcctaaagggatttagcatttgatattttggttaaaaatacaaaagagttaggtgatatcttaaattttttttcattatatttttagtttgtgacatttttatattttgtttagaaatagattactataaatataaatttaaagtcccacatgatttaaatatacttaagatgttatctatgtagattataaatgtatttttaaaaatttattactttaagatcaaacaattaaacaatacaccgtccaacaatatttatagttgcagctatggcaagcaactataaatcttgataatacataaatacaaaagaattattcattatataattttagttagttaaattaaaaatatgacacttaaaaaacgtacatgtaaaataaatatacatatcaattcgcttccaaaccagatgcaagcaagcccgtag

SEQ ID NO: 18150 - DNA, 3606 bp, Cannabis sativa
ttgtatcatggtgcagggatggtgtcagtgagggtcagttctatcaagttttactttatgaacttgatgccattcgcagggtaaatatacagtagtgtagaattgtctagtttctttagttttatttttaatttgaactaatttaccaaaatatttattttatatagacggttttgcttttgtcaatgatttcaggcttgcgcttcactagaaccaaactaccagcctcctgtgacttttgttgttgttcagaagcgtcatcatactaggctgtttgccaacaatcatcatgaccggaacgctgttgacaaaagtggaaatatattgccaggtacaccatatttttacaatgctaaatgtataatgtatttgtatgtacatatggttaattatttacatgttagtcacacccttatattctaatgaacaggtactgttgtggactccaaaatctgtcatccaacggagtttgatttctatctctgcagtcatgctggaatacaggcatgtcatctttttgcaattctgaattctcttttactgttcttgtttatgtttagtgtctttatattagtggtatacatgtttgttaagcatattggacatttccgaaacagggtactagccggcctgcacattatcatgttctgtgggatgaaaacgagttcactgctgatgggttgcaatctttaaccaataatctttgctacacgtaagttttatgccattactttaatttttgaatcattcattgaagtggcttaacttgtatttattttcaacctttgcaggtatgcaagatgcacccgatctgtttcaataggtgctctatctctcctcctgacatttcaagcttactgtagagttttattacttgaacctataagatcgaatgcttttattgattggtttgttttctttgttttgcagttcctcctgcgtactatgcccatcttgctgctttccgagctcggttctacatggagccagagacttcggacagtggatcaatgaccagtggcgctgctgctggccgtggaggaatgggtccaggtgcaggtggacgtagcacaagagcccccggcgtaaatgctgcagtgagacccttgcctgccctgaaggacaatgtcaagaaagtgatgttctactgttgatgcttctccaaattttatctttgttctatcccaacctacaattagtttcttaccttagtaatgtgagagagatctggtatttttcttttctaaaaaggattgccacttttactgcaacttgtcttgtacggatgttaaactgagtttagctattctacgacactgtttaacgtttggtcaaaactagaaaagttggattcaatgtttggtggcggtccaccaaaaggtcgtacctgtgttgttcaggtggaggcccccctttgaaatcttgttgcatgagttttcttgtttggacacgtgttatacttttttgcagtttcgccagttttgagggttttttgtttttttgtcttaaaaagaatcttgcttgttgaaagcagggtgagtcggttcgaggttaaaccaaaaaagaagattctgttttctttatcatcgggggattaagtgttttttttttttgcttattggttggttacatgtgagatttcaaaatgaaatgtagcatgtggcttgtgaagttggatgcaccttaggtatcaattagtacaagtctttcaaagatatcagtttttagtgaactaatttaaccctgattttcgttttgtcagatctaagatttttttagcgggacattatttccataagttgaacaaatgtacaagtaccttaactgaatattttttattttttttattttatttagtgaacgctaattttaaactgaagggtttatattattttgaaaattatagccatttgctttagagtctaaaaattcgattattttggttaaaataagtaaaatttgggagccagagcagatgttgcattttgcagattttgacagttgctatacttgcgcaatgcactgaaccgtattattaaccctgggtaattttggtattacactaatttttgtgccgttttggttctgaaacacttacacttggaatgtgggcaccatttatcgatccaataaaaatttcttgagaaagagggtctgaactttgtactctactctgtaatgtttgccctctaaacctcgatttcaaaaaccaatatgttttctctataactttggttgtgttgaggtgactactttccttactttatatttaacaatttgccaatgtgtccttttctttttgtttgtattttatttttttatttttctttttctaagtatatttttaataacaaagactgtttaggatatttggtgtgaaactttcttaccatttacaaaaagtatatgtgatagttcctttcgttattgttttgttttgggatgtttattttttttttacaaattgcctaacacaaataatcatccaaactaaactgaataaatgaatgaaaaatgcaactcgaataatccaacaaaaatccaaactgcctaattatgatgttgggtgggttaaaatttattccaacatgcttgttaactccataatttagcatggctaaatcctgagattagtcttagtgaagtcttctattgacaaggtcctgtcaaatggtaagatggcatgatctctctatcggataaggagatcaagtctcgacaggccatcaggcattgatacatctcgccaggccaaaggccatgacacatctcactcggcccaaggccttgacacatctcactaggccataatgccttgagacatctcgccaggccaaaaggtgcatatcgccatgtcatcaggccttgagacatctcactaggccattaagacatgagacatctcgctaggccatcaggccttgagatatcttgccaggtcatcaggctaaaggccatgactcacctcactcgtgcacatcttcaacatcttgtatgtgcaagtgcatctcgcctgaggctcgagatcaccatatgtcctactcatttagctaagccctagtaaatatttccaagtgttggaaaagataccatttaaaatgagatcaaaatgacaaggaatgcacacaactaaggactaatcagagtatggccacaccattagcatgacttgtgacgaggtagtgacaatgcaaggaggtatcacaagtacaagtagtgaatacaccacctctaagttataaatacatgataggatcaattttattttgacatttatattacaaattaaacaaaagaatgtgtagtacaacctggaaacatgttactaatcgatttacattaaacaaagattgaatagaaatacttacaatcacgcaacggaattaatgacttctcccgttaaatgatctaacccttgtcttttatgtcgcagagtattatcaatcattgaactcgattctccatagaactcatatcaaagcaccaatttcgacataacattcctcagtgatctagttgttgttggggttttatgctctaaataaaacccatttcaatataatcttatttactaattaatagaagatcagaaattattttatattg

SEQ ID NO: 18151 - DNA, 3804 bp, Cannabis sativa
tttatacttataattcaaaaaaacaaaggtcacccttctcttggggatgtgacgtctttcctttgaggctctccccccctattaatttgattccctaccaggctgccaatttcattttcttaacctctctatctatctctgttttcttctctctctcttttgctatctctttctctccacaaattcaaatcaaaatcccacatcgcctaggaaagaaagggaaactaattaaacttaaatcctatctttttctctcttctttagtttttctctcctctctcattgctgacaattctcatttaagtctctctgtacaaagttttcgcccacactttatttctatttttttaaaataaaaataagaaaaaaaaacaaaagtaaagtgccagcatttcaggtgggttggtagtccacatggggaggcactcttgttgttacaagcagaaactgagaaaagggttgtggtcaccagaagaagatgagaaacttcttaattatataaccaagcatggacatggctgctggagctctgtccctaagctagctggtattaattctactattactactatcaatgctaataatttctgtatgtttgcatcaaaattagtcacatatttattcatcattaattttttatgacaggtcttcagagatgtggaaaaagttgcaggctaaggtggataaattatttgaggcctgatttgaaaagaggcccattttcacaacaagaggagaatttgataattgaacttcatgcagttcttggcaacaggtaattacttacttgtttcttgagaaaaaagaagaatgacattaattttgagttgaaattcatttctgggtactcttatgtaaataattttgttcaaatttttcagatggtcacaaattgcagctcagttaccaggaagaacagataatgagattaaaaacttatggaattcttgcattaagaagaaactgaggcaaaaagggattgacccaaatactcataagccattatctgaggtagaaaatgacattggtaataaattggagaacaagggtaacaaagctgcaaccaataacaacaacaatgagaatattaataattctactgttagagcttcttcattaggaaacttatccaatgatcatcatcatcatcatcatcatcatctgaatctagctgaccagtcacaaccatcaatggcggccatcaatcgttacccactattggaagtctcatcctcaactccgccgacacaagaattcttcatagaaaaatcaacagataccagatcatcaccatcaatatcatcatcatcaccttgtgatttttctacctacttctctttccactcaaacaattacaatacgacgtcgtccgctgctgcagctgctgctgctgtttctcatcatcaagatcaaaacaacaacaacaacatggccagtttctgcttcaacattaatcaaaattcaactagacctccacaacaccatcatcataatcagatgattagtaatctcatccagccactacaacaacaagtatcaccttcatcaacaacaacagcatcatcatcatcaccaccctccaatattccacgtgtcaagccctccataagtctccccttattatctgatcaccaaaacaacagtaatagcactactactactacaacaactactggagcagtacaaaattgggaaactagtactttcagcaacaacggaagtagtagtagtagctgcaatatcgaattacaaggtaataataataacaacaacaacaacttctttgatcacaacactaattccaccgccgcggccgccgcggccgccgctcctaataacttctcgtggggattagtcaatgaaagtactgttggtagcataaaatctgatgacccagaagacataaaatggtctgaatatctccatagcccttttcttcttggtggaggaattagtaatactaataatcaaaattcttcttcttcttcacatcttcaacccattttgtacagtaacattgtgaaaccagaatcacactttagtaatactactactgctacaggatcaaaccccacgtggcatcatcagaacgatcatcatcagctacaagcggcttcatcagaaataatgtacactaataaagatctacagagacttgctgtagcttttggacagacccttagttcaaaaagaaaaaaaaaattcatttttttttttttttgtactgttaattaatttaacagtgaagagagagaacaaaaaaagaagaagaagaaggaaagggacgagaatattacggaagttcatatatgatggtgatgatcatcagtttgagaagaagactgaagaagcttatggctttggaaaatgacagtacaaactcttctctggggagtttacttaattacaggtgtgtgtgccatagataatttaatgcttttttttttttgaatttttttgtaaatttgtttattatcatacccaactttctcagcaggcttttgttaattaccgaattatatatcttaaatttgtggtttttatttgagtttttttttcaatgttttctgttaatattattcatgatattcttttaattactgaataagagtaattaaggcctgcctaatgttatcatgtgttgtcaatttaagcttattattataatattatagttctttgtcattgtttatagttttctggatatttgttggtgacccaatattgtaacttcacaccgtgtcaaaattttcaaaaaggatttttatgatatgaagatttttattaagttaaaaaacagtaagaagattaattacttttgaaggaaacatagagttattaaataatatatattatatatagttagctttatgtggttcacctttttctctaatcgaaaatccatggtgatggtgactttctctttaaacagatatccaaacactttggtatcctgggatttttgttcctctaatttaatgatcaatatttatatttttatatatatgggaagctacaactcttttgggactaaatccttttcacacacacatacacattgaaaactcgtgtactcaaatttccatgataatatatacgttctgatcatcatccatctttttaatgcaaaaaaactataatttcaaaaatgggaccatatttttttaaaatgggtgtctatcaatgtctcctttccgattgagatgtttttcactttttcacagtagtctttaagtcattttccttaatccttattcatcatctaaatttaactacacataatggttttacactttttttagttatatgccatcatatttcgtcccagaaagctaagtatatattactatactgccctgtaacagagaaattacaagtagtactatatatatatatataactatagaaaaaatatgtactataccctcaaatttttttggaagagtttttttttttttttattttgtataaagttttctggtttaatttgtttttataattatataccctgtatttatataagatataacttataaatttttaaaagatattaaataatttactttcaataattatttatcacgtatattgaaaaaaaaaatattactcttacaataaaatatttaaatattattattattatttaaaagttgtattttattaatcaataaaatcaactggtacatgagaatttaaaaatcccagacaatagcctatctaaatttgggacttgtaataaaagtaactagtgcatcagttacatttgcactaagcaaaataatttaacaagtattatcaccaata

SEQ ID NO: 18152 - DNA, 10658 bp, Cannabis sativa
aaacatgcaagcagaatacataaaataaaggaaacttgtaataggaagcggggtagatgaatgttgcgatgaccagcacgataggcgaataaccagtcaaggattgtgtcaatgttttcctgaatgtctaagggtttcggtgactgggggtcaattagaatcaggtttaatggaggtgtgttagggtactctcgtgctctaatgtgaagaaggtgttggattgcaatgtcaaaaagatcgaacatccattgagagcaacaatggagttttctggttttctctttggtttctctcggaaagcctgaatttgaaatggcgtgaaaataaaagtgatgaaagggttttcccttcttatatttatattatgggctggctgtttacgtgcttttaaatcaagggcccaaatcttatttaaagaaacacaatggcaatccgacagatggagaagtagaaaggttgcattaaatgtactctaaaatattcggggcattttctcatcattaatattccccttgatacctgcactttcatcaaatagtcatcgtagtgacatcccacgaattacatgctttccaaagtcgcatgaagttctcaagtcaactgaatggcgacttgtgtgcaatgcaagatgtaatctgcaaaatgttttcacctttttgtatcccactatatggaagatgaacatatcatttttccaaatatatccagtactcagattgatccagatggaagactgcaagcttctgctaatcttgagtctgaaagcttaaagggtaaatattattcgtgtttttgaaagaaagacacgtggcgtaaagaggtaatcaccatactaatttgtatatatggagcataaaatgctatatttcaaaaagcttcctcttttaagtgtatatacgaaaatgaatttgggtcctaatttgaagcccaactaccccaacccagcccatcaattcaaaccaaaacccataagatgtcgtctcccagaaccacggccaactctcagtgtctacaattttggagtaaactgtaatggaggtagaggagaggacgaaaccaatcgccatttttatggcgttcggtaccaaaggagatgtttatcctattgctgtaagttcctttgcttcctcctcatctagaatgtgaaaactctgtataaaagagaaaaaatggttgtcttgtatataattgctgggttcctctaacagaatttggaattttatttcattatatataatgaaattgtacatatatatgtatgtgtgtcagtgtgtgtgttatatattaaacaagtcgaattatctttgacttaatctgcagtgttcatacacttattattatcaatgtcaagatattggaaatcattattaggagctgaattttagacaatggccaaaaagaaagtagaaattttcttgagtttatctcaatgaaaatgatctcccaaaatatcttcttaaacttttgttgatatattaagaaggccatgtctaaatattagcagtggattgttgtgggaatggaaatcatgtaacttttttcttttctatttcgttatgtgtttacttatccatttttgatacaaattttgaagaatgttgtacataaccaattatatggagaagaaatgagttttggtttcttccaccctcctcctcctcttaaatctctttcccttcaagattgttccatttcggtttagtaaacatgcccaagaagctaaagttactgagtagaaaaagatcaacagaaaaaaaaggtttttgaaaatagtcattgtgaaatttagacctcactacatattattttctagttggactttgaaaggattgatatctaattcttgtttcctaatattattttatttttaaaattctgtttgcaggccattgcggcaggttttgcttttgatcaaagacagtaccatgtgattcttataacacattcagcccatgaggtttgcccttttgaatagatgcctttggagtagtgttgattgaccctgttattcacaatttgcatgtagaggataattatgacaaaagggaagaactgtttgtagaaataatatagataaaacaagaagaaaaatacaccacctctataagcattttgtcttattggttaaaaaagggtattcttgtttttcaatcatcagtcaagcatcccactgactagtgtttgtaagatcgaatttttgcgtagctagggggttcaacaaagtaattttatatctgattttttattcctaggtattgctacttacttattgttgtgttccgcatagctagtgaaaagtaatatttggaatttataaggagttttttttctcctcatttttagaaacgttcaggaaaaccatgaagttgatgtaggtgcacacagccaatctcaaagttatgcgagcaacgatgttaggtcctgaaataagatgaaagtagattcctctttgtttggagagggtgtttggcacttatagatggggatgtcatgtcgcatacttgaatttaatgcagttttggggtaaattgtgaggccaatggccaacacatgtaaaataaacagttagcaacactagaagcaggtcttgtcaatttatattaaatttcctaggtattttaacattctatctatatgaaaagaatcatttatttgcaacacaaggatcggtatacatatagcaagatagatgttgatgcttagaaactagttcctgttgaacacttaattaaagctatactactatgttgtaggcttgtacagatttaacttgggtgacccaatttacttttgttttataagttgatcatgtatggtgaacaaaaattaacctcttatgatattctgctttccatgagtttcttataaaaaaaagttgagcttttatcttaaatgcttttgaaacccattcattatcattatattttattttatttattttatttagaaccttttgggttgttgaaaatttatttttaaatattgcaatgtgttgcctgcgatgcagtctttacgatcccacttggctgaaagaaatgttgcttattatccaatttcctcacccccttttatttctaccgatcacattcaaaacactacaggtttggacagctttgtttctttataccatatgctagctttgaaatctcttagtagttcttgctgttgctattgtgataggatctctttgttttataatgcagaatcgtcaatttcacagcaaaaagagatgcttattagagaccatagaagagaatgctattctattgttgaaaagacatttggacagcgcccaaccatggaggatgattgtattgtgataaactttttcgcactggtatctatctgaaaaatcaaactccttattttccttttcaattggttgaatgccttcatgaaatatattttaggtttggaattacattccagtaagacaattagaatcatatgatgcagtttctttagatgggtttccactaattatgaattataagaagggagtagattggctgctagtaagtagatgtctgtgcactgtatgactacaaaacatttgtggctttagagttgtgggcctgaaccttgtaactacttttaagaacctgagttgattggcgttgctctagaggtgtcatacaatattcatgattatgtgatccttgaaaagattccttgttggtctaggaaggatggagtctcgctgaactgttccgagttcgttgcatagttgctgctccatatgttgttccatacaggtagcaatgtttttattcttacacttatgtgaacctttgttaagtgactattcttattcttattcttattagggaatttctcttccttaatcgatatttattatccatttctgatgccaatagattttgaaatgacacaaaggaagttttcacaagtgttagatgtcatcttttgcaacatgtattgatagtgtctaaataactttagatttcttatcagttcacgctgttcacattaggaaactaatttctcaagaataagaatactgatagaacctgttcaaaatctgtgtgtttctctcttaccgccttcagtttatttgtgtaaagcatgcttctgagcatgcctgaatatggtttacttgagtttgtgtatgcattaaattccaattgcttgtttcagcaagaccgattgattgaacactgatttttatttctaataggagaaccagtgttagaggtcttaacattttgtagataatatcaagccagtattagaggtcatataaaatatttttgtagataatttttataatataaataaaatgtgtatattgtatagtttctatgtgtcattcatgtgatgagcagaaaatccggaacttggttctctgccatcattacatatgactactactataatcttcacatgtaagtggtcaagaatcatagaaataataatagttttgtaatattgtcccacattggaaagagcattaaaattcctgtcaaagagtaactatatagtaggtgacaattacacttcaatactcacgcagccatgtgttgagcacaaagcgaactattctttcgccttttactaaagaataccgtgtgttcgtcactttcaatggcatacgcttatttttgaagggttttcttctaatggaagaccctaaaattttagttcaaacttaaatccctttatatttgacatatagaatacagatttttgcaagcaaaacaatagaactgagcactagaacaaataacagtagcactaagaacaaatgcacgcctttgagaggcctagactctccatgattcagggagagaaacctcattacatgcataaccctctctattcccttacctacttatattattctattttccactcaaaactctcctcaatataattagtcattacctttcttattttctcctcatcctcaccctattaatcctgggatctaacacattaatgcacgctaattacatgccccatttggcccctttcccttgcgtttactcttacttcaatctaacagaaaacacaaatcccaagacagccaacttgccattacattcttcactaattacccactaactgcctagccgtgagaacacacctatcctgttagaattggcggtttcttcctccttgcatgcttgaaccgtatcgtatgcttattatgatgagactcacaatctaaaggatctttgcatcaacactatattcacctcaatgtacttaaaccagaaatcttatgtatttacttaaaaaggaaaaagaaatcttatgtatttatttaggagaattatctttatggaactgaaagtaacataagaaaacaagacatttattgaacaaagaataacgacgtttgagttaagtattagttaatttgtttcttggatttctatgcagtgcaccatcatcatatgagcgccacttcagaaaagaacacccactgctgtataaatatctacaggaagctcccaggcacaaggtatgtcatgagttctagtggagatattcctttaaatggtttgctacttgtgatgtgactttattagttgatttaacagaacttaatgcaatgaaaagtgaattgagttttccatttatttttttaattttatttaaataaacgtgaattaaattttcgagatgcatacaacattcttgtcttagttttgtattcaaaatttcatatgtaggtttgttgggaagacattattcattggatgtggccattgtacactgaatactgggaatcttggaggcgtgatttgaatctgagttcttgcccttttacagttaattcaattcgtttcagtacattacaacaataaataaatttaacctgaaaatagtatacatttcattgtatcacaactactttttcaactatatagtattgtcagaagtcagaacattcatggttcattttgatgtccgcgtagtaaaggttgtttattttgctaaactcaggatccagtgacgggtctacctgaatggcataatagctcttcatctcccttgctgttgtaagtcctagtctttatgtaatattcaggaaaaaattggagcacaagaaaaatgtggagaaggaaaatgttatttcctgaacttctatgtttgtggagatgttaatgaaaatagaattttgtatttgcacttatcatattaggcaccctcacccttgaatttcaatgattctaattctattaatttctgtgtaaagtaggaattgcatgtcaaatttagggatgggctagtatattgaaccccaaattcttgaggcaaaaccactgaatgatactactgaaaatttggaagtattctcctaagaacaatgttgctctctatcgatttttgaacaattgttaaaattagtagtatttcaatgcaaataacatctatacattattattcttgtcaggtacggatttagcaaagaagttgttgaatgccccggtatactttactcctatattctttaatattatgtcattttgtcccagaaagatagagatcccttcttaatccacaaatatcgttcagtggcttccttgatccttgtctataatttttttagtgaaaaatagtgcatcatttgccttaaatttttcatggttgatacctttttcttttcaacacttccgatttattagttctgtttttcaatttttcttgtcacatgattacatgtaatcaacagattactggccatcagctgttcgggtttgtggcttctggtttctgcctgtggaatggcagttttcatgtaagaagtgtggagaaatttcagagctagtttctgcagggcatgtaaataaaaaagatgaactttgttcagatcatgtttatttgcaatcctttttgaagaaccgtattgctgagccacttgtgtttgttgggctgagttctgctggtaggcaagttctttaaaatttaatggaaaatacttcaacttttttacctaaacattattttagaaaaatgttgatttattatcgataatttgaatcgccctattttgttcttttggattgcataatgttcaagaaatgatcacgtatttcttgatgttagtttctgattagaactatggctcagagtattcagagatgtcagattgaattggtgtatggcttatcactcttatcactgtttagaggtcctaattaataattattgtatacagtgggcggtaagaggaaaattttaacctgaaaagtggctgtaatggttacgtagtgagcactgtggctagagaggtatacgcaattgtttaaagtaaggaagataatgtggagttcctatggaacaaaataaagactcggttgctgtgtagttatatatacaatgtaaaagagttcaaatggttattttctgatttttgtagtgaatagcagcatccaatgtcactgttttttctttgttttgtcagagttttttccactcttttgccttgtatttttttttcccttgttaatacattttctgagattttgtttgaaaaaataataatatgatgatgttatcatctttcctgtacttcaactgagttttactgtatttttgcagcatgggattcttaaaagatcctctagcatttcttcatgttcttcgaggtgttctagatatcacaagttacaggattatacttttcacagctgactacaaacctttagaagcggcaatacaagtagccaatgcagaagcatcgttggagatgaatcatgtacaattaagtgaagattgtttctcgctctataatagccgactcttctgtttttcagggtaagcatctcttatttttaaaaaattcagtcaaatatcctcttttagactttgatacaacaacaatatttgtattaataaaagatgattggatatcatacagtaaatgtaaatatccactaaactatcagatttgtatgagattttgaattctatttttgtatggtgcaaaaacacatgacaattatgactctagaaatttgaaagaaattaaagtagcaaaaactgtttgctgagtatactaatgcataaagtatatgtcttaattaaggtttaaataattattctacttgaaaaagacaaagtcgttcaagaataagaacaaaataaaatctttatcagcatagtttttagttatataaatatatttcaatatccattgttatgtgctggccaccattaacttggtgatgggttttgaattcattttctctaaggaaattaacatgtcttcacatctgtcaatcagtacgataccatataactggctctttactcactgtgcggccgctgttcatcacgggggaaggtgagagaactactctgtttttcattttgtgaataagatatctggatgttcactaacatatagtttcatatttggaatattggaaatagtggaagtactgcagctgcgcttcaggctggaattccacaggcgagttgtgttactcgttttgtcctaaaaccaaatcctatatttagtgattttactttgcttttagactaattgggaatataagaagaaaagataggtagcaactcaaggggctgtttaaatactgaaaataagtacacattcgtattgctattaattaagggtggaggtctcattcaaacagttgggacctgttgacattagtatctattagaattttcttttcatgatatcaaagttcttttttatgaagtcactgccatgcttttcctgtgcttgagtgcgagtctttgcgaaaagatctgttctgtgcatgtgttgaaattcatggatacaagtgattcacttaataactacttgaaaatcttatacatagcatttttggacatttttccattttagtttatttctattactgtattaattttggttcaatgaaattatatttctcaattatttaatgttggagggcaggtattatgtccatttatgcacgatcaattctattgggctgagagaatgtattggcttggagttgcaccagaaccattgaaaaggaaccacttattccctgaaactaatgatgaggcaagcgtccaagcagctgcaaatgtgctatcaagggccataaatgatgcattatctcctgatgtcagagcacgcgccacagaaatttctcgaaaaatttctcttgaggtaattatttcttgatagtgtacattgtattatttgattgcatttttaagggccaaatatatcttgatattaattattgcatccacaatctgcatattgtcatgaattccatgcttacattatctgcattgtttattgcatcactatttatttcacttatgaatgatgacaagataaacaactgagagagaatactaggacacagcaaaaataaaataaaatctgacacttttttggttaagttcaaaatcaaacttttgttggttaagatttcaaatctcaaggtagtaagtaaaaactaaagctattgatcactagcacctcaattagtgggctgcattttcaattcattttggaagtggagatcactgtatacacctcgatgatcatttgttttgtacacattttatggtacatggtgtacttttattaattggaatgaaaatcacatgttattaagtgtgcacatttattgaacttgattggttattgttagatttcagtaactcatatcatatcccttccaattatagtggattcacagaatttgtatgcaatccaaataagattggatatccattccttttttggattggattgaatctgtcactagatacctgtatttatctcttttgcaacatcattctctaatcgattgcaaatttatataattatatattttgtgtagacttaaacttcaatactgtcttcatatcattattcaaagaccatttgatactggttgatgctccattcctcgaatttgtaaatataaaaaagaaatgtttcatgaataatatgtagagcttatgatcaataatcctgcaaatcttattcagacaattttttcaggatggggtcttggaggctgtcaagtgcataaagaacgagctacagagcccataaagattgaactaacggttttataacaatcttgttctaatattgttggaaatgtattataattttggatatttgcagtgatctttctcataactctaatgaaaatttcttctatgtacaatgtacgtgtggataaattataattgcaagtatgccttatgactaacttcttcaaatcaatatcatgaacattgaacagtctcttcaaattcctattttgatgtgcctttttggatattttttagtttgtatcaaatcaatctggctatagttttagatacatattcaagcttttctgagcaagtacgaatgataaattatatctgaggaaaaatttaaactaacacttattttaacagagattaagatttttctttttcattaattaacccttagttatttattcaaaattaaataaataaactcgtagttatcatactcttgtctggaacaaattctattttgtgagaactcatcattattcattacagtttatagaactaaaatttccaatttcataataaaattctaattatttaacttaatgttaggcaatgtatgcatgcagtccaattgtacttactaatcttatctttgtagaaagagtgtactt

SEQ ID NO: 18153 - DNA, 6482 bp, Cannabis sativa
  modified_base (1628)..(1631): a, c, t, g, unknown or other
  modified_base (3299)..(3300): a, c, t, g, unknown or other
tggctcttgtgcgcctcatttatgttggtggcatatcgtaccgtattgtgcggaatacttacaaaagtcgtggccttccgctatgttagaccctcccctagaagtataatggtctaccaaccaaaattttttatgtggactattactttttaagttttcaaaaacgtaaaatcttgtcctcaaatattaagaattaaaattttttgttgaaaaatagtatcatatattatgttaaaccaatctaaatttgacacataaatatagtaataactgtcccagaaaaatccaacttttcattacaagacagcctaaaatggtaaagctaataaaagaaaatttagtttcaaccaaatcatgaaattgaacatagcactactaataaaaatgatagtacgagtaaaagagtagtttgagatgtgtggtaatttcacaaaagagtgattaattattgttgttattaaaagggtttgtttaatttagttaatttgttaataataataataataagttgaatgaagtgaagagtgaagatggtccatggacacgtgcaaatgatgacaatgtctactaatgatggattcccaccgcttcttccacttggtgggttcccactcctatcatgcgacccaacccaacttcgttccctctttttctttgaccgacaaaatacccatttcaaatcaatcgttgctgacaattacgttaatcatcaccacctgctgtctcatctaaacacaaaattgaaatgtgatgacacgtgtatatctaacttcaatttctgtccaaattcatcgtcatatatacccaataaattccttacatgtgtgcacacatatacttcaaaaatcattctcacgctcatttttcaacttttgcacttattattcaaagtttcccgtacaccttattattaatttctacaatacattaattctaagaaaaaagaactacagtacatcatttattgaagctaaaatgagaatcatttggcaccaaattatttgtaacaagggaattaatctgcacgattgtaattttttttttctttttttaagtttttgatctttttattcaattattcatataatataaaattataaaaaataggactaaaatactttagaaaggagacatttttgctatagatatgtaacaaaaaatatacatatttaatctaagacaatcgtttaaataaataatttttatttaaaaatcctttcaagtcaatacatcaatcactgcgtttgaaactaatttttaatcaattttatatttttaaaatcgaaaaaataaaaatatttttcaaaaatatattttataaaactattttcacattttaattatttaattaagaatcaaaattttaaaaacaaaaaaaaaatcactcttaatattttttaaataattttttttcttaatcaatattttaaactccaaccagacccagacctaaatcccccaagaacctagtgctgaactcgacttctgacccaaacccaaattcaaccctggacctagaccagacttaaataaaattaaaaaataattataaaataaatttcatagaacacagtggttacataatgcatttttgtttttcaaaaataaaaattttactttcattttgnnnntaaaaaattaaaaaataaaaacattaccaaatatcacatttattaacaaaaacaatactaattgtgggagcaatgacgaactagagaattattttatttttatttagaaaattcacacacttacaaactctgtaagattttttcaaaaataaagttagtaagaaattatataattatttcattaggataaaatatgaaactttatgtatacactatagaatatatatattattaaaatatagactataaaatatatattaataaaatatattattataaactatatctgggatgaatttttaaaggaaattttgattttttttatgcatgttttaagggttaattgattagcaaaactaaaactataggtaattgttagaataggcacattttacctaaatcgcaaaactaaccctctcaaaatcccacacccgttctctctccttccctctattctctctgccttcgcccgaacttctagtcgcaacccaaatcctcccaaacgccaaccacacccaccatgagaacccacaaccacaaggaggagacccacgtcagtacccacaaatatcggccataaccgcacagatttctaaggtaacttttcaaatccctcttttaaaaattcatgcattagtttatttttgcatttaattattcattggtttaggatatattttatctgtgatatgtgtgagtttgattagatttgggatttttttggttcgtctgttcaaactgcaagatagagttaggcccgatggtgtcctagagggctgatataggttcgatgggggtgagtttgatagataaatcaaggttgaagataaaggtccgatataggtccgatagaatccgatataagtccgatgggtaaggtccgatggtccgatactaactctttgtgttaggtccgatggagcccgataagtgtccgagtttgtgtgttacgaggttcacttcagtctgacagtgtgttcgatggggtccgatgcttttttgcattttatgagatgtacatgtccgacagtgtgtccgatggggtccgatgcttgcccaatctgcaatagcttttttaataaatttgatttacgattttggtccgatataggttcgatagatgtctgatattggtccgatagtttgcagcaggatttctaacttgtattttcttgtgtcatttttctagaatacaagacagccacgtcttataattccagtctcagagcattacacaggctgtgtcacttggcgtggtggaaattattactatccgaagatcaaggtaaaatttgacgaattccaattatgggacaaagtgaatgaaactcctttttaacaattcttcgagaggaatccgataaatttttctagagcattgatccattagttattcatgcacaagatcaaatctaagaagccaaacgaggtgcaccttttttttttggaaagaagagatgcagattcagtcaggtcgagtttgcattagtgacggggttgaacttgttactaggacctacggaacaaaaaattaaagagaaaggaaattcagacccgttgattgtcgagtattgcaatagtgattcatccatcaactttggccaattgcaccgaagctgatgatgtgtacaagttggggatggccttgtttattatgggcgtcctcannggtaaggaggagaagactgttgttcctccatttgtgatacgaatggttgataacctggaattcttctatgagatccgtgggtaaagatctccttcaaaaagttgatggaaacttgcaacaaagattttgtagaggttaagaatcggatgcacaagaagattgagaagggagtttctcagaaggaggaaaactactcatcatacgactatactgcagcgttgcagtattgggcctatgaggccatcttagagttgggcaatgaatatgcagtgaggaaatcgcatcgttttccaagaatggttaattgggagagtaaggagaagaccattgtaacgccctaacaattaggcacgccacgacaactgattatgaaacccaaatcccctaatttgagattactagaaaggtaagcgagagaagtttaaactaaatttgaaacagaatgaaaataaaacttgtgataattttttttcttaaactttacaaagaaccaaaagatacatgtttcaggatcccgcaaatattttcataaaatattacaagtctatttcacgtgccgacctaagcggaaaaattagagttacaaaatacatcactagtagaccccaacccgcttggtctaatgtgggccaaacatgtacaagcacctccaagatctctcacttattgctgatcacagattgatttaccctttcctgcacagtagagcacccatgagctaaacctagcaagacagtataaatatcaataatcacagataacttttcacatatataataataataccatttcacttattgtctatttgttatagacctgtatgttacgctcacatgcctatttatgtctatgtgacatagacctacgtgttacgctcacacgtctacatacaataaggccttaaaacggttcatctcggttctaattactgagtccaaccaaattatgccttgaacgcataattcttaatctcaatatatatagcatgacatagtatttaaacaataacaaatactagggtaacaaacccgaatcccggttcttgataactcacaattataatatttaatataaatgccaccgtgcttaactctacgtgcaactactgtcttacttgatgtcccgcaaatgtggagattttaaatcccctagtgctcctggccaaatgccggtaatcctagtcacaatttccgggaatcacaaatagggttaatccctaaatctactttcacatacataataaaattggcattcaaatccagaaaaatacatagagctcgaaatgagctttccaatgatactcggaatacccaaaatggagttcggatcacaaagttacgaacattccaatatcacgttcgaatctgcccaaaaacaaggggacgggttgcgacactccccacatggggccgcgacacctagtgagtggggccacgaagcctgggttccaaaccccggaaaccccatttccaacttcgaaactcaaggccgaaacacacctaaaatatcccaaacatacatataacttgaaatcatattccatagattaatagataccatagcagggcataagaacccacaattcaagctaaattctcatccaaacatgcatcctaaaaattagattaacaacactcaaaataagctccaaacattgagctaagatcatcatattttcatacaaagatgttgcactacaaagtcccaaaataatctcaaaaaccaagcatacaattccaacaaacttactttaatttcagtaatccaaaccccaatttcaccctaataaacgcacaacataatccaaatgcaaaacataaaatttccaagtttaatccacatacaaagcaccccaatttcacaatcacaataatcatgtatttaagaacatcatcacaagaaattcatgaacatttgacttcagattagagcacaaaattaaagcaagaaaaaggtggaaagctacctcaaactcttcaccaagactagcacccaaaacttcacaaatcaaacttgaaccaaagttaatatccaaaaatcaagtaggttgagaagatgaataaggagagaaagagaggggtcagtttaaggccaagaaaaaaaattagaaaatgcttctcaatttctctaaaatttatttttgttgaaagtaattcaaatatgcaaaatgactaaaatgcccctagggccataatatagcataagccaactcaagggcataaatgtcattcaatcacacaccacacttaaacaatttttcaaaatattcaaatatcaacaaaatgccaatataaaatcccaaaaatgtatttcggcccgaaatacccaattgtgactataccgcgccaacttatctggaaatacccgcaaaaaggacacagcaagtatactatataataatatagtcccataagcatgcaattaaattaaatttacagttttaccgttctcgggtcaaaattataaaaatgcccctaactcaccaacggggtcttgagacgtcatttatcaaattaattcacatattataaattatataataatataattccattttaatacacatttaactagttagagtttgctaatctatttttttaatcttagaatattacaaccacactcggcaaggatgaagttataagattgttttcgaaaaatgagagtttcttttatgccttgcagtcatatatattttattttaatttccatctaataaaactttgacttgtattttcagttgacggtgtactctatgttatgtccctggcaaaatgaagaggagttcatgaggactatcaccggcggtgaggggctgataattgttgacttgaaagaactagtgttgggcgatgatgggcaacctactcaagatgctctgtgtaaatatcaaacttacaaaatttgaaaatagaaagaaaaaatatagaaattcatatgtttttgtattttcctttataatataaatagatagatttatttggatggttgtgccttaataataattatgtttttaatttatataaattatttatattcattagaaaggtagtttattaatattgttttgttttattaattaaaaaataattaaaaatgagaaaaagaaaactagtatataaagataaataactacttataaatatatatatatagggcaagactatggtaggacctagcaa

SEQ ID NO: 18154 - DNA, 5510 bp, Cannabis sativa
ttttgacctacaaaaacaacgcatggtacatcattcttccattagcagccatttatcagctactatatctgaatcacaggaagtctttctgaacttcaatttttcatgattggcttggtttggtaactttactatagcaagtaataaaggtggcacttcagtttacccgaaaattgaaaaaaaaaaaaaaaaagaaaagaaaaagaaagtattccaagggcacatattgtattgttaagatgaaccgttctaaatgccttaaagtgaaaaagtgagttaaaacaaaggtcccttacccaacaccgcataatgtcccaaatgacatccatgggagcatctgacttcaatcccaatggatttacatgggtccctgaaatgcgatatccagcattgatcacagcagatctgaacatcacagcagaaggagaagtgcactttagagtggcacagaggttgtgcaaactcaagaacaaaggaacatcaggcaactcctgcaaaaagttggcagtataaaaatagtcacatcatgagctatgtgatttgaaaattgcaaatcctatagagatttatcagtaactgtatgaccaattaactaaacatcaacatagtacaaaaactcgatctctaaagataacaatcattaaccaaaagcctcaatcattttattaactgtatgtttggtataggggaaaagaggaaggaaaggaaaatttagagagaaaagtgggaagatggaaaaaaagatgtaagtttggtaagagagaaaatagaatggaaaggaaaagtgagtggaaaataaaaggtgggtcccataaaaaaaatctctccaatattggagaaaaaagtaggtggaaaattaaaataacatgactttctttccttctttcctaccaaacaattatagtgcatacaaactttcttttccatcttaaaatttttctctccttcaaattttcctcttccaccctaactctttcctccctaccaaacacagggtaagagtcaaacgttcattgataacttgagttttacatagataataagtatttgacaactcttaaacacacacctctgagattgttgttaggatggcagaaatccggtcataggcaggatatctatccttcatagatttcacacctgctagtatagaagcaacccattcttgatcatggatgggagcagaccatatagggcctcccatattgaatttcttcccgcagtcactacactcttgtggaacaacaggaccataaccaggtagatatcttaagttgttgttgctctgaaaagatagaaagtgcagaaaccttgttcaaacattctcaatttccatttttttatataaacaatttgaaggaccattagttcaagataaagcaagaccaccattttcttgatatgttttttttttccactcctggaataacttacatgaacttattaaaacatgcaattttgatccactgtttattataatagaaataaacagctgatattgctggtctaattcagaagaaaaacataaaaatctgaatataagctgtccaagaacttgtttcatcaaacactctcataccttggacattgtccttccaatgggctgtagatgaaaagaatcacagccagtgcactgataaacatatgagagcttgagaggagtgttcttcattgcacttgcagagctgtaaccaaacatttttaaaagctttcaatcaagaacagaacacagaataaaaaataaagctaacttcgaacacaatttaatataacttagccacctacgagtagacacggacgaatactcgaatgtagaagttcatctgaactgataacacaggaactatatatcgcttataccgattggcatgactctgcagaaatatacaacacccatgtatcaaaacaaagtaaactgtaggtgcacgaaaggaaataaaggttttataaaacaaggaatgtgaggaatctaacaacagattattgctattgaaaaaataaaaacaaatatataacagattattgtatcttgaaatgtatagaaaaaatttcttctacagaaatttgatcaccggtcacttgaaatgaacaatgaatggtccacaatgtcactaaaaaatttaaagattaacaaaaagtattaagtccataacaaaattggacactttataaagcacgagtgacatgcacatagacagaactgaagagcctcaaaaaggaaatgtcaccatattattgaaacttcaatatagtaatgtatattaaagcatataatgaacacattactcccaatatcagttcagctctcctgaaatgatatggtacatcggggatgtagcaggtattaacatacctcaatgctggctaggaggatcctcaaggccatttcatggcaatatttccctctcaatggataggaaccatatctaataagaaacataattttgaactgtgagaagacagaaaaaatcattgctcaaacaaatagtttagtaactataaaacctactttgagtagcaaacctccccatttcccccacaaagcactgccatatcagttgctgtacacatcagcaggcctccatcaacaactgactgaactgcagagtctaagaatacagaaggtgaaccataaggatcaagatcaacctgcaactcaacccaacagagcatatgaattgttgttcaaagttataacataaataaatcacatccgtgcaggcaagaagtctctaaataaatataagaaagaaatacataccacatcgaattcattggggtgggtgagcatgtacacacgagcatcagcaagatgtgattccacctttttacaagccactgaaccattgaactttatgttcctcctacaagcttccactgacactgcataaaagccaaaagtaacaatgacgtctctgatttacatatctagattatgtgacagaagaaaaaatgtaaatcataaacacagttaaatatctaaattacaggctgagtataaaataaaattatataaaagaagaaaggaaaattcaagcacaaggttttattttattttttaataaggactctcctggaagtgtaaaacacataaatatatacatttctatcatgtgtaaagtttgacaataacctttatcgttgtcaagagccacaacttgaccaataccctccacttcccgggcatatcttagagctcttaaacccgaagctgagagagcctagaacacatagatgaaacagtaaaatgagcaggacacaatgaagatctctgggttgataaaatgcactaagcagtgtgacaaaagacaggaaacaaagagcatcaaataaaaaatagcacaattttgtgaacctcgagaacttttggggccttcactactactggtccttttccctctgtagccttaaccacctcttctgaaacagcacaagcttcatcttcttcatcatgggccttttcttgcatttcacaatctccattggacaccccaccatttccagcagatccattaggtgcctcttctggaacatgttctgaagcatccttttcaggaacctttgtcactgctttccttctttttgacaactttgcttcacgttcttctttttgtttggctataaaagtccttaagacagcaatggaaatgtccctgttgttaacctgatcatttaagtatgacaccattacaatccttaacgttgagcaaaaatgataagttgaagatagagcattccaaaagccaattataacaaatgttttaaagacatactttccacatttaacatcttttcagaaagtctgaaagtgaacaagggatttttatgatgtttcaagaccaactgtacatatttaacattacagagtttgaaatgaacaagggctatataggcatcaactgcagcaagtaggttgtcccaaaagattagcacagcatagaataatctgacaaagcagagaacttccactaaggcagcatcttaagtcccactttgtattcccaaattcccattacagtaataatgttgcaagtaatgatgacacaaagtcagaagagctatgtagaactctctctctctatatatatatatattatgtacaatatgtataagaggtgaataattaaacgtgagcaatactttcaacaaagttaaactactgttcattatgctgccatagtaccaaaccaatcaacttcatcaagcctaaatgaactaatacatccacagacatcatatatttcataaacattttatacctgctgagaaagatctggcgtttgacaagcactaatcctaatgcgcacaaaagttcctcattactcacttgtgctccattgttggcagcaaacaactaaatagatctacgagtcacaagatcgcctaagcccaggtaatgactaactaaacataatgaaatctatgccaatgtcatttccactaaatttcacacaaaactaagtaattgaagttcttccacttgctgaaacatacttgccaaattaaactactcacgtctaggactaaattctaaaatacttattaaccaaattttaagataagtaaacatgtctttctcagtacaaaactagatatttttccacatatactcttatttttaccaaccagagcacagattttgaccaaataacactaacacacttttaattagcaaacctcaaaacataaaacccgtaaaagaaaattagggaaaaaaaatcaacttcaaaactccaaattgatcactcaatcgatttccatcgcacgcctttttctttaccaacaagacattggcttttaaacaaataacactgaccctttctaattatcacatctcaaacatataaaatcttcataaactttcaactcagaaactcgatcaaagccgttacgaaaacgcaaaatcggttataaagagaaagtttgcatacctgggatttattgtaaaagacttcattcttagcgtgcatcaaaatctcagcctctccttccttgacaatagtgaaatcactgagatccattgacatggcttcaccactttcatgcaataaaaaaacaaaagaattatgggtctcaactcaactcaactaaaaatacaaaggaccggccttgtgttctgagagtttgtgctgttgttataccatgaaatgaaattaagtagctttaaatattatttatatatatataggtgtggaacaaggattataacaatggtaagcccccgacgccgaaaaaaaaccctatcctgaggtctttacttgcttcctgctcttcgaagttggaatttctttttttcttcccaataattttatttatttatttttattttatattcttttccttaaaccctaattctccaccctggtgcacgttagatgttgcaagtagttttatgctaaagtgggcgtttaaaggtcataataaatggggggcatgcttgcggatactgattttcaattagcgaatctaaaataggatttttcctttatttctctctattaacatggaat

SEQ ID NO: 18155 - DNA, 4965 bp, Cannabis sativa
agaggataatcttaacctacaagtatcataggtcgataaaaggagagccaaatgaagctagagagacacccatgatcaagttgcaaaaagtacttctcccaccacaatatgactatctcaagcagccagctttccaacttagatgtttgcttgcagtttattgtattttcatcataacaaatttatcctctacttacccatataaataaaccacatgatatacatagtatttgacttgttttgcaccacaattaaatagttgtgatgcagaatcagatcaccatatccatatgcttaagattaaatgactttatacatgacaaaatcgctttaagcaaaatggacaattaagtaattatacacaaaaacacatgcacacgtaatgcaacacattaaggcacctgaattcttacaaagcactctttcataaccttgccaatgcaagcgttataaacaaatatactctgattaaagcatcaactgttatgcgaatattacgttacacttacgggcaaagaatacaatacaatatagacaaacgctctcatatcttgtcagaagagtaagccagccaaaaccaaaattaaacaaatcaataaccctttgatcgtttggggcaaaccaaaaaacctatacacaacacataataatgttactacatatgataagacaatgttggtacagcgccaactcaccgcccaaaaacaatgtttctcgaggaacttcataagctgatcttttaataaagtcattcatttggttgatcttaccagatgtagaaaacttaagaaagaaaagaaggaaaaagaaaaactattttacagctcaatctcattctgtttgtgtaatcattgccattgaggctctctccgttctgttggggaaccaggaacaaaaggaacaaaaccacggccaccaaacaccgggcgcatgaaagcatcatcaaacttacgccaataccgatggacagcgtgtgttggagtcgtcagaagagcacgtatgctatttggtcggggcacgtcaatgacaccaaaatcggaatcctgtgcacttccaagaagcggtgcagtgaatgattttggagtagagggatccgacagggtcatgctagtggtatgtttcggatttggcagcaagtatcttataagaggcttagtcatcataccaaatacctaaatcacaatcagatagattagtcatcatccccaaaacaaactttatatatagaaagactactgattcatctaagctccatatgttgtgggttcatcttaaatcaaacctatccatactaaaactatgagacatagtttgaatataacaacagcaaatattttggtagaacagaatacataaatatctctacattcttccatattataatctcattataaacatgaaaagtaattcctttccttgcctaatgcaaacataatacgaggtccaaacaatcacactaaggcctgtcaaagttttagtttcgagcagcactcgtaaacactacataatgctaaatagacacatcaaactcataaatgaaacaaatataaaaaatagctcaccatagtgctgacaagaacaactgttattgtgctggtgatcatgagtgcattcaccctcagctgagtatgtcctgaccttgcaaactgcatttggaaacaaacaagtgaaaaatgagtattctacactaacaagtttctctaccatgacacagttctcttcttgattttaagtttgtttttctaataaaaataagtggagcagcaatgacatcagaagttgaccaaaaaaattactctagcttgtgacaactcattagaattgaaaagtagattagcattcaataggacaatggagtgaaaacatacctgattgtaagcaagtgccatagatacagcacctctcatgagcccagcccaccatattaccacctaaagtaaattgcagtcagtagattgaacactatattatgaatatgaagaagaaatgtattgagaaaaaacgaagatttttacttgctgacttaggctgagtttttcatgttgagattttttagataagtttgacaggaaggatagggggaacacaaatgctgctcttccaacaagaaccaaacacagcaatattgaactcactgccactgactttccaggactgccaatgagaaatcgaaacagaatcaattggtaattgtaagaaagagctttatttttacaatgtgtccaagatatcatacatactgctctactattaaaaggataaagtgtacatagtctgagaataagttttcatacctatcacttacaaatctccatttttcaatgtccaaggcatccataccaacataaaggaagataaaaatctcagcaacaaacgacaaggttgcaaatgcatgcctgtatatgaaaagaaaactcaaattcacgttctgaccagtttcctaaaagcataaccaatagacacaaaagctttaattttttggatcatacttggtagtaactcttgagctctctgtcacattatgccaggtgtaatgcgacatgacaatcccacaaaagaaaacagtgaggatgccactcaaagctaacaactgcaaggcacatcaaaaataccagttccattgttatgacttatttatatcagttcactgtgaagaaactgggaagaacagaaagagggtaatgaaagaaaagaacttcataaggttgcagttaaacataaacttacttctgctagcatgtaagaaaggtatgccatgagaatcataagggcaacttctcgatctgtcgaatgcctgtatatataaaggcacgtttattacacttcattctgattggaaggtcaggtttcaatagaaaagtagaagtaaaaaataatagagcaactatgataagttcacagtgtaagttaaaagaaaactattgcagaagatcaagtaaacaacgcattagatataaaatcttaattatttttatgaagtacctcccaaaatagagctttttgataacgtaagcactaagtagcccagtctgcaaggtacagaaagaagttacactgagatacgacatggtgtgtgtacaatcatgatacatagactgaaaaagagataatgacttactaacactcctagaagagtgcttgcagcaaacaaatagaggaaatttccaaggaattgcaaagcagttttggaatcaatatgcgtaagatcaaagctctgaatcgcattaaaaagcaccaccgatgtagcatcattgacgacaccctctccaaagacaagactgtagagtaaaggtgtctcatcctgattaagcacctgcaacaccagtcaacaatttcactttgcatgagttatgtagtgtagtcctttcaacaaaatacagggatagtgatatatcatacctgcaacgtacacacagagtctgttgcagcaaatatagaaccaatagctggaagagaaaaaaaaacacgtaagaagaaatatatacatagatgacaaataacaaaaaaggggggaacaaaaaatgtgagaagtaattactaaaaaatatcatgcttgagcatagaaagagacaaagctagtacctaaatagtcccctatatccaagttatcaataccaatcctcttgaaaagttgtgtagcacctgcatcaaacagtccaaaccaaatttcaagttataacgatggatccaaatatattttctcattcactgaagccagcagactacaaataatcaaataggggggtcttccagatttgcaagcatatgaggttcacgattatagatatacctagtgttatgatggtgcaggatattaatgtaccaaccgcaccaaacagcacgatagttataaagttcttgaagaactgcttctttttcacttgaaacctggcacaaagatcaagatcaagataataagttatacagaaaccattactgacgtgaaagatgaatagaaaagatccttcagtattgcatggaaataaaagtacacacattggaagacgagggacgttactcctctaaatatacacaaattagataaaaggaaacaaccacactcaccctgcattgaatataataggaggcagaagataaataaagaagagatcttcactaaaaacaagaagatgcgagctctttcccccgctaatcagcaaaataacaactccggtacacagaccctacaaccaacccagcataaaatcagcacaagaaataaaaatcataattttattataatttgttttaatagacgaaatgactcacaatcacaagagctgtgattgactcattcatccatcgattctcctccagaagatgaccaatcacaatacaagcgcacagaagtgccacaaagagattcatggagaccaccgacgcatgatcggaagtagatagcgtctgcaactttgagaccgcgaagcccaacccaacagtcattgtgtcagcctattctccaatcacccaatacttaataattttatcggactcaaattataaatgcaagagattcaaatgcccttataagcttaataaatctgtaatctatgtctccgaactgtccatggaacttctgaatctcgtaaagccttacgattacgaaacctgcatcagaatgaatcaacaaaccatcatgcacgtcacaacacagaatcgttgaattaaaaatgagaagcaaagtttaatcctttatttaatcaatctcaacatatcaagctttaagattctataaaacatcaatctatgtttatattcaatctcaacatactatgggacttcattgactagtatataaatttatgaaccattattcataacagaaaacctttcggaaacagaaacaaaaacgttctcgcggttttcccggaaaccaaaaaaacaaagactcgttcataaaactatattcatcccgacagaaagaaaaaaaaaaaacatcaagagaagaaagaaaaagaaaaagaa

SEQ ID NO: 18156 - DNA, 5971 bp, Cannabis sativa
acctgtaggtgaaagacctagaatctgtacagggagtgaattaaatttgagcccctgtattatggtggttatcaggtgcgactacctggtttaggatgttgttttctatgactggtattgagagctaggggtctagtggactgtgtaatatgcatttgatgcttgattattttgtgattatttgtggtctctctactttgtttatatattttgaaaaaagtgatgagatgagttattttttaaaaaaaagctaaccatgcaagaatttttattcaatcaagggtccttttatattaattgttttcttactgggcttcataagctcaccccctattttctccccttccaggaatttaatttgatgctagtggatgaggatggtactgttgagaggaagaaagtcattattatttttttttaagtatgaaaatcattattagttttgtcttattctacttattaaactttcaatgtaactgattttgtatttaagctgaaatgatggtctggatgatttaaattagctatgtactagtttgaaaagaggaatgatggatgctaggtattattttggtattttattgacttattaaatctatctattcagtgactacatagttgtgtggatattattattcttttatataaatgagtgatcctaattttgttactaatatttttttatcgatataggagttaatccattatttttaaataagtattttgtgatataaattcaaaaatcatttataagcgttatctttatacaagagtcaaagtatgacctttaatcaccctcaagttataaatatattatatctgccacggtttagggctcgaatcataacatatatcattttagacacctttagataaaaaaaaaaaaaaaaatcaatcccaaaagatgagttataagctaagatatgtggagtaaaatccgcttgaaattgtttcacaaatttttgtgtcggtgaaagttgtcattttgtagcagtgtttgtaccatatcatctgaaaaaattaatggatacatacggatacatgttcaattaatacatttacaaaatgatttacaaattaatattgatcactcaaccgaacaagatataattttaatcatcaaaataaataagtatttttttcaaaaaaaaaaagtgtcttatatatacctttgtttttttagttacacatatgatatttcatcccatgatccccacactatggtcatttgagctttaacaccatcgatggctataacattacagtcaagttttagccttagagttcaataagagaaaaattatgatgaggacgacttcctctgtgaacaaatattcctagtcaatcttgcaccatagagtttcataatcagtacgtatcagttttgtcggtctcttcctcttcctcataatactcatgatcatcaatatcctttatattttttttcaacacaacaagactagtacttctctttaaccactccaccacttccaacatggttggtcgattatcagggctgttatctgtgcatttcatagctagtaaaaccacagatttaagctgatagagatcgaatttccctttcaaccttggatcagctatgtgatcaaagtcatccatttggagatgaggtgtgacccattgaacaatgtcacgctttactcctttggagagtttctccaaaggttttttgccacttacaatttccaagagcaatattccaaagctgtaaacatcacaactctcagatactttaccccacattgcatattccggagctagataaccaagtgttccttttactctagtagtcatatgagttataccatcagggattagctttgcaaaaccaaaatcagctacttttggttcaaagttaatgtctaaaagtacattgcttgcttttatgtctcgatgaatcatgtgtgggctgagttcgcagtgcaagtacctataatcaataattcaaaattcatatatgtattattaaacactattactgtgactgcgtgacatattccatattttaaatgttaaaattaagtaaaaattctagataggcacacagaaaatggtccaacatttgaattgtatctagtgttaaatttaagttgggtaattagaattttcgccgcctaaattttaacatgtaccaaattatgtttcttgaattttttttgccgttaaaaattttcctaaactattgatattgttagatttaaagatttttgtctaatttcatttaattttactatttgagtgattgtttatatactaaatcatgcttcctaaactttgatatctaccaaattatatcctcaaactttgacaggtactaaattatgcctcctaaattttttttaataaaattagataaaagtacttaaatcaacaatctcaatagttcactaagtatttttaaccactttaaaaattcaaaaaaacatgatttaatacataaaagttgaccaaaatcgagaatagccatttaaattggcagcatattaaagcatccctaactcgttcaaaaagaatctttgaatgattcaaaagggtttggtattatacgtcttttcatatgctactaagtttttcaaggcagtttaataaatatatacatgatttgacttgaatataaattaaaagtaccagttgataattatatatattatattagtagaaaagtaagaagataaattatttacttacgctaaaccttcggctgaaccaatgatgatattgattctacgagaccaatcaagaagacaatctgaggcaaggcttccgtgcaaatgtgtgattaagttatgattaggcatataatcaaatacaataagcctttcttctcctccagcatggtatcccctcagtcctaacaaatttttgtgccttactcttccaagcatttctacttctactgcgaattccatctctgcctttgctgtcatcatctttagtcttttcactgctatctgaatttcataattgatagatgtttaaattttaattctttcaaaattacaaaaataaaaaagagtgttagatatgagaattgcctcgacccctttactagtttgaccacgaaaaacacttccaaaaccaccttctccaatcttgtgattttcatggaaattgtttgtggcatgtacaagctccttcagagagtatctttcccaagagtaatccctattaacactactgttttctctatgacaagacaataacaaaagagagaaagatgatcaagttaattaataataattatctaggacatgatcataattgaaatactggccgtacctggtctttgattcttctttttcaacatctgaatcaacaatagtgcaacaacaattccatggcatctttgtagtggaagaagaagccaaaagaaaataatatacccaaactaattaaagaaaactaaaaaggttaagaacaaatagagaaaagaatatttttggaaacttcaactctagaggaatgagtcttatggtggtgaagacaagtcatgatggttttagctaattttcaattatatgatttacttaattattgtttcttgatattaacatatgcttatgggtgtagttaatgggcactcctcaagctgatgtattctaatctagacatgtagtacttgttacattatgttgatatattgttcaaaatgaattaaatttcatcgtaaacgtcaattttctacaataatttttttaattgtatattcttaggacaaacagcagctactatataatatttctatgttattattgttgtttttattaggatgagtattttaatgcgaaaatgacatataatcgtgtgaaataccaatgttgaaagagtaactcagcgccctaaaactaagaaaaatgttacggtgcaccttaaggtgtaaaaactgttattaatatattttaatatttagtcacatacaatttaatttaataaataatatatagaaaaatgttaactaattacaatgcagtagatcgatatagtattgtatactttcgtaacatactatttttctgaatgtatctaaattgtatttatgtgacttttaggtggttatgaggtgcgactacccggtttaagatatcgttttttatgattggtattgagagctaagggtctagtggacgatgtaatatgcatttgatgcttaattttttttgtgattatttgtgatctctctactttatttatacattttgataaaagtgatgagatgtgttatttttttttaataagctaaccatgcaagaatttttattaaaccaagagttatttgatattagttattttcttactgggcttcataagctaacccctattttctccccttacaggatttaatttgatgctagtggatgagaatgataccattgaggaagaaaattgtttttttttttttttgataagtgagaaaatcattattagttttgtcttattctacttattaaactttcaatgtaactgattttgtatttaagctgaaattgatggtctggatgatttaaattagctatgtactagtttgaaaagaggaatgatggatgctaggtattattttggtactttattcacctatttaatctatctattcagtgactacatagttgtggggatattattgttcttttatataaatgagtggtcctaattttattactaatattttttatcgatataggagttaatccattatttttaaataagtattttgtgatataaatccaaagattatttataaacattatctttttacaagggtcaaaatgtgacatttgatcactcaagttatgaatattatatatttgtcacagcctagagctcgaatcgtgacatatatcattttagaacctttagataaaaaaaataaaataaataatcccaaaagatgagttataatatgtggagtaaaatttgcttgaaattatttcacaaatttttgtgttggtgaaagttgtcattttagccgtgtttgtaccatatcatctgaaaaactaatggatacatacggatacatgttcaattaatacatttacaaaatgatttacaaattaatattgatcactcaaccgaacaaattaaagtgtcttataatattacacaaatgatatttcatcccatgatccccacactggcaattataacctctctctctctacacgccccatgcattgtaagacagactaagtctctctcatctcttatacttgagatttgcctactaattctaacattataatcttaagagagtcacttcagagttcacagcacttgtgatctgagtagtattatctctagtattaatacaactaaaaggggagtagatcattacccacttactaaaaggaccaaatctttataaaaatactatgtctctttactttcttattctttttgtgtacacgtggtgatataagtcataaatacgactccgttgtcggttgtccaaatctgatatcaacaatctagtactttcattgagagtgttgtatattgatctgatatatcaacatggttaacacaaggagagctctggctacaactcatacctcatcaagtcttcctcaagaccctatgactgttgatcctaatgttcgcttccagccacaattagaatctccacaaatctgacagatatggccaactttgccaacccagcaagcacaacaaacttgatcaccacgactggtcaggttgacactaccaacccagtttttcccaatggccaacctctgccgcccaggattgatccaccactggcacctcgtactgagggcttggccaacgtggagcaatcctcgggcaccacaactgactctggcccccaatattatgatatggaaataaggccaagaattggcgagctaaccgttggtgagcctcacatggatttgggagaagatctcgaattggctagtcttagggagggtttctgccaagtcagccaaattga

SEQ ID NO: 18157 - DNA, 4978 bp, Cannabis sativa
aaaaaatacaaaaacaaaaaaaaaattagaagaatacgatatgtacaaaattttcaatattttatagtgttttagattttatttacaaaaaatacgatttttttatgttgtaatcttattgattttttatcatttgtatattgttttttatgttattttgatgttgttttaatattattttttttgttattttttgtattattttcgtgtgatttttttatttttttttaatttttacaaaatatcgtaaaaatataaaataaaactaaacatataaatacaaaaaattttataaaaatttgtgttttatataattattccttttttttctacattttctttacctcttttgtcctcaccaaatcaaacttaagaaaaaaaatcataacttttatcctactaaatatctttcttgtgaataaactaaaaacaattaaaataaaatatagatataaaaggattattaaaatttcactgctagtttatgagtaatcttattaattacatcacaaaaataaattagaaacacagttaatacaaatagttccactaaatacactcaatttaaaatagcttttgaaatttaccttttattttatatatatattttgctaatttcaataatatttttttaaaactttaaaacgtgtataaatttgttattttaatactaaaatatattttattttacataatttttggatgaataactttacatttttttctatatgtataaattaaaaaggtatttttatttttacgtattttgcaagcatatatttatttaggtatgattctatgaataggtcgttaatcgttatcatacacgtccgtacatcttcacatacacaataccaatatttaaattaataattacttatttattttttttaatggtaaaaaattaaaaaacatattattgataattattttttagcgcatctaatgcaaaaccattaatttatttattcatatttggtggatcaaatttccatttctgaaaaaaaaaaaaaaaacaccaaaaaaaaaatcagtgtcttaaggtcactctctgcactcttgttcttgttcttgttcttgttcttcttagtccaatttgtttgaaagagatccaatccagtttctgtaagtatattccaatctcaattctaaaatgtagatttgcatcttatacattatcccagaaaacctcatatgtttgattcaggtttgagtagattcaaaatgtagttttgagtgcatttatgtttgaattttggtttgcccatttggaatgcgttcttcccagatctttgtaattggggaattttaatttgtgaatatgaacatgtttaggaaatcaagttttgggctttctttgttttgctaaattaattaatcttgtcctaaaatgggttaatggtgattttaatgatctgtaattttctttttattttcaagattccttatttcaagtaattggggtttctttatgttggtagtattacatggttaagatgtgagcttcaatggggaaaagcatggagttttttttattttttacttgttcttactttcaagaatctttattttaagttaattgattttctatttaatggtaattatacattgatgatctactagctatgttggtaattttactattgatgttggattggcagaatgaactcagaatctactaattcattagcccagccttctgctgaagcttctgatgttgaacattctgttccaattgtctctggacaagaaactaatccgcctgaattagcatctgtttcatcttcaacatcatcttgggcattgaaactacaacaatcattaggggcagtgcaagagagtccaggtggaattcctggaatgtctgcatttgcccgtttagctagagggttcggttcacagatgccttcatcagtggatactacaactgataataataataatgatgttaaagctagctcggagagtggtgtttttgaatcactcacaaaagggtttgtggattcatcgcggagtgctgttaaggctgtgcaggttaaagcacgccatatagtttctcaaaacaaacgaagataccaggttattactatcttaataagctgttttcaattgtctttcggtattgacaatgtgggagttgtgaattcattatgagcattcaatttggagtgtcaatgactgcattttcataattggcatcattttgtaatgttcaggaaggtggttttgatttggatatgacatatataaccgagaacataatcgccatgggtttcccagctggtagtttaacctctggatttttcggataccttgaggtcagttgatactttagtttactttgaaactcaatccccttttgttatttaaagtaaatttcaactaaaataaagtgttttataggggttttatcgaaatcacatggaggaagttatcaagttttttgaaactcaccacaaggtagaataatatttccaattgaaagtatagatattgcttgctactgcctcagaaatgtgtctcatacctctaatttacgttctaatatggtattatccgaatctcgtgttaagattcaatgtctctaaagctgttattactgcacagggaaaatacaaagtgtacaatctttgttcagagaggttgtatgatgcatcactatttcaagggaaggtatgcttatcatacttgatgtcttcgtcttgctaaaagtttctaattcttactatcattggtattgttggggatgctaatattcaaatctaaatcatgttttcaaatataaaggttcatattcctaactaatcaaaattgaaaggactgcagattatatatcgttattgcactgagggctaagttgttttctcaggttgcaacgtttccatttgatgaccataattgccccccaattcagctcataacatcattttgtcaaagtgcttattcttggttaaaggaggacattcaaaatgttgtagttgttcattgtaaagctggtatggcaaggactggattaatgatatgtagccttctcttattccttaaggtaatactctttaatcgaaccccacaatagattttggagaactttcaaccgcttctttcgggattcaaattgctttctctatccattttttagttcttcccaacagctgaggaggctatggattactacaaccagaaaagatgtgtagatgggaaagctctgactctcccaagtcagattgtaagtcagatcaataactaatattgttattttctttgtgtgactctgacaattagttattctatgttctatagaggtatgtcaaatatttcgagcgtatcttaacagagttcaaaggagagaatcaacccggtcgtaggtatttctgatatcttttactaaattcccattttcctatcgagaatggtactgacagttgtaattattcagatgcatgcttagaggttttcggattcacaaatgcccttattggattagaccatctattacaatctccaatcataacggtatgcttcttcctcttcctcttcttcttttcctttttcttcttatagcaatgtcacagtttctttgctcaatagagacatttttgtcatgtgtgtgtgtgtgcattcatcaaaataaagcgcactatttcgaaaatcgcctttgattaacacatctagatcttcttaccggtcaaaacacagctctaattagttctttcttaagatttatgtgaacaaagtatatagagaaataaagctgaatttagtgtttttctgaaattccaggtattttgttttctacaaaaaagcatccaaaaacaaaagatctaatggtaagtatttcactttgttttaatctttcgtattaaaattcccaaataaagctaactaatccaagttgtgcattccagccagaagacttctggatgaaagcatctagaaaaggaatagttgtgtttgctctaccggggggacctggtttaacagagttggtgggagactttaaaattcattttcacgaacgccaaggagatttctactggttcgtactccctccctcggttttttattttgtgttttactctatgtcttaacagaagaaacttgttaactaagcaatcgagctagagtactcttgactatcctgcattgtcatattaagtcgagtttttgtaacagttggttaaatacaacaatgtcagaaaacagaatgttcttaggtgcatcagagcttgatggttttgacaaggtataaatgagatgaccctataaacattttacttgatttcgggttagatttttcttttttgttttctctactctttttgaacaattgtgatattggcagaggaaattgccttctccaggattccaggttgaaattgtgatgatagactatgatggtactttaccacaaaaatctaactcgaaagccaattctaccaacccgaaatctgatactagtagctctaccactactactactcatgttcctatctcaagtgatggaactaaatctaattcagacaaaaaacaagtccctcaaaatgaagataatgatgatgttttctcagacagtgatggggatgaaaaaggagctaataacagccgagctactgcgcctcctcctacttctacccccacattatcccccgaacaagtaagaaacttatccagccaaactgacaaccagttgtctcttgggaccgaggctcgtgtcttgcaagaaggaactaatgacacccttccgaagatggattcaactcgggggagtgatgattttaaggcaatggctgctgatgcttctgttttctcttttggggatgatgaagattttgaaagtgattaaactatcattgtttgttttgatgttgtattttgtataacattcttcgtttaacaatttttttaccttattattcttcaacttcattttttggacggtatatttgcatcataaaaagcgtaatgtttggtatttaat

SEQ ID NO: 18158 - DNA, 5771 bp, Cannabis sativa
aaaaaaatagttttttttttcattaccatttctcagttttcaatttcaactacaagtttttcaattccactttccttttactttaagcttttttttttcatactaactgtagtttttctctattattattatataattaatttgtaattaagaaactttcatattataaagaatctttctttactttttcgaggctttcgtattaatcaataatcatcatgtattgtgtagataacgatcactgttaacaaactctttgtactttttttccttattttgctgtaacacaaatttctttgtttttttttcttcctcaaacacgatttctcgaagtaattttgcttgaatctttgtaacccaaatcagcaaaagcttcatactttggtgggtagtctttcaataacctgggtgggatcttgatctctgtgaaggaggggtatgggttctggttctcaggaatctcgtccatggactttagatggtttaataagagcctttattgatctttttgttgcttatattctactatgcatatcgacttttatgttctttgcatctaatttttggagtatgtttgggttggaattgccatgtccttgtagtggggttttagggtaccaaaatgggtgttattgctggcacaatttgcttatcgattggccaattagaaagatctacgatgttcagatgagtgtgaggagtaaatttccttttgatttggtttggtctccacgaaatagtggaaatgggtttgttgagttggaaagcgaagcatgttgttctagccgtggagttcaaaatctggttgatagagaaaatgggtttgattctaaaggaaaaaagcttgtgaatttaaagcaaatgactggatttcgtaggcgtagtaggagggctactcttgttgggtatggaaaatttgcccctgtttttccaaatgagagtttgtcctcttcggttgctagtgttgacccttttggtccccaaggtaaagaatcaaatatctcaatttgttcatgtgtgattattagtagaatattagtagtgattactgattgaatatgaatcgtttagagtttttctctgctaaatttaatgctttcttatttgcttttgttaagaggtttgaaaattttgtttcataagtcaaatggttaagattcttctacatttaaaatgggttgacaatgaaacttgaagttcatgaataagattggaaatttttgtttaggtcaaaattgcttaggtcctttgacattttataatggtttgtattttggaacttgaatttgtaggttggggattaaaacttttttgggttttagatattaacatgtttaatgatggctatttttgttttattccttatcctacctcttgtccattgagaatgataacaataacagaaacactttacattgtgagctagagagagattgtagcttgtaatgtttgtaacttgaagattaaaggaataaagatttgttcagttgttttttttttcgggtttaattatgtcgtgttgttccatctgcggattgtgttgttgcatctggaatatgtttctggtttagttcttgattttcttgaattggtgtttgcttagttctcttcttaattcgtgtttgagtgctgttagttggtgttgttccgcaacacatattgttactaattctttctgatacttgtgatcatgtttagatgttgtaaatgcaccaattggaaattacaaaggtgaggagagttgccatagttttgaattgagtggatcatttggtgatagtaacaacacttgtgagcatccgatttgctctgataaacacattaatgttaccgaagaaaagagcgacgaagctgtatctgaatatgataaagtcgggattttggagagagctcttgaagaagagaaagctgcttgtgttgctctttaccttgaactggagaaagagagagctgctgctgcaagtgctgcggacgaagcaatggcaatgatatcacggcttcagaaagataaggcgtcaatagaattcgaagctagacaatctcagagaatgatagaggaaaggtttgcttatgatgaagaagagatggatattttgaaagagattcttgtgaagagggaaagggagaatcttttcttggagaaagaagttgagacatataggcgtatgagttttacaggagacgagcaatcgcagggtgattttagcgagacaatggatgaatggggacaaaggcctttatcttcacattattcaagtccagattcacaactaatgctccaaatgacagtcaatgctgattctggctataaccacatggaaaatgatgcagattctctttcaatccatgaggttccaattgttgaggagcaaatcgatcctattgggcatgacttggttgacaaaacagtacttttagtaggaaaagaagccgaagcaaccgaacactgtactggtgatgagaaaatattgtattgtgacagagatgagctacagaaaaacgaaacacctaagaaccatgttgataacaatatctaatttggttggtgaacttaacaatgaacgaaactggactgatattctaacccgaaaacaaagagacaaaaaaacctgcagatttggaaagtggattatgtaccttgttgctttggatgaactatgacaggaagttggttaccagctctggatatgcaaaaacctttcattttgatttgagaagaactctttgtttgcagttgtaacattgaaattcgagacttgagatcgcgaatgaggaaggccatgacaagtgaaaaacaaaaaaaaaaggaaacttttttctaagcaaaacaggaagatgggtggtaaattcttcaacatctaaggtaagttctttacatttagcagtgaatattgcactttcttaagtatctatctatgcatgtttcgaaatagttcgtacagcaattctagctatgaggcaagatttttttggccaaactcaataacataagggattaatagagtttcccagtaaaacaaaaagaagagattgatagagtctccagtaagtttgtatgtttaacaatgtttccataacaatgaagaaacaaaacattatttgacatgtttacagagattatatatttatactatcttcattggatagagttgtgatggtggtgaaatgagattctgcatatccttgaaagtaagaatgaaataattctttataagaaaaatgaatgaaaatataggtactataattttataaaaatattagagatatagttgaaatttcaagaaaaaataggatattatattgtctaaatatattttatttaaaaaaatcataaaatttagtgaaatatatattataaaacaattcaatatattttatatatttttaaatagagataatgaaaaaatggaacgattcctgtgattctctgaattgagatatgaaaatggaatgataccttgaattgagatatgattccattttaggcagagatatttcatatttattatgttattttcatgtctctattatttttaaaaacaaattatactattaatcttaattgagaggtatcattcttttttttttttttttcttttttttaatatcataacataatctcattatgtaagccctttcaagttataagcttcattaacactagaattttattagaaaaattacaaaaatgcataaaaacttagaaagaaaaaatatgaaaaatacaaaaaaattcttaacaaacaagaagggcaaaagtgtaaacatggagtaacaaaattgtagtaagctatttgaccttcactaacactataattattaacccctagaattaacccttttttgtgtttttttgtagggtttaaccttgggaatcctatgaagaagatttttcagaaatcatacagtaacactatgtatggtgatgaattacttatctataaatttaacatatcagacaacattaattgggatttttagttgggtgttgttagttttaatatgtgtataatatatatatatatatgtctcttcaacctttctatatatgtgatctgaaataaaattggtgccaaaaggctttaaagctttgtttttaatggatctgtcccaccttgtctttgtctaggcagacataaaatagaaaaaatgacctataatcaaaaccatcattgatatttatatgtacaagaattgatgcccaaaaaaccaacggtacaaaatgcatatggttgcaattatagtctcaataagctttatttgaaaaaaaaaataaaaaaaattgaaagatcaaatgtattaggctaacttttttgttttggtatattgtcactttcatatgttcaccttatgattaattattaggaggagcaagcaattttgaaataacataaaaactcaatattattataaattaaaattttcttgtatattgtatactaaagtttgaccaatttaatagattagtaatattcataataaattgtattgtttgagtcaacaaaaaatatttcatgtgattagatttgtacaatgttccctcctcaagaaacatgcttgttctaaggttttatgttcaatgcaattatccataaatgttaaaatcatatataatggtagagaaacatgcttgttctatggttaatgctcaatataaaataccaaatgaatcctaaaccatataattaaaatattattattagtaaattgtatacaccatctaataattaacgcataagttgggtttggtcgtgtatgacatcaccataataaaccattaattgagtggttgaagttttttactattcatcactttactcaaaaaaagaaaaaaaatagtttttatttttaccatcacgtgcatgaaaatggccttattgaatctacttcttcttcttacaaatctaactcctaaactttatgtgtctcttgtccccttgtctgagttgtctcctttcgtcaaaattagcttaggttttaattaatttatttatttttacaattgtaaccacaactcacaagctacaaaaaaggaacaaatatacttaaaataaactttaataataattaacaaaaagaaaaacaaagtttctagattacgcaaagtcactatctcttctccacattataatttaaaatattatatgataaagtcgttttcttaattactttattttgttattatgatatatattgaaaatgaagggaatgaaatttcctataactagggaatcattttacctatctaatgaacttcattaatatatgattgtactttaaccttaccctcctcctaaaaaatgaacattattaatttggtagaaatctccaataattttggcctccataaaaaaaaaaatgtggtttttcaaagtacaataattttgttatattgttactttttgttttagtatctggtagagtagacatgattttagagaccttcattatagattggtggttaatttgttggttggtactatctatattgtgatgtgacttgttttaacattattatcactgtttttcttcacaacaaaaattgactatagaaaataattacatgaaagtgatatatttttctttaaaaaaacgataaatacaaataataacagagtgtttacataatcaaatatttgttacaatttaatttctagggtttattactttgttcatatattaaaaaaatattaatttctaattgagaatttttttgtatcgataagtacattttataaaaacattaaattaaaaataatttttaaaaatta

SEQ ID NO: 18159 - DNA, 9576 bp, Cannabis sativa
  modified_base (205)..(208): a, c, t, g, unknown or other
  modified_base (490)..(497): a, c, t, g, unknown or other
  modified_base (627)..(632): a, c, t, g, unknown or other
taattataattattaaataaatagttttgacatttataggattgaaattagaaaatatggcattattgaaagaaagataagagattgaaataaagtggcaaactagtgaggcccacaagtgtggccgacaacttagtggttttttcctcattattttattcttttaaatccatataattaaatcctaaaccctagttgaaatacnnnnaaaggaacatgatgctctcattctcatccaatgcacttcaaccaaattaaacctagtttttcattctctgacaactagtagatgagagactcctttctatagggatttttaatccttatcattgttcttcatatttgagcctttagtgatagagtaccatacccacacatagcaagtcaagtactcaattatagtgcggaagacgttggttaaccaaaccaaaggagagaaggagatgcaggctcagatcttgttattactctgcaacagaaaggaacaagnnnnnnnnatctgagcggaatgagtcatattatttcgctgccatcaatataaggttttctaaacttttatgtgtttattctattatttagagaattcatatttaggatgttaattcaacatacatgttagtaaatctnnnnnntggtaaaataagttccaacagaatccccattgaagtacttgactataaatcggttcaaacatgctttctcttgaattttagactcagtaggtccagcaaaaagttcagcccaatcaccagagcaaactcagctcagctgaatctgcatctcttctttgcaatataaaagtgcactttgtcttccttatccaacttgatcttgtgcatgagcaactaatggataagtgcactcaaaaattgtaattgaacaattgatggataagtgcacccaaaaattgtaattgtgctctctcaaagaattacttgaaagaggattccttcaccctttccaacaatttgaatttctcaaattttaattttatcttcgagtaataccaactaccgtcaggccaagtgacacgatcggtgtagtggtctaacactgaaagtataatgcgtggaggttttgatgattgcaaaaacaagacacgaaagtagaagttagacattctgtttaaagagatcagacatatatcgaacatgtcgggccccatcggacacaggcaaaatatcaaaaattcacaaaaaaaataaataagataccattggacacaaatatcagacctacatcgggcctatcaaccacagttaaaaatgatcaattaaataaaaatacaaataccaatcgaacagactattggaccctacatcgggcctattggacctaacacaaaaacataaaattggacccctaatcagaccactattggatcctacatcggtcatattgggcctaacacaaaaacatgaaaatgggaccccaatcgtagcactatcaaaccctacactaggcctaacacaaaacataaaaaatggatcgatagagccaaacgggccactatcgaaccctacatcaagtctatattggacctacgtcttcaaccttaatcctttttcaacaacagagaagacatcgggtctgcatcaagattgtatcgggcctgacttaaaaaactaatttcttgccgaaaacacaaatcccaccaaattcaaccttaaatctaacctaaattcacagatcacagagatttaaccatatatataaatcaataaacctatcaataatttcattcattttaatcctaaatcatgcaaaaattcaattaacataaatgaaaaggggagggagcgaaatcttacctttgacattgtgagctctggtggccgccggtgcgagatgccgtgattgttcgagtgttggtcgtgggttggagagacagatgtggtggtcgtggccgcggtagtggattgttgtgggtcggagaagccgtggtcgtggctgcagtggcaaggcgaccttcttgggtctgagcgagagagagaaagaaggaagggagaggcgggtgtgttcaaatgggaggagcagtttttaatataatgacacattaacttatcctataaattttgatacacttagttttagttttagtgtatcaattttggtccaataaatgcataataaatcacattttacattcaaataagcgaataattaatatgcaaaaagagtcatcacagatatagttgactaatagtgagagaatcactgaaatataccacactacttaacatgacatactacaattcccataaatgaaacttaaaaaagatcttgtacgttaataaacgacattatctgggtttttcatggcatagaaattagatgcgcgaccaaatttgcttatagcagcaagacacttacatagtggtgtaattaagtaatatgttacataatctaatatttaattttaccaattaataccaaaatattgttgaacattgctcaaatcttaaacatgtcacaatctacgagtcatgccatgccaaacgcgtgtgggtagtgatcagctcaccaagcttttaatattaaattattaactacttgtgattacatgctttcgtacgtgcacctggttttattagttaccagtaccacttaccattttttttttcttctatataatatgttctatagaataaaattgcttttattattaattacttgagattacattcgagtttcgtgcacctggttttataaaatcagcattttttttaataatatattgatgatatttttttatttatttatttaaagaagccgatattccctttcaaaaaaaaaaaaagaaaatattccaatttatacgtggattgttggagcttagtgatatggcatcacattcacataaatatacgtacgtattctaagcaattttcatatgaatatttggattaaaaataaaataaaaaagaaaacggataatgattgttgactttgtatttttctctgttaaatcgttttccattaataaacccattgaatattattaaagtcattttcattggagtaaatatcatattaaccaattaccatcacaattcaatcaatctgatttaattaattattatagactaatcaaacaaatggtcattgccaaaatacaaatagtcaatgagtttactgattcttaacattaacaaagattttagtttcaacaaatctaaaattattgatttttataattttactatattagtttttcttagatattcgaatttcgaaactgaacaatacgaaaacaacaggcacaaacagtattgacgagccacgtcatctctattcgcgtggagctcttaataataatccagataatcaccgaaaaaagagaactgttcttctcccaaaaacagcccaatccacgccgattagcaacttattatgacgtggcaataaactattggggacctactcaagtaattgtacgacctaccgcaccaaacccttgctgttctcttttgaatgaatatctctcaaggcctaacgacttttcgagactctctctctctacaaacataataataaaagttgtccttgctttttgagtatttcggtctcgctccagcttcttttcatcagaggtaattatctttccccaaattctacaatttttccgtcgaagctagggttttgacgttacggtttgtaacttagtattgattttgcttggcttttgtctatgtaaatgaataaaaagcagtacaagaaaaatggtgaatttagatagctgtttcgctacaatctatggatgattatatttgattggtttattgctgctgccgtttgaaattttatctcttcacttcaatctgttgtgtttattttctcggtttctaagcagcagactaaaaagttggtgaatagttgaaaagtaccggtgagaagaagattttgtttgtatgtataaaaatatagatagattcctttttctttccattgattattattagttttgagcttggagtttattatgttatatgaaaattaatcgaacaacgattgactgtgtattttataatatagagcttgactgaatttagtattatgctatttctggattgagtagaaagtggaaaagaactagttttgattattgatcatattgtaagtttgattaaagggctattctggacaggcttgattggtacttttctttagatttgaccctggtctctgtaactggtccaatgccgtctcctatcttgcctcagtggcatgataaggctagtggtttcttttcttcttcaggtacctaattttgtgatggttgtggttattcttaggtaccccttttgttgttttatatttatttttggttttaatgcaggggtaaagcttaaagaagccgggcaatcagctggaacatttgtgggcgaggttgcaaaggatgcaaaaggtaatgttgcagatgtggcagagcgagttggctcgttggtgaagagtcgatgggcattttttcagcagccatcaacaaaacatgctgtgcaggaacgtcttatatctgcagctgctactactggtacattgtttaggaaaagcatcacagagaccaaagaaaaagttgttgttgggaagataaaagttgaggaggtagtttttttgccaatattttggtgaatttagatgtcatccatgaatttcgtctacccctctaactattagtgtttatttgcagaagttaatacttagcttaggctaggtggtcatttgaacttaatttattgtaagctctgaactttaaggccattttactttgttacataggctccaagttctggatttgtttacatgagttacacaatcagtggcaatgctttaaatttttattagttacataggtttccgttgtgaatttcttgcatataagcagtccattcagtggtatgaaaacaatgtaaatgttttacgagaacataattgactgctacaaattcatacaaactagggtggttaaaaactaaaatttggtttgtctgcctgtcaatataatcacttatacattgtagttggataatttgtaataggtggcaaagaagacagcacaaaaaagtaaaactattctgactgatattgaaagatggcagaaggtataaacttagacactgttgttatcctttattttatttgtcaattgaattattttgcgtgtactaatgattttgccgtatgtttctatttgcagggagtagctagcactgatggtaagtaccataactagatggttacttcaataacatgtttatttcttatctgtctaattaatgttgactattttgattaatgagaggcatagtgcataaggttaaatctaggtagatgatggatttcgggaaaattggcagcatgttttggctgttgtaagctaacctttttggctgttcctgatataaattaaattcagaacagtgttgtatccattcttgacactattgcaaagaatcaggtcataacctgcagtaagtattttgtattactattttggactatggaagttacatcattcttcctttgtatttttttcagtatttggagtcccagttgagattcttgtacaaagggaacaatccatgagacccattcccaacatgttggtcaaatgtgcagactatctcatattatcaggtaaattgattaaagagttgaaaataactgtagttgtttaatcaataacattcacgtacttatagacatatacatggagaatgtatcaattcaagtgtgtactactcaactcgagcgacatttgctttttcacttgtttggtttttaggtctgaatacgccaaacctgtttaaaatcgagggagataaaaaagtcattcaacaattggtttcactttacaaccaaggttatcttaatacttattttattttcttttctaaaatacaaaagctcatcttcctctgccgttattcaattgaactaatatgataatagtgtgctttttcaaaaaaacaaaaatgctaatactggtgttttattgtatcagactcaggtgcatcattaccagacagtgcaaatcctggtgatgtagcagctctgatcaagtattacctagctagtcttcctgaaccgctaaccacatttgagctctataatgaaataaaaggtgcttgctctagcatacatgaaataagaaacatattgaagagacttccaagcgtgaactacatgaccctggaatttattacagcactattcctccgtgttagccaaaagtctcttcttaacaaggtaggaagcttttctctctcaattataggctggacacttcaatattcatttaaattgatgcctaataaagaagaaaaaacacttcccaggaagtatcagttacattttagatcttaatgatgcatatagcatcagctgactaaccttttagaaggggctgctttcaagagcaaaatctttcttattctgcttaatgccaagaaatttaccttcaagctgcaaagataatcttctggcctctgaatacttattcaataagcatgctcagtaaattttattgtgatgcagatggatgcgcgaagccttgcggtggaaatggcacccattataatttggcagaaaggaagagaacctgacatgtataggcaatattggattcaaccacaaaaaggtccttccaaccataatttggagccccagcccgtttatagtgcatgggatctgctatcaggtaagagggttttaataaaataatcaaaaaaaaatcttgtatagatttgtaaatttgcaattcttcttgtaaggtaaatttgcaattcttttataaataggaacatagttatggaaaaataattttctggtcttttacgacttcagttatgaaatcactgaaaaatttctcaattgtgtttttctgatgtttactttagaatgttaaaaaggtagatgagattgctttcttattttaaggcaggagctaaattatttctcttagtttgatcaagaaatttgagttgcataaatgactactcatgctataagatagttttgaaaggcataatggtgtttatttttttgagtaaattttgattcacattctttttacatacataatatttccttttgttttctacaatgcattgcagacgaaggtgaagctgcagatgcatcttcgctcattccattggatgatggtgtgccggttgactttggtgcaattgaagttgttcaatgcctcatagaacatcacaatgcgatttttacagatgcaaatgaaacgatttggaaatgatttctatgagcgtgagggtgaagtggtctagttgaattgcctgatcttaagattttcaaaatttggcgaaggtgatccctgctctagggtgtttgatttcgttgtgaaggcagggaatgttagtgaaaatcagcaacttttagtacataacattagtttgtcttgcattttgaaagagtagtgctactgtttactggtagagaaaaaggccttgctatcatgaaaaaaaattccagtcttctaatcactaacacaatttcacttctaaataaaaatgaaaatattctaagaaaaaaaaacctacttgttgcagtaaaggcagccatcagcattgagcagagcagagcttttcgtttttaataaattcaaatacaaattgatgaatgagttaatgttgccatatctgaaaatacacaaaactagtaagtcttcatgaccaacacaattcacaactcctatgggtccgaaacagaatcaaaatagtcaagcatgtcttgagtcaaatcatcaaaaaaattgctgtttttactttctctaatcaatacacttggatcattaatgaaacaagagtcaataatgccaccatcatcaaccatagaaagttccgaatccaattttataacgtttggcttcatcatttcaggcaatggtgccaccaccattctcaactcttcaggctccacgtgtgagcagtttgattgatatgatgggctactttccggactagaatcctgaaaatgtgaaaattgctgaacatatattagaactaatatcatagaagtgagtagatgtagtagtaaataattaagtacctttggaagttgatgaagtttcaatttggttttgtgagacttcttcaatggaactgatgatggtctgcgatgatgattaagcctctgcagcttcttcttcctactactccagaaattctttacatcattgtctgttcttccaggcaaatatgtagcgattttggcccacttgttccccacctgtgcttgcaattctatgattaacctctcttcctctgctgaaaacttacaccctctgcacatttttaatattattagttcccaaaaaaccaaaaaaagaaagaaaagaaaaagaaaagagttgaaatgagtagttacgtcttcaaatcgggtctaagcttattgacccatctaagacggcatgatttgccagttctaggcagtaatcctttggatcgaatggagctccaatctcttgggccatttttcttcacatgatttatcagtacttcatcttcttcagcacgccacggcccttttcttatgtattctccatcacttcctctcttcatttttcttttcaataaattataaatataaaacccaaaatgagtatattattattctagtgagtgtgagggagattgtatagttagttactgtcgtatacggttcactgactcgtaaatttgatgcatgttaataacatggctttatatggaggcactaacactctccagtaatctgatttggcatcattttattggtcaattgtagtagtacgtgaaacttgaaaaccgctcgtttgttattcccacttcaacaactaacgattgtgacggttagtggtcttcccacacgatcttctgaacttggaactatatccacttcaaacttaaaattacggcatctgtaatatatccacgtgtcttcggtgtcgtttcctcaagttaaaaacgacgtaagtttaattaaacgacagagtttaattattcaggatttcaaattggcgtcgtaaaacaagatgaaagcctttggaatacagggccgaccctgaaaatatatggcacaagacgaaataaatttaaaagaaagagtattataggatttgaaccatgacgttgaacattatggattcctcctcaaccaactaagttatgaatatttattatttataatacacttaattttacttaaataaaagcctaataattttttttatttttttattttgggcccccgaaaagtgtgggctctaagcacggacctagcccgcctatgcctagggccggccctgttggaatatatatatgtttcataccctttgaaatgttttcctaaaatatattgtctttttaatccaatttgatgatttttaatttgcttttttccgaagcataaatcaatgccttttctatgtttgtgatgtatttttcacatgtttctatgttttttttttttttttttttgaggaaataaacacatgtttctatgttaatttaatacttcagaatacgtttgtacaatactagtaggtttcagttttctttttcattttctttcttt

SEQ ID NO: 18160 - DNA, 3977 bp, Cannabis sativa
  modified_base (400)..(406): a, c, t, g, unknown or other
tcagacatgtctgacgaagtttcttgtcagaaacttacatgattagattaaaagttaattactgtttttaagtagggctttgaatataattaaggatttttgttgggataattttagttatataatatagtaaataataatgattttacaggaactaccagaggagcagagaagtgatgcagtgagctcaatggtatatgaagcaaatgcaagagtgagagatcctgtgtatggatgtgttggagccatatcatccttacaacaacagattgatgctcttcaaacccaattggctatagcacaagctgaggtagtccacatgagaatgacccaattctctcccacatccaatcataatcatcaccaccataataacaataattataataataataataannnnnnnaataataataataataatccaatatccaccaccaccacctccctaattaatactcatgaaaatactaataaacaccatcatcatcatcatcatcatcatcatcaaaccaagtccttttttaccatggacatggctgtagtagatcatcaccatcatcatcaacctaatatgggagaatctttatggtcatgctagcaccacctgcctcatttatttatatatagctttaatattattatggctttattatacttaattaattaattaatattcctaattaattatcactttagtattattattattattattatcgaccatatatatatgatcatggcccatactttatatattgtctgtctctttttacttttcttctacatatcatataaatttagattatcatgatgatgatcatcatcataatggttattaaccacatattgtaaatttctagcttataagtaaacttgtaattatcagttttatatatataaatgatcttatagtatatatgttatcatttgtagatatatatttcttatataacaaagttgattaattctgtgtttttctttttaggcaagaatatattcctattaattctcttacatttatgcttaattaaatcatcaaatcatcgtgaatttgtttggtacatcatattgtatatatattatatagtattgtgttatattgtattatattgttagtatatttaatataatactatgtttactaatgacttgtattaataataaactatgtaaaattataatatctttatcacaaacttgactccaaactttgaccttggccctagaccaagacacgagtctagggtctgggtataggattgagttgggtttgggtccgtatctagggttcagatccaggtttaggttcatattcggggttcaagcccgggtttgagtttgggactaagtctggggcaagtctaggtctgcatgtccgagtgcaagtccaacttcgggtccgatttcaaattcgggtccgatttcaaattcgggtcccgatctaagtccccaacttaaactttgtaaatactatataatacaagttaatactgataattatttattattaaataatatgattcacattatattgaaatttatgattataataattaatacaatacaaatttttatttaaatataatattaattattatttaatataatacgaatcttatatgcctgccaaacgagcttgtttaaataattaagctaattattattttaattttttgaaattcaaaaaaatttattaagctcaacaacaacacgtacaagataaagttacttacaaagtttttgttaaagcttccactcactctctatctattgtacttagctttcaaagagtttactctagcacaaacactattagcaatacaattaaaagtgactttaacagtgggaagtttttgctcttaaagaattttatttctagcatgccaaatgaaataaattgttttgctataataacactcaaaagaacctttcttttacctctagaaacttttgctttctaaatctactttaggacgtcatggagttctttttttcgactagaaataccaattcaaagtcacactgcttaatgaaccaccaaactgctgtaaatataattaaaaaagaggtcagaatgactctctactctacttctacacaacaaaaagtttgtatgattaaatcaactaagttctgaggtatatagacaaatgactctttaaaattagccaatccacgatattataatgcctaccaaacttaattctttaataaatatataatgaaaataataaatattcttgtttatccaaattaaagatgattttgtttttttggtactggtaatccaattataaaaacaaccctatagaattttacttttggcgcgtcactaaaattattgcagttaaggtataaattttggtttatatattaatgtgaccattaatcatgaatttccaaacacataaatgggctttctattcaataaatctatgatttttaattagaatgtatttagaagtaattgtgtaataatttttgtatgaataagaattatttaattgctcaacaaacagatttcacctcaagaaataaagagctttaattactagagtaattactagggtagtaattacataatacatgtatagtaattacactatatttttaaattttagatataaggtgataattacatatgaattcttaatattttgtttgacaaaataattaatacaattacataagaaaatattaatttttagtacttaatatttaacataaacttttttgagtaattaaacagtataattacatagaacaaataagtaaaattatataattaaacatttaattatatccaattctctcctaaattttcaacgcgaggtggagatgaatttattaagaaattatttaaaaaaaaaatagcttatagcgtttttgtaattagctaattgaaaccgaatagaatatatctactacatctacttgaactacgtacgaactcactgttatttaagggtgcatttgaaaatttacgagaaaattgagtgtaattaaaagtaattatataatttttacgtattgtttttgactacgtaattacattataattgcataaataaaactaattgaaaagatctcaattatataatatactctctatctagatagagggtatgtttatatggtgggtataaaacaaataaatcatgaaagaatatttttattcaaaaaaagaaaatccaaatcaaggcacttaaaaaatatattatataggtatggattttctcaatttcaaagaatgtttatatttaatatgattcaaatttaatttgatgtacttatataattaatatttgatggaatacatttaattatttcacacttctcctctcaaaaaagaagttttaagttcgtattccttcaataattgacggaataatttaattacaaataattaaattaataattttcgccatttcaaaaaaaaaaagaaaaaaaattaacaatttttgtcgaccaaacaaaattggattgataaactatactcaattattgtgaaccgaaggaaatttataattgagtgggcatgcatatatatatgtatattaattaataaacatgtgtgaattagaaaaacatgcatgaatgtgcacattataataatattggacattaagatttggttcaaagaatacatatgtttataaaatttggtgctgaatatatctaggtatccttatcacctgatacaaacatatatattaattcatgtgatctgtctgtctatacataaattatgtctcttccaccttaaagtagtttttctaaaataaataaataaaaagtgtgataggaaccttctaactacactcctttcttgcatgtgtatacttttacatttaatacaccataaggaaagaatttgagatatttccttaatctaagtaattttccttattgattagggtgtgtcattgttcaaggcccctagacgtcttttattttgggttaatttcacaaat

SEQ ID NO: 18161 - DNA, 4085 bp, Cannabis sativa
  modified_base (609)..(616): a, c, t, g, unknown or other
tgtaatcaaaatcaatagtttgttacctgtgtctattttgacttcagattttattgattttcttcatcagcattaagaacatgaataataagataaagaatgataatcacaccagaggagaagcaaagaaatcggatgagaacaaagaaatccgaggagaatcaaagtaatcgcagagaagaatcaaagatgagatcgcatcccacgacaaagaatagctgagtttggatattttgggtgtgaaatttataaatggaaatatccttttacatgtattctattttttccatcttttaagttttttttttccagattttaaatttttttttattaaatgtccatatttttcaaaatgcatttaaaattttctatatttattaaaaaaaaaaaaaccgtaaaataaataaaataataaataaaaaattcaaaggaagaaaaaacattatatgtatgaaaatgattaattttattttaaattgtctgtagaaaaaaaaattatatacaagaataaaatatacgtttgatctattaaattttgctatataattgtattatatgtattacttttaaattactattttctttacattaaaatgttatttgtatatnnnnnnnnttaatttttttataaatatgtgtaaattaaattagatcagttattttacatgtcaatcaacatctaatctgcacttgtgtatattttaaattttggatcggctattttataaacacccctaattccagttgatcaatcttaaactaaagtggatgacatatagtaattctttttataaatcaaataataatgtgatgtgagttatgattggaggtcatcactttatttccaagagacaagaacagaaaattggggaacaagattagtaatttagtagtcaccagagagacattagagaaactccaagcttcgaagtcttcaaaaataattttaatcatggacattttgaggaacatgagtttcaatactcaaaaccattacaatgatccataatcttttttagtatttaggacactctgagcctcaatcttcaaacctcgtgatttgcctggctatctactttcaagaaaaggtatggctccatgtcgaatgcctctcaaggcactaaagaaaatcagatcaccatctgaaaaacataccatttgtagctttctccttctataggaattcctacattgtaacagaaatttccattaagctttcaagcaattcagattttcattttactcgaaaatagtggactatcaagttaaatgttagatttgatagcttatgtcctagaagctagctaggataacaggcaagaaccctaagtacaatcaaatatttagtagaaactgtatgaatcaacaatttcgggcattgtagttaagcaggtattatggagaaaaaggaaatctacctacattgagtaagtcatatctaccccataagaaactaaatcccatcaacagctttaattccagcgcccttgtcccaatcttccggaggagccacagcggacattatcttttcttgaccacgccagagaacctgcatatgggttcattttgtcagtcataagtggggaactatatacaagaaaacatattaagcatatgaacttactttatcaatcactccgaattctttagctcttgtagcatccatgtaaaatggccttctcataaccttagctacagtctcttctgactgattgacataaataaaaaatgtctttatatctcctgtcaattataattgtgactaatgttaaggaatcatactcacatttccagtatgtctagccagaagtttgacaagagtatctctatttgttacaatctgcaaaaaaagttgagaattgaaagttccagatgagaatttgaaaggagtagacatttacatacacatatgacataatgctctcaaatgaatggttgttcattctaattgttgaataacacaatgaacctccaaattcagagggagacgcacaagaactaacctcttttgcacgaattagaacatcactagcaggcatcaaaccagatgatgggactcgaggttgttggatcatggctgaaccagaatttaaaatgatgttaaaattttagaagtccttagttgcaacaaatagaagggttaaccatcattataccttttgcatgaggcatcataaaccgtttacccttacttcctgcagaaagtaatagacatgcttgacctatagcagctccaacagcaaccgtatgtatctaaccatgtaaaaagaaaaaaaggcaaaatgacaatgtaattcccagtacaatataggaagggggaaagaaggcaatgggacaagcataaaactaatccaattctgcgtaacctatgcttcttcacaaaaatgaaaagcattatcaaaccatcgcctcatccaacctcacagttagtgctataatatgataactgtctctaaattctaattgccatcaccagtggaaaagcatcaacacaacataattgctgatcagatcaggtaactaaaacagttatatcaaccacatcccataaaacctgtgccataaccatactcgcatcaccagaacagtgcaaataagaaatttcggaaaatgtacacacctcattttttaactgcctcattgcatcatatatagcaaatccctctgtctccatcccaacctaatcaaaagtaaaagccaaaaaatgaaatacttgagagcagacgtgataaaaaaagtgagacttgtgaggaaaggaacattacttaagaagcaaataaggacaggaaataatttcataattgcaaaaatgcaacacttacagtttcaccatcatcacgagtggttcctgtagagtttatataaatatatatcggctctttgggatccatccactgaagatacatcaactccgcaacaacaagttctgtcacagctggtactaactgaacgacaacaaatcaagatttgtatatatttaaacatcattcctcaaaagcaacttaaaaggaaattattattatccaaatgcaagcaaaacatgaccatcaaaactctttaaaaatggtcattgttcacaagtattaggtgatgcatattccattatctatcaaaagactcaatggatatcaagctaatttaaggaagggaaacatttataaatatcacagcatggatgcaaacaaaagacaaccgatacttctgaagaattaaactctaatttctaatgttataaagatgacggaataaaatccaacaaggaatcaatatttcacataataagttacgaggataagagctatgatcttgtccaagattcaggaccaacatagtaaagctttctgggcaccttattgtcatttttcattagttattcagaaaattagcatagttttagaggagaaaatatttaaaatagagaagtaggcttcaatcacttacaggcatgccaatataaacaattcttccatggagcaacaatgaaggtaagtccggaggcggcctcctaggcctgtgctcgttgtatgaaactgacctttccacctatttcaatccagtgaaaccatcaaattattaaaaatgtaaatgataataaaaactaacttatttagtgaatgagaatttaaaacttgttcttcctaatatcctcaaatgctggggcgagtgtacacttaaaaaagcctaaaatgtactcacacctaaaaaaaactgtctttactactacgtgatgattttattgaaaaatataatcaattaatcaaaaatttaatcagtgtttgaaaagagtcttctgttccataacttttgtaaaggaaccctcttgaatcagctcaaaactccaactcagtgtttaaacttaagaacgaatatactcaaattaaacaagatatttcaactcggagctaaccagagaatattcaacaatcaatatagacaaccaaaccatataagaactaagaagtaacataattcagcaatgaaaaaaaaagcccgaaaaatttaacacaaacccaataaacacaatttaaatacagataattaagaggtagagtgaaagaaaagagtacttgagcaggcgtagccat

SEQ ID NO: 18162 - DNA, 4937 bp, Cannabis sativa
acataatgaataaattaaacaggtaaaatatcaccaatattgtccaaaagctgtcattttgtaccaacttgtagtgaatattcaatagaaacttacaagaaatatgaatttgtaaagggtactcttttaactacttggagtatttgtcgttcctcttggtaatgattttttatttataatcttaacctgaatcattttggtcttgtttttaataattattttaactaatttgtttacgtatttggttaggtggatctggatttgatcctccaaggtggttcgatgaagcaagtttactagaagaataagaataaaatattataatttaatagaatgaatatgtatgctaaatttatttgcatgtaattactttagtaatcattactctctctattttctccacctttataatttgaaagatggaagattaaaaacaaagtcttaaccaagtctacctgtgcacgagtgattgtattttgtaattttcttattttaaagataattgtataaatatatattttatattaaatgctgttatttgaaagaaattattagtttattttttttttaaatttttcctttaaaattatatattgaaagttaaattaattaattaattatctttttttttttaaaaaaataattttaaatatctaaatttaatttatttattaaaatataatttagataattatttaaaagtatcagcaaaattaataattttttttatataaattttaatttaaatttaaattagatgttaattcaattaatcaatcatactttatataacaattttattagttatattgtttaaaatatttaaacttatttacttatttattatttaataaaattaactagatatattttttttataaataaatttaaaattaaatttaattttatatatttaaaaatataattaaattatttaaatttaattattattattatatatttatgttatattaaatgtgactaaataagtaaagtgatgttcattttttttaaaacatttcaattcatatttaaactcactacatatgtctcttttattttttgtcttgcattaaattagtaaatacaaccgtgcttttcgcgtttatataatagagtaaatataaattttggttctgtattttaaaaatattggtcgttctctatatttagttaaattataatttaactatcgcgtttctcaaaataaagtataattaccaatcaaatccaattcaattactaaaaactagacatttaattacagttggattaaattggatgtgagtatttatatattaattggattgaatcaatttttagaaaaaactttcacattctaactaaaagtagatgtaattcaatttacatgtaatacatattaaaaaagatattatatttattcatatatataatacgaaaaatatttaacttttcatttttatttgttgtaataattttttatgaacatattacacttaattaaagcaattcttaaaaaaaattaaagcatggaataaaaataatatttatgatattcagtcatactaatctaaaccatgtgattatttttttactatgacatatttactaataagtaatgtaaatcaatagtaaagtaatcattcacttatatttatttacttacgttattaaattaggaaattgagaactcgattaaataagggagaaaagaaaatgagaacttccctcactaattttgtaaggaatgtatagattttaattatttttattttattttttaatattagatatataatgacaattttgttctttaaaagatgtcttactaaataactccctcataatataatttaacttaaaagataatttagtccatttaaacattttttcctaataaaataaagaagataaatcacaactattctattttaaaaaaaaaattaataaacaataaaaaaatattattttttatttaatctattatatttttctattaatttatatttatcgacattaatagttccctacaaaaatgtcacttttacataaatacaatttcattttcttattataaaagctctcgatttcttataaccagacgacgctctctctctctctcggtttcttatcctgacggcgacgacaggtcctccttctccttctccagtgacggcaggttccttttccaacgtcgttcaggtcatccctctccggcccggtccgtgcatcgtccatatactttcggtaattcattattcctcattcaaattattacttattaataaattttgaaagaaagttgtttcggatcaaaatttatgaggctactatacattttgtgtttgaaatttggtcaaactatattccgtgtattagtatatatgttattgccttcttcttcaattggataatggagctttcatacagtactgcaaatgaagcttcagcaaaaaaatgagaaaaaaaaagatgttatgtgctttttcctattgttttttccccaaaaatgaatcaagagtttctgtgtatttctgtttaattaaattatttcaatttgttttttaaattgtagattgcataagacgagatctttttagcgagagtgattcgtctccggtaagtggtttatcttgctacaacgatgaaaatatttattttctttaaagaaattaattataataatattttgttgaaataaattaagtgtattgcactcaatagattcttacttgttcactatagtatggctagttgagtagtgtggactcaattttgctaaattcttcttaaaccttataaaatttctttatttttagtcacactttttaagttatatcagaacagtaatacaaataatattacacatgcctttgaaaatatgcagattggtcttggggattagtttagctcagcactatgggcttctctaaattctagtggttatttaggtaccttatacatcagtgctattttattttttattgattttttttaagattggctacattttgtttctgagatgtaattgtgtttttattaagatctgttatacgagtttttggggttatggttcagtgttattgaatttaagatgtttaatccattaatgagatggacattgcaaatacattaatggattttgatgttttccaaggcattgttttgtcttgatctctatgtattgttttggaaaaggttgctttttgttttgaaaacattggggaaaggaatggattttgtcgagaagtgtatgtgagtattgaaggcccctatgaagaacctggtcaaacatggaattgactatagtactatgtatatataaggatttttgtgtgtgtgtatatgaatagaccccgcaacaaaaaagttttaagatgggttagaactgctttaagagtttggtaattcggtcaattatgtaatctcatactttctcatactttctcttatgaactactttttttcttccttatgaagtatgtactatgtagtctcttatattttatttatgctctgtaattagcagcaaataaaatgaaatatagcatgtttctgctttgtttatcttcgtaagtgaagtggaaactacatatttataagtatagatgccatatagaaatgtctttttgcattttactattttataacattttatttatttcaatttataatgaacttgtaaaacccatgtttcttcactgtctgatgtgaaagtagaattatttttgttgtatcttattgtgctatgaaattatttttacttgtctatgctctttccgtttggcataattttttatcatttcatctctgtaggtacagtgtagcaattaagtgtgcaactattactccaggtgattatctatgcatcttgttcttcgatctatatatactgactaggttgaaattattttaaaatctttgagtttaaatatttcttttttgaatctggtctttatttctctttgaggtttaaggttttcatcattgttttactagtagccatctccaatagtaaaacttaaatttggtgttaaatcaatgctaaaaaattacttactatttctttcaacttttttttttttcaattccaatcacaacactaaattatatattatttattatttattatatataattacttaatttttcctcttaaaaagtattatttaattattgattttttttttttttaaaaaaaaaataagtgtggtgtacagtgtcccacacgctgtaaacaaagctatttatgagtatagttttagtatctcattggaataaatatagtgtgaagctacattatatttagtgttttaatgtccggttggagatgctctttgattacaacgtgtttagaattttggagttcatgcctttttttgtaagtatcagttcctggagataataaaatttggaaataatttctatttttatatcctcaaattttccgtactgtggattaatgtatacatttctttaacttatcttttttcttctcactatttttatctaaacattctttcttttatctgaagctgacctcatttatataataattacagataaacatcaactttactagaaggtttaagaatttaaaggtggtgtgagtgtgaagatggatgtagcagtatcgttcaactgccacaaatctctgtcgtttaattcggtcagctatccaaaacgacatttattgactcctcaacattgtcgcttggttgttatacgatgtactaccaatgaagaagattcagtttcactttcacaaggtctccccttcttctcctacttatttcgttaatttttattttgagaaatttactgctaaacaacttctgtttgattcttttaacacttaattctttatttttttggacaaaactaccttcacttttgtttgcaaattcgaagtttcaatcaaatttaaccattaataatgtatacacttatataca

SEQ ID NO: 18163 - DNA, 6358 bp, Cannabis sativa
  modified_base (6314)..(6328): a, c, t, g, unknown or other
tatcatatcgacgtgaaatattatgaataattacgattttttatattatttattaaattttattatgccacttcatatgatgttccttataatttctgaattagatcatgctctaaattaggactagtctagttggaattatgtatttataagtatactttagtgtttggttggcatgtgcaatctttaatttaaaaaaagaaacttagcactttatacttcataactttccggtcccaagtctaacttgagtagttaaactgctcatattaaaatttaacctaactagtggggcaaaaaatatcccaaaacatatataatatgctaaaaatctaataaaatatatataataaaagaaatactaacaaatataagtagtgttttatatcttttaaaatataataaaattattaggataattaagtattaaattttatataagtaattttgattttgatgtgtacctaattttaaatggtatttttttttttatgcaggatggtgtaagaggactaatgctggacatgtatgactttcgaaatgacatttggctttgtcactctttcggtggccaatgctataatttcacagcatttgtaagtttaaaaccaaacatgcatatacataatttaattatgtatagattttaaaaaaatatatataatacgctacgggtcgagtcaggtctgtacctaagatctacacagttcatatgcacaaaacaaaatattacaacaacacggttatacgaaattttaaatatttttatagtttttaaggttatatttacataaaatatgatcttattactttatgtaattttcttattatttatttatatatttatagaatacagttaaaatataaaaaaagatctttaaattaaaagggtaattttttttaccaaaaataacaaattacctaattttccatataaaatatatacaaagctttgcatatcttatggtaaataatttatctaaaagtttggtattggcagcaaccggccattaatgtgctgaaagaagttgaaacatttctccaatcaaacccaactgagattgtcacaattataatcgaagactatgtgacatccccaaagggacttaccaaggtgtttgatgcggctggccttagaaagtattggttccctctatcaagaatgcccaaaaatggtagagattggccaacagtggatgatatgattcagaagaatcagaggttagtggtctttacttctaaatcaagtaaagaagcttctgaaggcattgcctatgagtggagatatgttgttgaaaaccaatgtaagttatcttcttccaccaaaaaacatgtttaattaatatgtgtaataaattgaaccatgcttaattaatatgcatacatggggtttgtaaaatgcagatggaaatggaggaatgaaagctgggtcttgcccgaaccgggccgaatcgcctcctatgaatacaacttcaagatcattggttctaatgaactattttagagatgttccaagtttgactcaaggttgtaaggacaattcagctccattacttgccatggtcaatacttgtcataatgcctctggtaaaagatggccaaacttcattgcagttgattattacaaggtatgatgcatttataatctaattatagttagtcccaaattaaattgtcatgataaatgagccactcctttaatagctaattgtttttcagatggaatcccatgtatcttagccacttccatttcaaattttaacatagtattatagacgtttgtaattcattgtgagtctaaagtgttgccgattcagaaagacgagccaaaactaagaacttccatttctctcttttaactttcatttgggacttttcggccaatgtatgtcagtttccatgtgtacacttacaaatttaccgatttaaccttgtgggattttttcaaataacttatcatatataaaatgaatgagctactcctctcattattaattggttttaagatgtaacttagctagctagttaggtctaattaaatatcttatatattttttttgttttgaaatctctcagaggagtgatggtggtggggcctcagaagcaacagatgttgcaaatggccacttaatttgtggatgtgggaacgttctcaactgcagagtgagtaaattcactttagttacatgaacccaaaacaaaacaaaaaagtccttgtttattaattatgtgattgactaaataattagtactaaaattgattgttatgtgacatatatttacagccaaatatgacttatggagtatgtgacataccagaggctgaagttgccccagcacccaaaatcagcagggcacaacaatctggcgttggggatttaaatagtaaagttgttaagtggcaatggttgtttcagacagttctcatcatgaccagtcttattttgtagttctcatttgttgtgatataattttttttatttaatcttgttttttataatattcattggcaaaaagtcagaataaaaaacagaagaccaaaatatatacattagctttgcatgcaattgccatatattagctttggaggttattcagtcattggcatgggtttttagagttttgagaaagagtgtgttttattaatttattaccacatgttggatctggattgtaaaacataaaaaataatatgtaaattcaagaaaaataattgttacttttctaaaatgtatttatgaaattgttacttttctcattagtgagaaaaatgtttatgctaatgaaatttagttcacatgttttttaagttttttaaggtttagagaaataatatgtgcatagaacaatcataagtgcatttaaaatagaagaatattgataggcaccactaaatgtccaatattaactatgaggcaaaactttataagtataggatatagttattaaattaaaaaatagaatttaatattaaattaaaccaataataataaatgtataacattttaggtgattttagacacacctgttgcactttcaaatataatgttagagtctcatttaaaaaaaaattatcattgaaaactgacacaatatattaagttttgattctatatttttagaaattttattttacacttaatgtatgttatgcaaaaattttgtaattaaaagtataatagttttgggtaaatactattttgaagcttatatttgcaaaaattattgatcagactcttcttatttaaataacaattcaaatataatattttttaaaattatacaaaataataccctgacctaattgttcatcaaaataaaacttaataataacctaacatggaaatcttattgtcatccaaagtgaagaaactactcagaaaattgtaccacaacgattgtctcgtgagaacaacatccatggtgggaggaatgagcatcctccgtcaaaataatttcaacgagcgaccacccagggtcatgagaatagaaggaagaatgcacctcttcctatgcaacatcagacccgaaggaacatgtaagaagctgctacccctcaaacaacattccaccacctccatgacagaactcccgcgaggaatcgagcacaacacacagtaacacagttccaccttctcaaccattccccactcctaggtatcttggcatagaggaaggaggaatggatcttggatgaaatcctccatctccaatcaagtttcctccatcaccaaggtatcccgagcctcctcgtgctaacactccgccaccacaacaactagtctagatacagaggtcctaacctagagagaacctccaggtaaccccccaaatcgagacttacctcaacttcctcgagacaggcgagaggactcacgagataactatgctcgccctgggcctcaacctaagggcatggactggaaagaggacgcactgtcacccgtgataactatgtttacccaggatcaacaccaagagagactagaccacaacatgcaccacctactccaccacaagatgatagttacgtatcaaggcctcaaactactgccacgcaatcattcgctcgataggagcatgcgccttgaggttcgcaacagtagaggacaattagcttcatggaggatagtttccattctgactcgaggattcgattagtaagtgttcatgataatgctccacctcagtactacaaggagcacccttaacatctcccctcatgacacaaggaacccaaacctctgggaccatctgaaccaaagaacacagcctgacttaagagaccacatgaacaaggggtatgcataaagggagtccccttatcaagtgccaaatgatgttcctctacagcaaagggcatatgccccttagtttaacacaacgacttctccactagttgatcctaacatcaatgctcccatgatgaacgatccacgcatcacgacactagaacaacaaatccaacattgaatgccaataaaaaagttgggggatacaagtcagacgaggagcttgagccttttgatacgtacatcttgaaattaccatacctcaagggttcaaaattccaactatgaagaatattgtgtaattggtgatggatggtggttacaaaataagttctacttcagatgatgagcccatgcgaaaactttcacttttattggcgctcggtgggagcgagaaatttgggatatgtttagtgtttcttccatcaatcatctgaatttacgtcgtatatcaatagattatgatttcgagggtcatccattatgaaaagaccttcttctaagaagcactccttaatcaagtaaactaaagttattgttaaaaaaagaaaaaagaaaaactgattgagtatagaacaaatccaaacaaagatttgtggagatttaactttgcagtatttgaattttttttctcctttataagattatgattctataataggacatgccttcaaaaaaaaaaaatcctaattatattctgtaaggatatcatttagaaaaaaaaaaacacttgtctctataacagtgtatgggttcaagtttacaattatataaatatatttaaattttatacacctaaatatctatctatcatcaatctattcttcaagaagcaattaattaagagatggtttcatctaaggctgttgttgttgttgttgttgtgatgggttttctgacctgcattgctttggtttcggcttcaggttattattatgaacataatttttagaaaattatatcataaatttatttattttatgactatttaattaactaatatgaagaatttaaaagtgaattgtatggtgatgatgacaggagatggaagaaaaataccattgccgtatgattgtttggatgattgttcacaattcaatgactgcaatggggcttgtgttttgaagggctatcctcatgggggacaatgcatcaaaataattggttctcatagttcttgttgttgtaacaaattttgaaatttcaatttcatttctctctatatataaataaaattgctatattttttagaatttttacatttctaattttttattttattgtggggtggaatttttttcaaaaaatagtgtgtaaattttatactgtgtgctgtgttaagttttcactgttgttccacggttattttttagttattcttctgttattttttattgttctgttttgttgttttacggttgttttagattgttttataaaaatacagtatttttataaaaaaattcgtgtcgcagtaaaattgtaaatttttatccaaaatctaatatttttgtgaaaatcccatatttttttatatattgtcatgcgccaaaaaaattaattgggcttattagaaaaagattatatttttatatatagtagtaaaaatataaaatatagtattttataaaatggtatttttgaaaataaatttggacttttttattagaaaaaataatgtttcggccagggtgggggcctcaggatagggcccagcccgtcccacccttgggccgccggttcaaatatattagtttttttttttttttttcaatcaaatttaacttgtagatgtagtgttacttacgtgcattttccacattctttttaacaaggctgaaaggaagcaaatcatttaaaaagagatacatgaccaacttatcatgatattagttggtttcttacgtatgtaattttttttttttgaataacttacgtatgtattttaaataagttgttatcttaaaaagaaaagaaaaaattgattaaaatagtcttcttacacacatatatatatatatnnnnnnnnnnnnnnnatgtacgtgccgagccacgtattgctagtt

SEQ ID NO: 18164 - DNA, 2500 bp, Cannabis sativa
caccagactaatttacaatgaccacaatggtattaattaaacaacagggcactaaaacaaacaacaaagtataattttatgaatttctttgtatagaagtggttaaatgttaatggggttgtcttgttagtgcattcaagtattcttttgatatttttgaagaagaaaaaaaaacacgatttttcactgaacttgaacagaacacaatgtttatacactagtgttccagagagtatattattttgtcaagcacaaaatagtacgtttgtagctcctcttacatattttggtcagtaaaggacaaatctcattatgaggtgtggctaacatgattatttaattggtagttattgatatttttttttcctttgttttcctgaaaaaaaataccgtttgctttttcatactgttaatatgaccaaagcattttctcttttgtagttcggttaaaaaaatgaaaattacaccaatacgtgatttggatttgacaaagattacttcctgtgtttgatttatacttacaattggtggtggaatttcaggtctctgtgggcggtaccagggctatggcttctatctttgagtttaagtggagtacgccaaaaagcacagggatgcctctctgttccaattggaataagggcaggaatattggcgtcgagttttgtcttgcaaacaggtggttttctgacttacaagcctaatttctcgctctggctgactgggactcaaccattccaaccttttactggattatccggtttcgcattttccttactgatggccctaattttatatcctagacaacctatgcaaactaagagtttaaagattcaaactcaagggtaaaacatcaaattttgaatagtagggtgtgtataatgtggcctcaatagttaatacctgttctgttggtcttagttattttccacggttgatgttgagaaatattttgcaaaatgagattaggagattgacaaaatacagcacaggaaccatggttgttggtttctgcgagggagtagttccgttctagacttctagttcttgcatctcaactgggaaatgcttaggcactttctagttggccaaaatctcgaatttgttgaggcaaaaaattttgaagtggaagacggaagagaaaatttcatgatgtcttggtggagggtgcaaattgggtttggctttgagttttgacccctgtacaagctcgtcgtcatatgatgatgtatagtgtatagtagtatagtgtatattgtacagttagattccgacagcaaatcgaaaagtttattaatttttaaattcatttattgggtcgtgatccacgctgcatacaggagtctagatggtttcacatttaccataatttttatattttggtcgatataatattaataaattttctttttaccaatctgtgataagggtgttcatcaaaccgtccgcaccgcaaaaaaaaatgcagtttgaaaatttttgcggtgcggtttgaattttttctaattcgcgcggtgcggttttgaatttttaatatgcggttcaaactgcaccgcaccgcatactataaaaatattaatttttatatttatttaggtccaataagtgaaggctcaatttaagcctactaattattgtattgctgaaaagaaaatttacatgatatattaacttttgtcatttttttacaaaaatattgtcaggtagtattttttatttttttactgtatttttttataagtatcatactgcagtatactgtgttaagtttttactgatgttctactggtgttttactagtgttctactgttgttttgagttatattgttttgtgttttactggtgttttataataacacagtatttttgaaaaaatttccgtgtgagtatttttgtaaaagttaactaaaatttcaatatttttgtaagttttccttgttgaaacttgaatttttttttttcatatttattttcaaatcttatgatatttttgataaatattgctcaaactttattgtatttgtgatagtttaattatttaatgatagtctaaactacataaacagtaccgcactgtactaattttttttgtggaggaccgcgaaaagttaagagagagagagagataattggaaagtaaaactgatgtaaggcaaagcaaagctgacattcaatttgaatgaatgggttaaacacccaagttcaaacatttgcaaacccggaaatgaaatattacaaacaaatataaaactcgacaagatcgaaaaagaaaaaaaacaaaaacaaaaacaaaaaaagaaaggtaaaagtaaagccttgatgtaatcacaatcgagaaaacaattattcctcaaggtaaaaaaactccactttgccaaccaaatttgcttccgcctcttatttactcatcatcatatcaatcaacctcacccttcgcttactcgtccacagcaaggggaacagactcagcctaatcacaacagaaatcaaatcatcaca

SEQ ID NO: 18165 - DNA, 8560 bp, Cannabis sativa
aaatgtcatatatattctttcaaagctaagttttcctaactctcacaaatgtaccattagatattatttttaccaaaaatcaatttttttttttggcaccatcattaataattaattataatatctaacaaaaataaaagtgtatctagaagtaactgtgtacttattaaatattataattactaaggtgataattaaatttttagtaattatactatattttaaaatacaagagtatttttgtaactaaatttataaaaagccacttgtataatctttatgtataaataaaggttttgtctttgtttaatgcaagatttaagcattccttcatagtcttcttcatttctctctcctgttcttgtttgttttcaatttagatatgaggtaataattagatataaatttcctcatatattgttagggaaaatagttagtaattacatagtaaaataatactttttaatagttaatatttaaaataaaaaaaatttaataattacaccgtgtaattatatttaattctcattggaagtcatgagaatcagtttgtctctcaattacctccaatgacactacactatcacaatataattacatgatcaataaacatatcaaacagtataattatctctaattacacataaatctaattacattgtaactttataaacgcaccctaaataaacaaatatataatattaaacattaatcagtcactaaccatttcaattttacttttgtgcacacaatccactgatagagatggttttttgtgtctaatttttttggtaatttatagttatttctttcccttaattcccgtacttcttagcaataacaaataaagataacttcattccataccatttaatccattcttctgtttcatcataccaaacaaagaggataatacaataacgctcggtaagttttagagttgttttcgtgctctaaaacttgtttttagggtagtttcgttaatctgaatgtttgtaataaaataaatttattgaattgatactaaaattaactttgaaagttttaaaagagaacagcttaggtgaagattaaattatttgaactttttttttaaaaaaaaaggatctttagcagtctgctgtggtccagattaaagtacagatccagatagcaggatctcactgttaccaaatcagatccgtgaagttacctcccaaccctgtaaattattgaagtttaggtagacaacaatagagtaaactttcttttgataaaataatagagtaaacttaataatagttgttggagtaactccaatgactttacaggatatggaagaaaaagaaaaaggaaaaattttgattaaataagagaaatcaagtggaaacgttgcagttgcaaatggttcaactttatcagatttaaacttatccaaacgtccattcaaaaaaaaaaaaacagttatccaaactttgttgtatttaaaaattaaaactagggaatcagagaagtaaacaatgaaagataacaatagaatttcaatatatcatagcctttatgccaatccacctcttctcgagcaagaaaaagcctaaaaagaggttaaagattattccttactgaaacccatcttgttaaccgtatctaggttgggtttcggcagctaaatggctttataaaattattgcagtacatgtttaatgtttctatagtaaaatataaattttgaaaaataaaaaaggaagaatcattcaactgtacaatatggcttttaaatatatgaagcaatgctcaggagccccacgtcattttacctggaaatttttcaactaatttacttttctgttataagagggactcagtcagcttgtcaccgagctagttttgtactagtttcaacagtattttcttgaaagagtccatctgcttgcgtcgtccactcctcatttgctacaattaccaacaacaacaacaacaaatgaagcaagttacttactggctggttttgaattgttccactcacctagttgcaaacacaaataaagagtgactgaaataaattattgcttaccccaaagacttgtaatggttacatcaggatctgatcgaaaccaataatcatcatttacctggagacggagagcccgcattagtgaaagtgatgctaaactataaaataaaaggttttaagaaaaatagtgcaagtacttacatcaacatcagaaggaataatcttctgaattccagatgattttggacctagtgagctgagattatctacacaacttttttgatcacccggatgatctgagtagatcacttcatcttcccttccacaacaaccaacatcccatgcagataaaccctcagaggttgctcggttggtggttgtgtcctcattttcattttggtatttgctaaaggcatagaattatagtttattagctattacctatataaatgcgcataggaaagaaagaaaaatgcccaagttctgacaatccagagattgtcaaaattcaaataatttaagaacatagttcatatccatctttcttgagagtggaggagacgtgcacataaatgcattactgcatgcaaataaagaagataccttaaaagatatacatcgattggtcccatggtgcttctaacaatcattttatattgtctttgtggaaaactcaaatcctgctcattagaagaaaacaattgattgggtattaatacattaaaatactacacaaatgtcaaaccacatttatcctagcaaactacctcatcaggatcaggaacttcaatataactagcttttggagcatttattgcaatgagtgtttgattctgtttagaataataataacaacaacaacaatcaacgagtgagataggttatgtgataaaggtaacaataattctaagaacaagcaccatttaaggaagtttcaagtcttagatgaaaatgacctcaaagcatggaagagtcaaaatgtcttcctctgtaaaaaataggtacctacagaaataaaatagacaaaatgaagaaaacaaagaaatatcatggctgcaataaaaccacattagggaattgaagtgtacttttgacagttttcatctctttccagggcccaaagccgattttgtttactcctgaaaaagaacacaaagggtcaacacataataagaaatcatccgatagaaaactatccatagaaactctacagaacgaaccttatttcctcatcaagtctgcattcttcagcgtataagctttcaacttcagcctgaaatgaaactagaccttataatcgtatatactgtttaaattacagcatcatatttctagatgcatataaaacccgattcaccttaattatgcctattattttccaaattgaaccatctataaaaaagaaattaacgtaactgtaatattactctctgtagacagccggctaacgagtttaaaattcctttctcaactcaataattaatgtacattggaaaataaaaacaagtacatactggagaaaaatttaagaaaccaaagaataacactgaccaatgtgggcataaaatttaagtagatccattatccactttgctcgaggttaattacttcaaatcaaaaggtggtttgctaagtatcaacattatagcacaagaataaacagtgcaacattattaaagatacgtagcacaaatcaaaacgattgacacgttacacaatacctttactgcagcaatccaatcatccaactctcgtttccccatcaaatcatttcctctgtttgtaagattaacggttatatcaattggggggaaaacaataacagaaaaaagaagaacaaaagtgtgataagaaaagttcaattattacttccagcgtatatggttctttgaagttttctctatcaatcctattccttcaagaacatttgtaatatcatatatcctcctcttttgaacctacagcaagcaaggtaaaataaataacaaatgggaaacataaaatgttcattatacagatgcagttcaaataatcttgtaagaacacaaatgaatatttatgtacttctaatatgtctgcagtatggttcaaatcaagagttcgatcctcagcttcatgaatcaagttgacaaatttcctagttaacaagcctgccaatgacacattacagctcttaatcaacataacaaaataaaaattcaagtgactgctcaaaatttaatataaaaaagaacattgaaacagaaagaataattacttggcagtagctgtaacatgtgtaatctaaatgtacctaatgaactctttcaaaataaataaataaatgtacctaaagaactatcaaagcggcaactgttcggcggaatgaaaccattaagagactcagctttcaacgtttgggatccaatggattgtctgggaacttttgatttagaattatgctttctttgtccagagtgcttttgaccattaactactttgctcagtccagatacagctatttccccactcatgccagtctcaactttaacatttgattgtgttaactgcaaaaaatattactctttagatgtttgtgtagtagttaattgccagcataaatttcgctaacaattgtttcatattgggcaataaagggtgtcaattatcaggtataatcaaactaaaatttacaaaaatgaataatatttagtcattgattaccgattgttatgcaaacttatagatctacgcctaaaaactcttaaatgaacacttaaaactttatcaattactaaatttctttattgttgctcttcttgtttataaatttctctatccaagatgcgtttcacgggaaaaattccaactaaaagtgaagaaagaaatataacacaggttttccagatcgctggtcaatgttagcagaatattgtatggattacaaagatcggatcaatacacgaagcgtatcaagtgagtcggattctgtgggtcgatatccgcccgatttaagcgaaagtggaatcggccataatttggcatcataatatgaagcagtaccggaattaacatgcttcaaaggaagatcaactcccatgcaattaaatttcaccaaaaaccaaatcaagaagcataataaaccgattacaagatcagtaataagcgttgaacccaatatcaagagtcaatcagctactgtagtgttaaaaacaatcaaattcataaagattatatatatgtataaaaaaaacagacttgagctcacgcggcagattcagaaatcgaaagaaagaagaaaaattcaaaatcgtaagattgatagaatgcaaagaaataagcaatcgcaaagggaaaagaaaaacagatgaagcgagcgataagtggtgatcgcgagaagtaggactcacctcaagctttgtaaaagcagagtcagctcctggatgagattcgttagagatatcggaaacgccaaggcggtcgaagctttgtgaagaaggatgaagaggacgatgatcgcgaggaggcctctgggtgtgaggaaaagaatggaaaaattgcggattagtaggtgaagagaaagcagaggagtagtgtgagtgaggatgtggaagctgaaactggaggtgatgatgaaggccatgagaagaggtcggatcctgagcggagttggacatcaatggcggtaagagagagaaaaagggttaatttttatttttgagtgttggagggaaaaggttttgttcgtgttacttaagagaaaaaggttttgcctttgcttctgtttttttttatttattttagtaatgtacgaagcggcgagtgaagaaagaaaggggtcacactactacacaatccttaaacccatcaaaacgcaccgtttcttgttttattttcagctacattcgaatccacacatatgcccgccttttttagatggaccatttttagactagtgggcctttttctttaagcccattatccagatccccactcactaccacataatctcaaggtaagaccgtagtaccctttaaataacatcttcttttgtctattctattttatttcaccaatgttacaaaaggccatacataaattatataaatataaatgttatcaacctcatactttattattcatttattgaaaaaaaaaaaaagtattttgattttcaagatttattctttttcatctttagttaatcaacgtacgactggactacgtcgtcaaaaaagactcaaaaattcaacttgtgatccgcaacacatcttaatttgattctttttctactgatattgattttgttcgtacgttagttaccaaccaaagtgttttgtcttgtctctcaaagtagttgattataatttatattaatccatcattgtgagctaaataacattgcttaccttaaccacatatctcggtattattattaattatgttaaattaatttgacattaaaaattacatatatatggtacaataatgtaataagttggtggtggtgttcagggttgacagcagacacaaaaacaaaacgtgttgaagcctttgcacttctaattaattaagtaaaagtaaataaaaaattactaaaataaattgggtttattttatttttggtcaaaaaaatatataagtaaccgacacagacaaaaatgatgatacttggcacttggagtactgcttcaatggaactacatgctactacagtactattattactgcatatatatcttggtgtgccacttacaatatataaccaacaaatgcacacatctacactgcatcaaaggatgtgttctcgaaggaaggacctgcattaactttggtttaaaaaaattattcatttatatataataaataataaatgtgtataagaagcggatcaaaaattaaatatgttggaagcagatgttgttccgttccatcatcaagtaatataaaatataaatcatgtaatattatttcttacttcgacagaactaaaaatatataaatcatttcataataggatagctgggaccactgaaaataagaaatacattaatcaaaacataaatatttatgtatatgtataaatagaatatttgaagaaatattacttttaatctcataacaattacgtttggtaattaggggtgttcatcgaaaatgtcaaaactgattgaatccacgaacgaagattcattatcctttagcctaagctcaccactatagtttaatcatttatataatcaaacattgtacactatatataaatttaggcagcagcaattttacagctataataatttttgtgcgatgacttccttttaaaaaattgaaaacgaagtaagaatacaaaaaataaaaggcaaaataataatatttggtcgaacaagccaccacaaagtaatctatgtggttattttcctaatttaatatttttatgttgttagtttggcaaatttcttgtggagaagtacgaatgtacgaaagtagagaaatctacagtatgagtgtgtgctcttccttagtttctaataatatatatgtgtttgaattttgataaatgtttcttacacaaagttagtgtaactctctaattaggtacgctatatatcgtgatatcaatttattgtgcactcatgtattaattaaagggtttattaaaaaatttgaataattttcataattaaattttaattttaaaatatataaatactttacatagtctgagatctcgttttaaagttacaaccgttttcaaaatactatagttacaaaagttgtcacctagtgacttatcaaaatgaagcatgttgtcctgaagatctgaacacttcaggtctaacaaccccaatattccgcatttgctatgcctttacctacacgtgtaaacaatatttgtgaatcgatagactcagtaagaaaagtataatcataacataaacataaaccatatcataactagacgcccatacactcaattataattctatcccgcatcccatgcgtattgagtttggaacgtttcatacgacaatatgattgaccataatatcaatctatactcgatactctagtcatactgatatgataatgtcaatcatactttgccaaacatatattcatcgatattcagtgcaactctatgtacactaatatagctcttactgatatgttatctattatagacaattataaaacatgcacgctaaacatatatacatatatgcaactattatactagtcttaccttgattttaaattcaggtgtgtcggtcaatgtaagtggaaactgctgctcgacgatttataggtccctaagtcacaacatacataaaactagtaagtgatacgctaaataacttttcggaaacttaaacttaaaactaaaagttttcctattgactaatagcgtgacaatactctaaatatcgagaaaatactgaaaacacaattttgggaaaaatacccccaaaaatgacaaactggttcttaaaaacggcagaccatatttcctggtatctacctgctaaaaacgataaaccattttaactacaaaattcaaaaatgtctcatctctcttagaaacaattg

SEQ ID NO: 18166 - DNA, 4347 bp, Cannabis sativa
tctctctctctctctctcttctgtgcaggaattttggcatttatggtgaatgatgctagaagcttttgtggtcgacgacggtgaaagctgggttttggtgttcgaagaaaatgtcgaagatttgtgcaaggatatgggttttggtgttcgaagaaaatgtcacagatttatggatatgggtcgacaacggtgaaagttgggttttggtgttcaaaattttgttctattaatttcttggtattgtatcaatttctcaaaaaagagagagagtgatagagcaagagatcgagagagaggtggctaccgagagagagagagagagagagagagagagtgagagaaaaaggaacagaaaaaaaaagaatgaaaaaaaaggaaagaaaaaaaatagaaaaattattttttaattatattttttttaatttcaaattaattttattttaattttttaaaataattttttatgtggaccaataaaattgtgccacttgtacactgtgtctagtccaacatggcacttaacacctaaaatggacgaaaatgttaaattactagcagaatacgagtattgggggttttaccgcccaaatttgggtattgggagttaagtgaaatcaaaataaaagttttgagggtttaaccgccatttaccctaataatttttataatactatatacgtcaattcttccgtcctttatatttttgtaagaaatttccttttatcgggtattttttttttttggataaattttattcaaatttatagtattgatcaaattaccacaattttattttaagattatgaattagtatctatgagtgcaaactaatgaggaaatatataagagctagatattaattaaaaatatttataaaattaatagtgttctacacctaaaaatgtataaaattaatatagtaaatgtagggaaaggaagtaaggagaaagagaacacagaaaatagaattgcaaaaagctcaatctattattgattatcattgtatttatacaagcatgatgttacaatattaagtttttaacagaaagactaactaccttaactaactaaacaccctttaactaacctgagctaacagaaaactaattaggatcagttaatggtgtcaacaccccctcctctcaaacgaaaaaggggttgagccattctcagttcggacttaagatagatgaatcgttctttggacaaaaacttggtgagcatgccagcttggcactaaggcttggaagatatcgaatatatagcttcttttctagaatttggtcccttacaaaatgcaagtcaatctcgatatattttgatcgaggatggaggggttagtagctaaagcagatgtactctagttgtcaacccaaataacagggccgtgaggcaaagtaacctataattcagtaagcaaggagacaattcattttagttcagctgcagtgtttgctaaagcacgaaattcactttcagtgcttgagagagcaataacttattgcttcttagcagaccaagagatcaagttgtctcccaaataaaccacatatccacctattgatcttcgatcatcagcacagctaacccaatcaacatctgagtagctttctagagtcatgacagtagctggggtgagaaataaaccattagagatggttcctttaagatatctgagtgatctcttgcaggcttcccaatgtgacacagtaggagctttaaggaattggctgagttcgttgatgagaaaagctacatcaggtctagttagatagagatattgaagagcccttatcgtacttctgtagaaagtaggatcttctagggctgaacatcagtctgtttggtcgatttttttacatatcaaaatccaaatttgggtttttggtttggattggttcaatccaaaaaccgatcgaccaatccaaaaacattttttaaaccgaccaatgtgaaccacagtttggtcgatttaaaacgccaaaactgaatttctttttcttaaaaaaaaaatataatcaaatttattttgtaagcacattaatacaaactgtaaatacatcattctacaatttacaagagcaaccatacaaattataatgtctagttaaaaatccaaactctaaaacacaacataatacaacacaaattaaatatgagtccataaatatattattctaaaaccacacaaagcattaaaacagtaatagaaaatggattctgaatccaacaagcaaccatgatcaccactttgcacctacaaaaagcaagaatacacatagttaaacaaaccaaatggacaaagattcgaaagaaagaaaaaaaaaaaaaaaaaaaaaagagagaagaaggggcttacaacgcttctttatctctcggcagcaatggtgaaaccaaaggtgaccaagctcaaaactatgacaagaagatgaaccagagaaaatccccttccttcttttagtattaagaagaaaaaagaaaaaaaaatctaaaaactatcatcacattattagataaattttattgacaaatacaaaataaaaaaattaatgaaaaataagatttattattgctgtagaaatagaatagacctggtccactccagtatgtaaaaaaaaaacaagtttctcacaatagagacatgtaaaacttaaagcagaaaaaaaattgagatacccgattaatgcagaatgataccagtggaaaggattatgaagctgcttttcttctttgctgtcaatcacctctgccttattagttaaggttctagaaaaatagaaagatgtgtgagagtacgggatgaatatgtaagataaaaaaagaagatgaatattaaagttttagataaacatttactgagattgaatcgtggacatggagtagatgaggtggcttgaaattttgatgtgagatggagaaagaatatggaggcttgaaatcatggacatgggctagctacttagggtttgaggtttggatggagaatggagagagagataagagaggcagactggcagagaagaaaagaaagtcacgagagagaacttggaatttggagagtcaaatttggtaaaggtaagtaatttttttttatataatattaaactggtatgttattacttattattatcatataacatgtaatattatctataaactggactttaatcggtcagttctgatttttcttggttggtttgctaccgacataaaaattgactgttcaatggaggttttaattgtttgaggttttcaattttaacagtttcggttctagcggtattcgacaggtcggttcgaagtttttttggttctttggatttcatgctcagccctaggaccttcaaataattctccatcttttaaggacagtttagtggtgtggcttataagatttgaacagaccttagatccttccatatgcagcttcactaacatgtctgtaatatattttgtttgagacaagaatattcccttagcatctctaaagatctctaccccaagaaagtatgaacatcaccaagatctttgagtgaaaacttattgttaagatcagtaataagtttggagataagattcttgtttggacctgttactagaatattattgatatatacaagtaggatgataagggtgtcaccaaaactatgaacaaatagtgatgtgtctgatatggatgctgtgaaaccccattgaagtaggctagttctgagtttatcattccaagctcttgtgcttttttaggccatcaagatttgtgtagaagacaaatatgatctggtttggattgatctatgaagcccggtggttgatgtatgaaaatagtttcagtaagcaatccattgagaaaaacattgctaacatccaactgagtgacctttcagttggaagtgacacagtttgaactgtaacaggcttaacaactggagagaaggtcttctcatagtcaatcccttgggcctatatataaccttttgcaaccaaccttgatttgaacctgtccaatgacccatcagcattgagtttgactctatgaacccacttattaccaataatgtgcattccaagtttcttgggaactagtgtccatgtacctgctctttttaatgcatgaactttagtttgcatagagttacaccattgaagatttttgagagcaacttgaaaacactttggctctaaaggcagtgatgattctcgcaatcggtgctttgttgccaggtaagcttttggcttaactattccatttttggacctggtgttgtgatattttacacacgcaagtgcatgtatcgtttacaagtaatagactcaccatgagtgaggtcgatcccacaagaattgtag

SEQ ID NO: 18167 - DNA, 3392 bp, Cannabis sativa
tcaagtttgattctgaattcatcgggaagacgttttagtcacattccttcacaaattccatgtgctaaggcacgacattctgcttctgcattattgcgagctaccacttgttgtttcttgttgcgccaatatacaagattttcctaaatgtagtacccagaagtggatctttagtgagtgagagaaccaacccaatctgcatttgtgtatatattaagatctttgatgagagttttcctaaacatttaccctttttctggtgttcccttgaggtacctaagaattcggtagacaacatccatgtgttcctcaaaggaattattgagaaattatctaacaacactcacagtgaggtttatgtcaggctgagtgtgagttaggtagattaactttccaaaaagatgttgataccttcttcgatcaacttttgttttgaggaagactaggtgagattgttatggttccaattttgttaatccttgaacacgagccatctgctatgcgaacagtcctttcatgagagtacttacttagaaaagaaaatagtgatctatcacctgtaatatggtcagaagcaccagaatctacgatccaagggtcatgaggggtttgaataacctgaagtgtatgagcattgcattgtcttgcgactaaagagatgacacttaatgagttttgttctgccatggagaaagacagcaagaaaaacaagtgtaaaatcccaaaggagatgaatagagagaggacgctggaaaaacctcattggagacaaagaagaaccggagaagaaacttgagagagatgaagcgaaaaaatgtcgctactgctacgcgcagctctgatggacgctggatttttggtttttgtcagtcggaggtgggacaagctccctaggtcggaggtgagaatagaaaactccttttaattagtttctaggatagagccttcaaaccctaattttaagaaaggaagggatgagaaaaataatatgctttgagaaacttcaaatgctctaataccaaatgagggaaaatatttttattttgtgatatctattttagtatatacaaagggtatatataatacaatgtgaacacctagtaatacgagtaaatgaaaaaatactttacaactaatttacaggtagcttgatttcttacatcaaatgccttggagagtttatttttcattgcctctcattcttctatgtcatccccaatgagacgtatgtcatcaacatggataattagagctgcaattttcccactgttcgagtgacaagtgaacaaggtatgatcagattgtgctttagagtacccttgtttctttaccactttaataaacctttcaaaccatgctcttggtgactgttttagtccataaagagtttttcccaattttacagacctttgtaccaaacttgttctcatatcctggcggtggaaacatatacacttcttcctttgtgaatggagtcagcctagagttgatgcttggttctgaagctgaatgagccacaattgcaatgcttctagtcaagttggtttttcactagtcggtttgccatgtattttctagcaggtatcccgtgtgtgccaataagttttgcaaatatcacacccatggcttcttcttcttatcattattggattcagctccattagcaagtaaagctaaaacctcattacctgacacgaatgatgattctttgttggacatgacttttcagcggctctcctccacccttatttcagagaaaacctccttgattgatggcagtggtctgcaaccaagaatcctcctttttacctcatccatattctggttaattccagcaagtagcatgaagacacagtcattttcttcacgcttctagtgttggagcaaatcagcttgactttcccaaatgtcatcatagtattggtctagttcttgctaccaagcaaccatgtcattgtaatagcttgtgacactttgttgcctttgtttggattgctagacccaagtcatgagctcaaaaatttgagaaaaattctttaaattaggaattggctagagcaaagaatgtgtgcatcagtgatttggcaatagtaaaggaaggtgggtacatacatagggttattagctggaattttaatttcaagaggaatatgatggatagggaaaagtctacttgggatgatatggaacatgtgaatctaacctatctttcaattgatagtagaggttggaaaccagaacatggtgacatggtgactcattctcatgtaagtctgctttcctttggtttacttcaaatcagggatccaatggattagaatggactaaaattctttggaaaagttgtgtacaagctaaagttaaggtatttggctggttggtggctttgaggaaagcaaatgtagatgaggttttgcaaaaaagaagaccctacatggtcttgccagggatggtcttgtcccctggcaggtgtgattgttgcaagtctagtaatgaaaccattgagcattttttcctagagtgtccctatactcaaaaaatctggtcttttatctacaaagaatttaggttggcatgggtaatgcctcagttggtgtcccaagtcttgttgaataagcctttgggaggtaaaaagagtgtaaggtggtggaggactgcatctttggccgtattgtgggctgtttggaatgagagaaatagcagaatctttgaaggagttgagaactctgaggaggatgtctgggagagtcagattttggacagggacttgggtatttagaacaaaacattctgagaatttgtccttcctagaatttttgaaggtttggaaaggtcagcggaggatgtttgggagaaactaaacactttgaggatttctcatttctaggcttaaatagggattggagtgtgatgatgtaaatgtcctgggagatgttgtgcatgttacaaatttgttttgattaattttatgtttccatgatctgtttaccatggttttcctccgccataagtgaggctttcaatatatattggggggaggccagtctaagacaagtgatctctttctctttttcaaaataaataaataaataaaagacctgatgatttgttttgtaattttattttctgctattttatacttaaaccttgtttaccaaggttttcctttgccacaagtgatgttgtgtaagacaagtgacctctttttctttttcaaaaaaataaaataaaatatgaagaaaaatatgtaactactagattctagatttcttttgcacaatgcacaccaattagtagagagttgtaacaaggatttttctttttgtaaaattctcatgtatttacttgttaagagttaccaaccacttaaacgccttttccttaatctttgg

SEQ ID NO: 18168 - DNA, 5423 bp, Cannabis sativa
aaaaaaaaaaaagaaagtaaaactccatataactttttataaatagtagtaatgtcatattaagtattacagaaaatttacataaaaaaatttcaaattatactgtttttttttaatttttctttttatatttttacgggttgatttttttttttttaaaagaaaaataatttttatgttgtttttttttttttttgaaacataataatttttatgttgttacaatattatattatttttttccaatgtgagaacatagtgtaagtaatatctcttttagaacaacctaaatattaccaacggtctgtaaaaaaaatctatgaaaaagttaagaaaatatataaataaacatattatttttttttggttgtttttttgtatttttgaactaatttctaatattaatgatgaccaataataatatttttttctctcttttaaaaaaaatattacagtcttttcttttgataaaaattaaactaattaattaggatcttttttctttgaactttgacttatatcaaattatatctttgaacttttttgaccgttaaaaatttattagagctttcttattaaaattagacaaaagtccttaaatcgaacaatcgcaatagttcaagaagaacttttaacgctcttcaaaattcaagggacataatttcgtacatgtcaaaattcgaaaagtaaaaatttaaattagcctaaaaattatagttcactgctcatcaaatgagtcaacagcaaagttgggaaagaagatagtttccttaactgctggttatagaaatttataaataattaaatatagttagaagatttatatatattttaatttaagtattttttttttattttttatggagataatatgtttattgtatagaaatgaatttaaaataggttaactaggatttttacctctaaattttgacatgtatcaaatcatgttctttgaattttttagccgttaaaaatttccctgaactattaagattgttggatttaagcgcttttgtccaattttattcaattttactagttcggtgattgtttatgtactaaatcatgcttcctaaattttgatatctaccaaatcatacccttcaaactttgacatatgcaaaatcatgtcctgaactttcatccatgttagaattttcttactaagattggacaaacgtctttaaatacaacaatctcaatagttcgatagatttttaacgactttaaaatttcagaggacataatttgttacatttaaagttcgagggataaagattctaattaacctttaaaataataataataaaagtatttgcatgcatgtgatcctatccatgttttgtgcaaatcatcacaaacaaacgtatataatcttcttaagcaaccatatcatatcattgtttgtttatttgtagttttataattttggtatactaattttagatacttagctagaacacaacgacattcactcactcctttcaattttcagaatatcgtttttcctttttttttaatgaacagaaaactatcgttttccttttatccacctatacattcaaaagcaatcaaacttttaaaaaaaatccaaaacttaatgatttgtcaaaggttttaatgtgaatgatattaaatatttcctagtaataatccatatatatataaaaaatcttaataataatgaatgtcaaaatattagaatatcacaattgaaacatactaaatttatgtataaaaaataaactattaaccataatatcaaatcccaaactggaaaatttgttgattttggataaaaacgtttatattttttatcagtattttattatatcaacgacaagtggcgaacagccaatggtgttaccattcatgtggtcataaaagcattaaaaaaattgagaattttgctctatttttttatttctttttaaataaaaataaataaatattaaattttaaagtggaccccacaaacgaacaaaaggcccaatataattccctgaaatgttttttggttgaaagtctaaattagattgaaaccaaagaaaaaaataacagtaggaaagagaaaatggatagggtgtattcagtggacgaaatctccgactggccgcctccgccgtcttcttccacctctggcgatgaaggtttgaagatgaaccgcagcgcatcggaatgggccttccagaggtttcttcaagaaacatcgggatcagtcacctctttacaaccacaaccacaatctcaaccaccactgccaccactacctcctccgccttctttttcggccgctgaagaaaacgacgtcgttgaggtcaaggcaaaagataatctgaaaccatctggggctccgttgtcctcttcctgtattccggtggactcggaggactaccaggcttttctcaagagcaagcttaatctcgcatgcgctgccgtcgctatgtctcgggtaaatctctagctcttgttttattgtttcttacttttgggtttttgttactgaagataaatgcatgtttttgaggtcgtttttggctgctgacaggtattatgccaaaataatcttttgtcttattgtgattattggtataaatgtttgttccactggttttagccaatgggaatattagttggaagatttttttttctttttttctcactatccaaacagaaccgagcttaagatttgttttacattttttgatttatatgagattggctagagttttagtttttctttgctctttgtttgtttatgcgtaaacgtttgtgtataagtttcttgtgattcctattcggtcaaggcaacctaaggtaaaagaaatagaaaattgttatcacaaatttttgttgtggactttgggggggccgtttataagtaataggaaaagtcaaattgtttaaaataaaggaggaatgttcttgaagagaagaaaggagtagaactgtgtcaagagcaatgtttatatttgatgactatgaatcatttcataacttcatatatcaggcatccagcacttgacacattttgaggtcctctaagaaagaaagaatgaaaaaaaatttggggttgagatttgggatttagtaagtctactatctggtttttaaatagtgatatgaatctatgaccgtgttttctttccacgtaaatatctgttattcattttacgattcatagggaggtttgggaaatgttcaagattcggctacttcagctgactgtggatcaattacctcagtaactcaagctccttcaaaaggtatgtttcagtctattatgttgcattgtaatgcacattattgcatcaagtttaataaagggagagcagacatgtctcttagtcataaacttagtatttatcactagtctagataatgctaactatgcaatagattacgtgtttagttgtactccacttttgatttaacaatgtactgtcagaattcggaatatgatatttgtttcttatctgttatctatgtatgtaggagctgggtatgatttgtccaggtctcaagacaaggatgctaatggatcacatggatctccaaccttgaatatacataagagttctgtggtttcattacggccagcaactagtggttcatcaagagaacactcagatgacgacgaacttgaaggagagactgaaatcactgaaaatatggatcctgctgatgtgaaacgcgtaaggaggtaactattctgtgtttttactattaaatcatgcgttttggcacttaaattgtttaccttcaccaagcaactatattgtgcttgctcctcaaatgaatatcatctgccaaaatgactcatttaatcaacatgtttaatgaaaaatatgatgacaatgttctggtattccaggaaaaaatgatcaaatatatttgtctagtaaatttccttaagactaggtaataaccaaaaaaatttgctgttggaagcaattttggtgaccaatctttggatgtggtattttgtcatttagcaaggtaactgactcaaaatgtgtcctttctgccaatgtttatttaagatttgacatagctaggctttctatcttctcaatgaataaatatccttgtgacggtttcttttcttctccggaaggagatattcggacttcagagtgtagtatgataaaacaacttactaattttactgcctgtttgcatagatcattattctgggttgcacattttatgcagttgagatctaaagtgagcatatacagagccattcatctatcgagtctatttagtcacaatgttgtatggtcgttgtttctttcttttcagaatgctttccaatagggagtcagctagacgctcaagaagaagaaaacaagcacatttgactgagcttgaaacacaggttcttttatcaacctttctcattacactctaatcgtcttctttcctttttgatggtatattataccttctttgttattgtatttatgctgctactcttcaggttgctcaattaagagttgaaaactctacgctattgaagcgcctaactgatgtaagccaaaagtacaatgaagcagctgttgacaatagagttctcaaagctgatgttgaaacactgagagcaaaggtaagcaattcattggtcatactctaatattattgtcattattggtcatgtatgttgcagtccaagatgagcaaaaagttatgatatatattaccaggtaaagatggctgaggagatggtaaaaagaataactggatcaaacctgttcaacacaatgtctgaaatatcctcaatggacatgccatcatttgatggaagcccttcagacacatctaccgatgcagctgttccggttcaagaaaaccgaaatcatcagttctacgaatctagtcatccagtaactactcctcaggacactaaagcaaacaacaatggctcagcagaaatccctgctgcagttgaaaaggggcaacaacagaggtcaacagcagggggcaaaatgggacgaacaccatcgatgcagcgagtggcgagcttggagcatctgcagaagaggattcgtggatgagtaagagggccccctcaccccaatggagagcagcagcagtagggactggggagcacaactgagcaagtaagccggagggaactagaagaagaattattggaagtatttttgagtgctgcttctgtggcatactaattttggccaaaactatgtaaataaaaaatgaatataaaagagacaaaattcattagcttgattgacagtattatgaattggactgataattattgctacccttgataaataatttaattcacataatcatccaatttttcaatggcatgaccatgtttgtttcatgtgtttcaagctagtaattgataaaattaaaagtacttgatttttattaatttctagtgtaac

SEQ ID NO: 18169 - DNA, 3372 bp, Cannabis sativa
tttgatgcttggattcgattatttcatacattcctatattctttccttttttgtggtagtttttatttcattttatttcttttctgtcactttgtcttagtatgttctgttgctgttatggaagatatatgtgaacagaaagacatggatttaggagtgcaaggattttgataagataaacggagattggaattctcgtttaggttgtactgtcagttattatcaaaagaccaataaaagcaagaaagtcatccctagatgattataattaaccattaatgaaatcttaatttctttttccatatatttagatggtgagctgaaattatcagctgtactattgtaactatgcatcctttgcttgcttgcatttttcagatgttgatttacatattcaatatgtgcactttgtactgtccatagaaaaaggtcttcgggcttccatatgtatgtgattccaaattactatctttcaattcatttctgcagtaaattgaagcttgaggacaatgtagcaaatatctggccagaatttcaatcgaatggaaaagatctcataaaggtttattaaatgtttatatacttgttccatctgtcatttcagttgtttgtttcttttgtcttttatcagtgttttttttattccttttccgctaggtacaccatgtgcttaatcacacatctggtctgcacaatgccatggcagatgctactaaagaaaaccccctactgttttctgattggaatgaatgtctgaatcgcattgctatggcagtccctgaaactgaacctggccaggagcagttgtaccactatctatcttttggctggttatgtggtggaattattgaggtaaaattatttgcttttttcagatcattgcatttgacttctcagtttattagaactatatcttgttgtgaacttgagaaacaaatcaattagtcaatgttacctgatttaggaatttatgatgctttgctttcaattgacttctatttatgtgggtatatatgattatttagagttctggtgaagtttattatggtgttctgttctaaatttaatgcttattaacataaaagcacaacaccactccaggttacttggagagttttgttaccatctttttatcaagatgcacatctgcacgtctatttccattttaatgcttcgtctctttcttacttcggaaacactgttttatatattaagactccatcaatgacatagcttgttgaattgggcactcttatatccaaatctaaagtctttaaggtgatattaaaataatctctattttagagtttcactaatcattctttgttggaatctggttggtagtagtaataatctcggagtctggtgagtagtagtaataatctgttctcattcccactttccaagttctaattatgaattcatggtgaacagcatgcatctgggagaaaatttcaggagattcttgaagaagccattgttcaaccccttcagatcgaaggagaactatatattggaattcctccaggcaagtgtgtcaaatgcacatcgttttcatgataatgatcacgcattcatattttcctcatttgactttatctgaaaattccttttacaaaattcactttgttggtggttgtacgaaatcagctaagcctggctcttatttgaatcaaaatgttagaatactgtccgaggaacgggggacaaggcttagaatttaaagtcctgcatttacacatttcaatgtttgatcagacatactaatttactaaagaggagtgttgaagtattagccaacctcttaccttacccgtgcaacgtttttcatccacaggtgtggaatctcgccttgcagcacttacagtagatataaatgatttaaacaatctttctgggtttagcagtcgtacagacttgccatcatcatttcaaccaggcaacattgctcaacttgcagtctcatttccggccttattcaacatgcttcatactcgacgagctatcatacctgctgctaatggacattgctcagcgcgtgcacttgcaaggtattacgcagcgttagtcgacgatggtgtggttccacctccacattcctcttcttctatgccaccacttggtagccacccgcacatccctaaatttccccccgtgaagtcatccaaaaagcataaagctagcagaaaggaggtagctgctacttcaaagaccaaacacactgacaacatgcaaaacccaaattgtaggaaagaagactctgatggtggtaaccattgtagatatcctagtattgatagtaatgtggggcttgttggtgaaagtagcagtagcaaccgaaatgacacaaatacgaccgacagtagtggaagaaagagtcctccaagtaacagtaataagatttttagtaaccccagaattcatgatgcattcatgggtgttggtgtgtatgggaaattggccaagccagatgggaagtttggattggggtttaagaggtacaatgcaaaggatggttcggttatcgggtttgggcactctggaatgggtggatcaactggatattgtgatgtgaagaataggtttgctattgctgtgaccttgaacaaaatgtcatttggtgctgtgactgccagaatcattaatcttgtttgctcagagttgaatatcccaacgccagaggattattcaaagttaacagagattggatccgatacacaactaaattttggtacgcctttgattaattgagaaactggactatagtctttctaatcatcatttttcccttcctcatatctcaaaagaaaaatgataagatattgagtaaaacacgcataatttacacacaaacatgagacacacccatgtggtaagttactttaataggtgtgatccatcttataaagatattggttgaagttacttgccacataagtgtgtaaagtttgtgtatgaattatgtgtgtacataccattacattactctaagataattacttggcctctacactttatagttttatgtatacaaagtacacacaaatatagacacatttgtattattttatgcacacaagtgaagtgaacaatattcaagtcaattaagaaatcatatccttgtttactatttattgtctggaaaaagatttgtctagattcactttttcggtttttggcactttcttttgggtttgcttttatttttgtctcgggttcgtttgaaacgtcgtattaagtcgtattgtattgtattgtattttttttttagttaaagtattgtattgtattgtattatatggtcctatgacagtccgaccatcggaccatcagtcccattgttttttcttttttttttttttggttttcggt

SEQ ID NO: 18170 - DNA, 5306 bp, Cannabis sativa
atcatgcatgtttcattcttgctgttgccattgtatctcttgacttggatgggattaatttcatttcatcaaatgatgttaagtcccaatcactcagagctataatttctcccctatacaactttgaaatttattgttgtgattactatctcggtcatttaggtttcatttatcattgttgtgtacacgtacgaacatgttagcacaaaggaaaggttgtaaagtgcccgaatagattgaagttgagcttttgccattgtcttagaaatttgtaatttagagtcttaagaagattggcggttgtggttgaatatgagaaaattattggatggatccattaagcttgttggagttgtgaaaaatgcaaccattagatggattgtattactatggtagctaatgctacggttgaataatcagtactatagcaggttgccaggtgttgtatatagcagccagcgttgtgatttgctcataaagttcttttcgaattagttcttcacttttggcctgattagctagttcatcttaatcatggtaagccttttttcttcaatcttaggaaatttaggctatgtttgaagaaaaagaaaaaaaaaaaaaaggaaaatgtagggaaaaaaacgtggataataaaaaaaaaataatttttcatttgaatcaaaactttttctatacaatttttctttaaataccaaacatgagaatttattgttttatatttttcactttttgttcttattttttttttcttcaccaaaatttaacttctaagggcttgttagaattacaagtctattaggtatctgttatgtaaaagttttactctcactttcctaaggcatgctgtcctgtattctctgttttctagtaatacgtgacttgggcatgttgttctatgaatagaaaattcaagtgagaagtggttcactttcaatctaattatcttctatcatatttaattcactgtaaaaaattaataaataactaaataaaaatagaatattaacagatcctaaataggtacacgttgacttcacaccgaatagccgcccaaactatgatagcgccatttcaacggctacattattattattataaatggaaacaggaagagtcagtcgcaggaggtctctttcattccatcatcactacgctgtggttttggtactacctcaacctctctaaattttctattacaacattacagagaaagacaataataaaagttccaaaactaattgaaaattttcttaacagcgagaccttaaaatttagcattattaactacatttttgacccaataaagttactttcttttaccttaaagaaaacgacaattttatggcatgacgaatcttaaaagaaccgaaagccatagattcccataaatatatatttaaatttatattgaccacagccacctgttacaataagaaaaatacttgtgacgtctaatttttgtacatatgattctttatgccatacttttttttttttggttagctcagacacacaaggtttgggttaaagtgaagtgaattgagagtttatcctttcgttggttttggtttttgattgagaaaataactatgtttttctgactaggaaaaaaaaatgttttgttgatacttgggtttgaagttttggtgaaagtttgactgagagtttgggattgatatttgtttgttcttgagttgattttctatttgtcttgttcattagagatttgggtttatgttgatagttcttccatggtctttcaaaagcttagtgttcttttaatttgttgtgtcttggaaagtttttatggtcaaatggtggaacaaagggagcacagtgagtaattatcttgtaaaagggagaaagtagttagcagaaagcttcttccagttttctccctttcttcaaaatcaaggaaaaaagagtttcttggaaatggaaggaagagagcttccagagttatataggaacaccagtgaggagatatttctaagatcttatatggagagttcagtgggaccttctgttccatccattgatgtcctggggtttaggaatctatctcaaaactttcggaccgatagtgaggagcttttcaaaagttggctaacaaatggagaggcaagcatctgtttcatttttgttgattaactttaattttcaatttacttttggatgtttttaaaaggaagattattatattcagtgctcattatcaaaatcttgtgctgtccttaaatgaaacatggaataaactattctcatcaatcttatcccttctatgagtctctttatttggcagactatgagagaactacaagctattattaaatgcatcttactgtcttcattgtaaagtatgagcttaattatgatataattcttctgatactcatattagtttctttcttatagggatattgttgtttgcataaattgttaatccattgcatggttgctgctcaatgattttcttttacataatgtttaaaaaaagaaaaaaacacagttcagtttctcttacttgtttattatatttaactcttttttccctctcctttccattttgaatttttagaagacaagaaaatttactctaatttaaaacttaagacaaagttagatgtagactcttaagtgatttgcatattttctccagcatggagatggtctaggcttcacatttattaatctatgtaaccaagttaaaccgatcagaagcaatttatggaaagcaaagcagtcgattttattttgattcaacatgtctggtttacgaaattcatcacacagtttgaaaccccataaacactaggcagaattatttgttatgtggctctatcaaggggatgtcgatactgtgtttcttcatttagtttaaaaatagtaacatgaaaagggcattagttttgtgaacactcaattctattacttatctactcatgcctttttcatgttagtctttttaatatttctagttcatttctttctgcttcctaatatttctccacttccagaataattccttcaacacgtccggtatagcacatcgtactcgacaagcatcgcgaaggtgagtaattcaagttgttttagccttttatatatatatctacttctatagtttgatcatcttatttcttatgctgataagattttaaatctcttgtatctttttttcaattattataaaaatgtaataaagaagtggtgagtgaagatgatccactgtgaacttgcttgcaatatacaacagtaataattataataacttcttcaatattattactggaggagaagttaacatcaggcatccataatgttctgaagctatttagatgattttggaaacaactagttacctttagctgattggcatcccataatgttctcattgagcagtttaagacagaaattttgcagattgcttgttcactagatacttttacataatattttagcataatacatttgcaggatatccactgaaatatccaatttgaccggtcagcaacatgttggtatgctccaaaagaaaagaagcaatgacattatatatcctcaaaattatgcctcagctgatgatacttctggcagtgtcaatcatcactcaatcaggtttttactgctcccattgaatctcgtgcaatgcgagacatacacccacttgttcattgcctaaaacagtttatacggttcttattccaatagggtactcatcgtttatctgctagcttgtttttccaatcattaatattattatttttcttttcaggaatgcagttgaaaagggattacatggtagtgagttgtatctggctaaggtttgtcttgtgttgagaggttgtctaagtttttactaaaaccacatcgtctctttttctaactattcacgtctgtgtaggcttggtttcatagttctcaacccatgacaagaagtcgatcctctgaattgcggtatagtatttttttttccaataattgtataaatcaatagtaataggaatactatataacttgcacatattctgttttcacttgagttttctagttgcattgaataacattgtgttacttttctgtttcgtgcaggaggaagtatgctgcaacgcaaagtttccaatcaacagttggtcttgaagtgctacaccatgcttctgcacaaggcatcaacacaatggatcaatattatccaaatggattcattggctcctcagcttgtgagatacccaaccaaatggatacttttatgtctccatctaattcttcctcctctacttttaacaacccaccagttggtgagattgataaagtgacttctgtcgtaaacatgcttaagggaacattagaacgtaagaagctcaacaaccatatcgaaaaagaaattgttgaagatgatagttgcaacgagatttttcctgctcgagaattcaccttcaatgtgaacttcagtcaagaacaaaggaaccagattaatgagaaaccctttaattttcatgatgtatcccctgatcaagtcaaggatttcggagttgtacaaataattgatggatcaatgaatcttgatttggaaggttttgtaaattctacaaatccgattcaatcaagccgaggttcccaagaaccttctcaaagtgaatcttctcaagctgcaccagtaatttcatctggtttcgatgcgtgtgatggtcccagtaactctggtcaagctataagtgtttctgagacctcaaggaaacaatctacaaatcgaagttcagaaaatggttctagagccaaaggtatataactgaaacaataacactgtatcaattatgcaatattttgaacctcctccaagtaaaataatagattcatcatagtcttcatgcatagctcattcctgaagtgttatgtttaaggctcaaaaagaagtacttcacagaactatctcagtcaatcaagggggacatatttcttatgccatggttcaaatgttatttcagaagtctcaaattagttacttttcttccatttccctgactttttaatattaggatttttctaatgtaacaaatcttcttgtggaaatgtagatctcagggaacggatcattggtaatttgaaagatgatcgaaaggtacacttttttctaggattagtgaatgcagtatttaaaatacttaaaaaacattctgtgaatgttcaaacattttacctatttttagtattcactcttttcccggtacatttctcagaggggaagccttcgtcgacatggatctgtgacatctgctatttcaggtaactaagcacgatcatgg

SEQ ID NO: 18171 - DNA, 4900 bp, Cannabis sativa
ctctttccagcggttaggggacctccattctcctttttgacttagagtttgatgtgggggctacttgctggatttattatcttttagatgagtgaagttctccaagatcttcacaatcacgatttcttcgggttcgacgaggaaattctcaagcttcaccaagtcaatcctatgtcaacccctactgccactggtgcaaagtcttctaagaaagggccagagaagttggccaccttggaggaaattatgaagggtctgcttgcttacaaaaaggtcttgccgttccaatggctgtgaagctgacaaactctacttgatgcaaacttgtgcccaccagctagagaagatagtgatcgtggcttggattaagccatctagctccggggtttatcaccatctcccaaggaatgaggagacgccaaaccgtaactataatggttttggagcctagagccaaacccatcttatgtccggggccatgctacatctccaagattacttcattaattttctagtttttgttgaaatttcaccataccagctgatacctcaagcctactgcctgtattcaggcctttttatcttttatgccgccaagggttaggccgcccccagccctgctgaaattttatatttctatgaactactttccgtccctaaaaagggggacaagtttaaagacagtttttataaattacagggtcacccgaccaacaagaccctggtaccctttaattttcaaaagaacattaaagaatattgccataggtttttcttttcctccgatttcaaagcttttgagcatctggacctattgacgaattgggtcaggatccctccgatgcaccgtactgcccccaccccacttttccagaaccacgcacaagtgtttgccggttataagaaagaagatttaaatgtggatgacttgatgacgactgataattgctggagggccaaattgatcttggagagtcaatccgttgacgactttaacctgtccaaggtcatttgtcccaatgcctagaaccccgggaatgggaaggtgcttagggtcgacattatttcatccactgaggaaaaatacaacaagtataggtataagaggagtaggagctcgcctatgctttcctccaagagggtcactcgggaggaggcagggaaagagaagacacaggtcaggcccaaattcttgttcccagttccaaactctagggtccccggtgccagtacctctagagcatgtaagtgtcatttgaatattcactttgttccttcagtttaggattatgctaacttaaggctagtagaatttgacatgagattgtatagattccagatgcctcattttcggtggggcaataatgccaagagtttttatttcttcaatttaagtcatttcttgggtcggtctcggatgggctctggtcctcctattccaatccctttggaccactcctcttacatgacctgaagttggtttctgtcgtcagatgaatttgctagggcagaatttgatcattagggtaggattagccttggttgcattatacttgcatttgtaattctttagtgctattctatctttctatttactttgaacaataaaacccatggaaacctgcttgccattctggcccacacccgtagccgtgagttggagatgccagagcatcctcgagcaaatgtgacttcaggggcacctaccaaggaagttactgggaacaaggaggtggttctcattcaggaagaggaagaagaagttcctccactcgaccaaaaataaaagggtgttgtatctgagtctgagtcttccaagaagcttaagcgagtaaccaccctcagtcccaacactgactccgggatcctagctaaagctgatgactttcctgcccctccaagcattctttcgacccccgctcatcctgacgaggagagggtccagcttcgtatcgccaaacacaattacgcggtggatgaactgtccaagggtgatggtgaggttgagaccttgaagaagtggctaaggaaggctcaaggtgggcccttccgaggtgagtataccaaggagatataggacttgagtctcgatcccatgaccgactattttaaccattttgtgggtcgaagcctggcaccgttcgcctccgagatggtaagtcactttacagatgacttgacccagcttcccataatgaggtatgtggccttcgcttcctcttaccccatctatcaaatccaggatatgagtgttgccataactcagtaagtattttttttcaaggccctccttgttaatcttactttttgaagtcctaaccttgtttctctttgttgccagattgctgcagaggccgaccggctttccgagaccttgatcgaccaagggttcaccattttggagttgggtggcatggacagggtcatgaggaagctcagggtttcagaggatcagatggagaccctatgcaacgatgctctagcagagaagactctcatggagcgggaccaccaagaggagctaaaggttaaagatgatattattgcctcaggcaggaaggacctccaagacgctcgagagtatatccaggaactctctgtgaagctcatgtctcttgaagagttacatcagactgacttggaaactaccgccaacatgtctgttgaactcaaggagttgtgtgagttatgggagcagacccaaaaggaagtcaccaaggctgcgagggaggctttattagctttagtgacctgcaagtactacgagaagcgctttaaggacagagttttaatgtgctggaaatcaaacaagttcaaacctcgtctccactttctgcttgatcttgaggctaccgcgacccagttttgggaaaagaacaagaagctggaggcagtcttggccgagcaaaggggtccccatcttccaccatgaatcaattgattaagtccccccttttttgtcattttgcttacttctgccccctcaggacaatattttaatttttagtttttattatctttattctgttaggggagacatctttatggcccaacctgggccttttattattatgtctttgacaacttatatttcaagttctttatctatttgctttttttttactgtctgcgtgtgtgttatgcctcagtaccccgtaagtgacttaaaaaattattttttgggtcacttaacttaaatttatgtgggataatgcgtatactttgtccgcgacaagttaacttacagagtaaagatgaatttgaatactgagctcctaactattggtagtatttttggagatggtcagcactccaagctcgaggcactatgggtccgtccatttactttagtttataggtctcgaagcctatttcatcttcaacttcatacaggccttcccaattttgtctgagtaccccaactcctagttcctgggtggccagaaatacccttcttaagaccaatcaccaatggaaaattcctatttttgactttggatttaaaatattttgccactttattttggtacgctgccatgcgtatttgagattcctcccagaggtcatctactaagtccagtgcttcttgtaacaaggtttggttcgttgctggatcgtaagtggttctcctgtgggaggggattatagcctctaccgggaccatggcttcgcacccatacaccattgagaatggggagtgcccagttgtagttcttgcagtggtccggtaggaccataatatgcatgggaactcttcaggctaattgtttttacagtccaagaattttttctatagggtaaccttaagtattttattgacagcttcctcctgtccatttgtttgtggcctcgcaagcgcggagaaactcttgatgacttcgtgttggttgcagaagtctgtgaactcatcataatcgaattattttccattctctgagactatcttgtgaggcaatccatgtcgacattcaatgttctttgtggtaaagtccacggctttcttggcagttatagtcttcatagattcagcctctgcccatttcgtgtagtaatacactgccactattgcatacttaaccctacctttcctcttaggcaaagacccaatgagttctattccccacaccgtgaagggccatgggctagtcattaaggtgattttgttaagcggggatcttgggatatttgcaaatctctagcatggatcgcatttgaggacctagtctatatagtctttcttcatggtgggcctgaaatacccttgccttaaaattttctttgaaaggctcggcccttcggtgtggtctccatagaatccctcgtggacttcttgtacaatccctctagcttcaagatctgacacgcaccttaaatacggcatgctaagcccccttcgatagaggataccatccatcattaagtatcggtgagcttggtgttgtaattttttggacatagtcctttcttaaggtagttctcccgttgttatgtacttgatgatggggtccatccagcttgacccttgttcattagtggccacttcctcttttgacctaatgctaggcttcgtgaggtattcaacaggtaccacccctagcttttccacctcgttgtttgaggctaacttagctagataatttgcatgggaatttctttctcgtgggattcgaacaatcttatattccttgaattcttgcaataatttgcttacaactaacacgtaagcgaccatcttttccactcgaatttgatattctctcaatacctgattgacaaccagttgtgaatcactgtatacctctaccttgttggctcctacagccttacgcaattttaatcttgctttcagggcttcatactcagcctcgttattagaagtcagaaatgtgaaccttagggc

SEQ ID NO: 18172 - DNA, 5663 bp, Cannabis sativa
  modified_base (2346)..(2347): a, c, t, g, unknown or other
acaaaaattacaatttattatgactaaatgtatttttagtcataatacttattgtgactaaaactaaattagtgacaactggtaactagatactatgttttagccacaagtagcattttgttgtgactaaacgtcacatttagtcacaaaaaaatatattgtgattaaaaatttatcactaaaagtagcagttttttgtagtgtactacaaaaatcacatttagcatcagttcacaaccgacacacatagtcattttgcattggttggcataaccaacagcaactgagtacccgatttcaaatttgacaaatgagccttgagttcgaggttgaaccacggccagatcatcttccttctgttcttgacagattgtcagaagaagcacctcgtccttggggaagagaaggtctaaaatcaccatttcttgatgcaccagtagcaagattggcctgcatcttgagtgtgatgtcagaaactatgtgatgatgatcaagacgactttcatgagccattaacaaagcctgcacttcttcaagagtcaattcatcacttcttgatgttattcgtgaaactacaagatcatattcgagacctaatccatttaacaattggaggataatgtcttgattttcaacattcgagcctgctatggagattgagtcagatagcatctgaactttgtcaacataatccgagatggataaaaaacctttctaaatgtgagaaaatcgacctttgagttgaagaagtcgagcacgagattggcttgtaaatttctgttcaagagctttccagacagagtaggaactggtgtagttggcaacggaggcaagaactcctttagtcattgatgatcttagccatgataagagcagctgatctctctttttcctcatcaagaatttgggtgtttggggcaccagtaacaagaaattcaggggaaggaactcccgtgaagagtatgtcgtcgaggtcatgttcgatgaccgtgggaaccacctgtgatttccatgtgaggtaattcgcgcgatcaagtctgacagtcagagatgtagtgagagagttggagaaaggattccaattcgtcggagcatgagcttgaattggagcagtaggttaagttagatcagttggaataccaaagtgatttgtagtggaagccatggatgacgctagtcagctacaattgataccatgtgaagctttaacaatggtagaaagaaaaacaagaaaaagagaagagaaacaaagcctttagaaaaacaaaataccaagaaaagcttaaccattacggttagcttgagaccattttatttatactgcaatattgttcaatacaggaaaataacagaaatagcaactaactaacttacttgttaactaactaaactaactgataaaactaacagttgtatcgttaacagttcacaaccgacacacatatatatactcattttgcattggttggcataaccaacgtatatgctagagatgcaaaatgagataatttttgcgtcgattactaaccgtcggaacttggtcgcttgtgatcagtgattttatcgacacaaacaatgcaaaatgttgcatactaacgcaactaaaaaaataaatctaggtacacaaacaattctggtcgatcatacttatattcattccaagccaaacaatatttcaaatccaaatctattacaataatatacatttcagatctcagattatatatatttaatttacatacacaaataaatataaatatatatttatatataatgagagttatataaaggataaccaaagagatcgaaacacacctgcaaaaaaactgagtaagatctgagatgcactactaaaaaaagtggcattcccacctatttataaaaaatgagtacttttacagtcagtttgtaagacacctatgtcaccaacacaaaataatgcagttttggcgtccgtttataacagtcgttatccaaaacttgtgaccattctcaaccgacaccgatcactacaaaatcaattttatcctcttttgttgttggtttattattgacaacaataaaaaaattaaaatctgagccacacaagcctatatttgctctgataaaaaaatcaattaatcattaatatacataaaatattattcaatacacaacagatatacgaaaaattatagcatcaatatacaatccacaaaaaatcaaaaagaaaacaaaacacccacgaacgcgagatcatcaacgaaccgaagaacacttgcaaaagaaaaatgattgggacaaagatcccaccgtgagagaaagagagaggaagatcaggtacatcatgagagagagagagagagnnagagagagagagagagagattgtggtaacgtacctcttcatcggcaatggtatcccgcttgaagatcgggatgacgacaatgaatgcttggttggtgattcacgaaggcttgaacgattgatgctgaaatgtataagaatttttctttcctaacttatttttttaggttaacttgtaattagatttattaatttgttaacacttatactaattttaaaatattggtgtaatataattgtaagtttttttaattgcttctattaatttaagtatattgactaatcataaaattaatttaaataatatttaatttagctttaaaaaagtaatatttaatttaaattaaataatatttattgtaaattaataactatataatttaaataaattaaatttatgaatttataataggttttaaattggaaaaataaattaattattaagaatttggggtcggtttttaatcctttgacgtcggttatatattaggacatatggcatcgtttattagtacacaactgacgccatattgtatatatagggtacactttagcgttagttatgcttgacctatagagttaatttgcctggatcaacgtcggtagtgaatttctccaaaattgacgctaaaaggctttaaaaactatctctaaagcataaatttgtagtagtatcaattatttttccaccctattaagatcttttattaaacaatatcataatacataattacttaaggaataacaattattcatattgttttatggttcaagtgtttagtggcattatctttgcaggtattatcttctcttagaaaaaaaacaaaaaaacactatcaacaagatgtatacaacactatcataccccaccatgttcttagactttacttgagactgttaacatacaacctaaaacatatacaaattataacaatcataatatatatatatatcaattcacttaattcatggtgtttctaaaatcatacactctcagtatcatatatacatattcataataataaatcataaattatattctaatatatatacaatgaattcaaatttatgcagataataaacacatacaaaactacctaatttcattaccttaaataaagtctttgttatctcatcacttctccttagtaagacagataaaatctctaacattaaaattcgtactcttacaggacaacaaaaaaaatataatctctaactaagaactacacagatttagtgaaaattatcttcataaaattatagataattttattgtatttctaacaatatgaagtttgataaaaaaaaatatattaaaattgagggagttatagttttaccaaaataatttttgggaaagaatatagaagtagccaaattaaataggagagagcgaacatataaagttttgatataaaaatattgtgaaccagggaatattcacttctttcaagttttagaaaattgatttccctttcaaatgataataaaatctttagaatcaaacttatattcagagcgatgttacaattttactacgatcaagagacattggatgatggtaacggattatatgagagtaaggagtgccataaatttggcgaagagtataatagtaaggttgaagatgatttaaggtttagaatgagaatagaacgatataacttttagggttgtttgacttaattcttattagatttatttttttgaataataataataataatatattagagtgaaaacatatattccgaaaacatctgtttggtcaaatatattgggtttgtgaaattgggcgtgtagaagtcatcatcatcatcatcttatcttgatttatacatctatatatcgatcgatatatatatttctgatttttatttttatttattaatttaatattattagtttaattgcaattaatagttttatggggttagaattataaggagttcattccttaattaattttaatgctgtgatcgtatttttgtgtcgaaactaatttaatgtttcccataattagtcttgtcttttgacatggttcgttagtcttttctttttaattttcgcatttgacatggttttttagtcttttccttttagttttttcttatttcgagtcttgtcttttggctgggatgtgtagctcagaatcatcatggtgctatggtagaagcatgggaagattggatgtgttcaacccgaaattactgagataataggcattaaagaagcattgagttagattgcaacacattcgtggaatagagtcatgttagaaacagacagcttggtgtgtgtccaagcgagctttcatttttcactattgttgcagccctaccaataactattttaccagctagatagtaaatcccatttctgagatttcctttcatcaccactgtagagttttttagaactctaagtgagctattagtcttgatgctgcaacctttaagtgttagtgcattaataaataacaaaattttttgaggttagggacatacctcacatctctaatggttctttctgatttattgttcattttaatcagcacagaaccaattcaagcaatcttgtaggctttgttatcagttaacaagactgaacaactgtcttgttttactgcaaaataaatgtttattaggggtcatatgaaaagaacaacctgagtctaggatccactcaccaccagtggcttgacttgatgcaacaagaacattagcagactatatccatcaagaacacaacctgcatctccagaatctttgttattttctttgttgagttttgctttgagagccctgcactcatctctgaaatgatcctccttcttgcaatagtagcattgttttcctgtctttgagtttgtgctggaatttgatcttggtctgtgaccattgctactcccttcgaatggttaattacccttgttgcttgactggtgattgccattcttggtatccttggactctcatttgcttattccaaacattcctacaccatcgctgtccaatctttcttataatttcttcttaatttcctttaaattaagaatagctttaaactctgacattttcaaggtttctttcccatatagtatgaaatccacaaaatgttcataacatttttacagggagcttgataatagaatcccttgatcctcatccttgatcttgatactaatgttgctgagataaagaatgattctgttgaattcatcaagatagtttccgagattctttgtatcatccatctttaaggtatacaaacttcttcttcacgtagagtttatttgcaaagacttcttcaaa

SEQ ID NO: 18173 - DNA, 2644 bp, Cannabis sativa
  modified_base (38)..(59): a, c, t, g, unknown or other
  modified_base (1431)..(1438): a, c, t, g, unknown or other
cgctcttccgatcttttagggtgttaataaacatactnnnnnnnnnnnnnnnnnnnnnngtaaaataatttccaacatggaataccattagcatccaaacccaagtcaggagaggtcaaggagcatcccctccgttggtatccaaaccagccacagagaaagcaaaaaatagaaaaagtgcgaagagaaaacacgcacggggacagaccaacagaagcacgaaagagggatagccatttccctctaaattcgacctcaatagcctccataacagaccaaactagccagctccaccgcaaaacagagggaggccaacactaggaactaacccacaccagatgcaaaccaaaactcacaccctaatgagagccactctaagggaagagactacgagaaagacacgggggagaagaacctaatacaaaccctagacaaccaaaactcaacctacagaataacaaaaaagccccaagaaaccagacgaggatagaaagcgaaagatggcgagaagagaaaaagcaagcaagaaagagatggtgagaaagaaacaaaaagaaaagaaatgggaaaaagagaatgatgaatgaccattctccatgttacataacagtttctattttaatactattatagaacaggttctattttaattgtaactagtttaagttattttgtgttctttgtttttattcattatgttacaaaaccggttgtatttcaattataaccagtttgatctatttggttttattcattatgttatagaatcagatctatttttatttatatctgagacatctacttctggtgaattttctagtaaattttccgggaactgtgactttttcggccatagtgactttttcggtgacaataacttttctggtaactttttcggcacgtgcgacttttctggcgccggtgacttttccggcgaaagttattattacaagttttattaaatttatttattatttttttcaatattttaaactttaattattttttaatcccatatttttttgcattatttatttataccatataaaagtaaactctaccacattttctcatatttatggaaaaccccaaaaaataatgtagtagtacaatcaagttgtcaaaactaagtaagaaaatgagattattttcacaaatacacaaaataacaaaaaaattgcaaaactacggtttcacagaatttaaatatttttacgatttttttattttatttacggaaaatacggtccttttatgttgtactcttgataatttgttgttggttttttgttatatgtatgttatttttttgttgttgttttgatattatttagatgttattttcatgttacttttgtgtaattttcttattattttcgtgttgtttttataaaaaaccataaaactgtaaaaaaaattctttaaacgtannnnnnnnttttttttttttttacaaaatatggtaccttatgtaattatctctaagaaaattgtaatacaaaaacatattgaggaattgatattattttgcatattacaattaattatcttatttgtttttatcttgtttgttaagttgttctaatattattttttaggtgtcttatttggttttaagatattttttttattttattaaaatacagtatttttgtaatttaaaaattttaatacaatatttttgaaaatttaatacaataaaaatatttttaaaaaactaatagaaaaatgtaaaaataacaaaaaaaaaattgagtatttttgtaagataccgaaaaatggtatggagatatcttaataagggtatccaataaccgaagcccaatgctttttgggccagccatgctagacagttgattgagtaatccatataatatccttctgctcgagctagttggcgcgcgaatttattaagataagaaattgtaattttgagtttccatttatatgaaaatgaaaaaaaaaaaaaattaggggatatacatgtctaactaacctttaattaatgagcaactttcaataaattccagttaaaaaagaaaacaaaaaatcgagaaattccaaaccttacatttaatgcggggtagtgggtatgaaaacagactgtaaagtgtgttgtgcagagtgaaaaattaagagtacaccatacacttgtcttctgtgggatccacacacagatctccttcataagcaaagattgattcagattggctggtgtgactgtgaccactctttggcattctttttgaatagtcagaaccgtaatctccaaaatacaatacgctacataatagtataatcacagtaaaaaaaaatattcttatgagaaagttataattaaatagaaatacaccactcaaaataattaaaatagaaatacgttattcaaaaaaaataaataaatataataacaataataataataatcaatttttaatattctatcataataaaataaattttaaataaatataatatttctgcatacacaataatttaaaataaaattataattctatacaaataaatttataaactatacacgtatttttattaactagatagatgttatgtgtcaagtcacgtatgttaattttattttaatttttagtttttagaatttttttaatatcataattttaaa

SEQ ID NO: 18174 - DNA, 4386 bp, Cannabis sativa
ttaatttatcttttgggtttgaaatttgattgttttcgttaccagccgtccgatggaatgaaaaaagtgttgcatgggggtcaggtgacggacgatgaagctcagagtctcttgaaaaagtaagatctgcgatattttgaacatttctgctatgtgcttttttaatttactattttttaatgataaaatgccttatttatttattgactggtatttatttgtaaatggcttctattgaattagatctactaatgtatgtgtttttatttggggctatgagaagtgaaggagatatgtatgaagatgaagtaatagaacccacaactgggattgctttatttgattttgagctcagagaaatttcagctctgaaatacccacgaaataaaaacctcttaatttcaaattcttaagtttaagtgaaatttgtggcctttgtattatacccacgaaatgggggcagttgaattgataatttggtgagcattgcttctaaatttatggtagtatcttagaaaccatgctaacatttttttaaaaggattttagcttgatgttaaaagcaacgaggacaacgattttgattatgatgattttttttttccattaattaagccttgatatttcccaatctttgatccagagagtggcattgttttcattaacttttttttttgctgtgtttttatcagcttgttagtaaattttctactaaataattcaaatgtatgtttttatgaccagttcggtaataggaaattacattaaactgttagtgagtgagaaaataatgacaactaaaagttgccgaatttggatgccttgaacattctataatgagctattacaaaaaattttgattaacagtgaaaatattttggggatgaaactttttaatgtgcctcaggaatgaatgcttcgaaagtatgtgcagatttttttttttttttaattttcactttacttgtgctactttcaggaagccttgttcagggtataaaatgaaagagatgaatggaagtggtatattcactgacaatggtgatggtacccctcaatctgatgcttccaaatctggttcgaaaacagggctgcgagtgtatcaggtatttggatgaggtttctgaatttctttaaaaaaatcccttatcattgtcatggtggttgtgtaatctgttaataattgcattttcagcaaactgtgaacaaaatgagtcaaatatcattcagtgctgatgggagaatctcccccaagaagccaagctctatcccagaggttgccaagcaacgtgaactaagtggaaccttcctaagtgatgctgattcgaaggttaaaaagcaggtatcaagtgctaagaacaaggagcttactggacacgacatctttggccctcccccggaaatagtgcctcgttcagtggtatctgctcgtacccctgaatcaagagctagtaaagacatgggagaacctgcacctagaaatttacgaacatcggtcaaagtttcaaatgtgagtttgggagtatagtttctccaattcttctaatatctggacttaaagttatgttccttctaatttagtcccctagttttctgtcataaatataatatcataaactgaagtcatttcacttttcatcgacctagcctgctgggggtcagagcaatatcctgttcagtgaagaacctgttgtcaagactacgaagaaaatacacggacagaagtttgctgagttgaaaggaaacaacatatttaagggagatgttcctccgggatcagctgagaagccactgagcgtggccaagctcagggaaatgagcggcagcaacattttctccgatggaaaggcatcatctagagattatctaggtggtgttcgccaagccccaggtggtgatagcagcatttccttggtttgactctctaatcgctaacatgctgtgatacattagaatctatgcttgagcttgatcatgatcagcattccatctctaggagttgtgacatgtgagtgagtagtgataatcttagaaacttggcatggtatgtagattaaattgtgtgcactttaggataattgggaatttggggtttgcgttttgtgacggtgtgttttgatgctgttatttcaagttcgtttaccctttatccaggattgagtatgaataaaattgttatttacatttaaatttacacatctgactttttaggttatagttatcgtgaaagcactaagcattgatttagtaaagatcgttcaatttgtcctagatcaaatgtggcgtaatccattttggctggcttttttagattttcaaactttttagtggatcaaatgactagattgtttattgttattttgctcaaagatttcgaagtaagaaaaaatcatgttcaaaacgcaagaccatactgatttcacaaacaattaacttagctcaaactgccaattattaaataacaaaaggtccacaaacccatcacaaggcagataactatgacaaacaagacacttgtgataaaagcaacatggcagcaaaacgcatgcagtctgcacgccctcacaactagtctctactagaatctagatccagacaatgagttttaagcattgccgtgaccagtgagctcaataagaagtttctcataatctccagaagtgtctttggcaattgcagttgccaatggaacgctgttccttcgatggtattcctctttgatacgacacagatcaacctcagctctggtagtgataaccctagtaagggcccattcgtctgtcccaaccttgttgatggcttggcgcagaaccttctcaaagtacttctcaggggtggtcaagcaagtaattactgctctcagtaatttgaggtattcatctttcgaaccatcagccttcaaatcctgcaaatggatgcgttttggtattagttcgaagtttaaatagtaattcagattggttctggttgctgaaactcagactgtataattaatctatataaatgattcttgtaacagctgaaaatctctcataccttgctgatggagtttccataagaattgttgtagtgattgagggttgcattcagctgtgccttgctcctagtacagagaatcctgatgaaatcatcgtcattacaggccttatccgtgaccttttcacggagtatcttagcctctgcctttgccaatgttgtgttcacctcatctccctcatatcgcaatgtactcacgagaggcaacagaagctgtatttcaaacaataatgatatcaaatacaagtaattgatgaaaacaaaggtagagaaagcatcttctcatgcctctgtaagctaaatttgaaatcggcattactatcaatatacacatcaaagttgtgcatgttttgatgtcgccataaatatatagtacacaattactgagacacaaagcacaatcacagcttatttctgactttggaggtttatgccaaagggttgtacctttcggatgtctccatgtgtatgatgagcaacatcctcttcaatgcatctcttgtaacgatcattatatgccttccttacaagaatcagttcatgagtagatctagtagtggcaatttcgacaagaacccattggttagaggtgaacctctttgtggattcataggccaaatatgcatcacgctcagcaggttccattgtccatagaagtaaagccctctgagaaacattagaaaacaatcaatatcctttcagttatatagcatactcactcgcatctcgaaatgttctgtgtatcttagtaaagtatatatgtaatcttatacacacgaacatcaaaaactgacctggaagtcacctgaaatctcactgtctagtgctttcaaaaggtctttgccataagcatctgcataagcttgcctaatctgtgtgcgttgatgagcattcctgtgagccaatatggatatgattaaaccctcatttgtcccccatcctgtaagacacccaaatggaaaaaaggttattcaaggtcaaccaaaatattaggaatcaatctactcttaaatccctttgattaaatttctggaatgggaaattagactattatcttacagaatccgtttcaacaatttattcttaggagctatcaaagaaatgtcgatgatggcttattccaaatgcgttatcaaataatttgcgaagtgagctcaagaccgaatcaaaatcaagagaaagtagcaacataaacctttgttctattgctaagaaaattattgtgcattatgctttgaatgtggaaatgaaactcagattgactaagttacaataatcaataattctctttcttatacccccacacagatgtattactgcgatcgcttatgtactttacaaaggaaaaca

SEQ ID NO: 18175 - DNA, 4882 bp, Cannabis sativa
  modified_base (190)..(194): a, c, t, g, unknown or other
  modified_base (274)..(281): a, c, t, g, unknown or other
ttgataattaattataattaataaataaatatagtattattgaaagaagaataattagttgaaataaagtgccaaaattgtaactagaaactcgtccacttcatagccggccattaagtgaattttgcctaatatttttttcttttttaatcaatataatacaactgtaagccctagttgaaacactatnnnnngaacatgatgctctcactcatccacttgatgttcaacctaccaaaatctagttttcattctctgacaactagtagatgannnnnnnnttctatagtgatttcaaacctccttcattgttattcattcaatttgagcatatagtgtgaaagagtgtcatgcccacacatagcaagtcaagtactgaatcatagtgagtaggatggtggtaaccaacccgaaggagagaaagagatccaagctcagatcttgatagtactctgcaacaaatgtaaagttttctaatctcttgtgtgttttatttcattgttttagagacattcatatttaggatgttaatcaacataattgttagtaaatctagatcctagtaaaatattcccaacatttgaagcattcgttcaagtcctttatgcgggcccaacctttttagacttgaccaacatgtcacttacatatacttccatgttacgaccaataagatcttcgaacatcttatttacaagtctcttataagtatcccttgcattttttagtccaaaaggcataattttgtagcagtataggccaacgtccatcatgaaactcgtatgttctttgactggtggatacatttctatttggttataacctgtatacgaatctatgaagcttaggatctcatgaccagctgtatcatgtactagctagttgatccttagaagtgggagtagtcctttggacacgccttattcatgtcagtaaaatctatgcataccctccacttgttatttggttcaggtgccaagataggattggatacccagagctggtagaaaacttcaattataaagtcattacagatgggtctattcccaccatatcttcatatgactagggaaagacatcgaggtttgcctttagaaatttaatcaatggaaattttaattctagcactaaaccctttttgatcttcaatgttctagtcaaaagagtggggtctctacttcttctaactcctctaccagtcaaaagttgtatgaaggatccctaaagcaaagatctaagtttgcctcctactttgggctgaacttcatttctctttgccggactcttggttaaagctcttggcaggcattttttctttcattccttctgacaaagctacgttgtagtagtgttgggttgatttttgaactccccttaggcttcctaccccattccatattgggaactttaggcataggtggtaaattgacgttactgccttcaagttgtacagggctggccgacctatcattgcattaaatgttgatgacacatcaatcacttcgaacaaagccatcagtgtccttgttgtgggacattctccaactattagatgtactaggatgtatcccaaaggtggaaggccttgaccaaaaagtcgtacattagttgtgtacacgttgctcgctttatcaattggagccccatctttctataggttgatttgaaaagaatgttggaaaaggctccattgtcgagcatgcacctagaaattgtcatgttccgtatttgtgcaattattactaggggtcattatgagggtacctcacctagaaagcatctccctctgtgaaggttatgcaatgctctccaagtttaagatgcttggaatctctttcctctatagctaggatgtcgctttttttgctcatgacggagggtcaaagcatatcattgtatcaccttgctcgttttgcttaatatatggggtctaccaattaaggaccctaggtgacccgccattggcagtggcattgggtctctattttggtcaccctgctcgtgaatttgttcgttctgcacataacgacgtaggtgaggattttttttcctactcaagaattcaatctccatatacagttgcttgcatttgtttgtgtcgtgactgaaatcattatgaaatcggtagaatttagaggtgtatgtcttgttgatgtccttcttgatgggaggacgcttcttgtatgagataacagcttgggtggccatgtatattattttgggagtttcttttaggagggtgaagcacatatacttctcttctttctctgtttagttttgtctataggggatttcttaaactttccctttttgccattattttggccagagccattgttgttttgtttacctccatttttcttattattggagggatggctggtatttctcgtgttagctggcatgttggacagaacttggggctgcatgacaccctgagtctgtccaataattgactgtctttttgtctaggctttctagacagcttcttcaaactttataaaaccatcaactcgcccaaggaactctttcatgttgttcgttgagatccttctgagatctttgcagaattcactcaattgtaagatacctccaagtatggtcatatatcggccttcttccattagtcctttgaccctagtggcctctaccatgaacttttaaatgtactccttcaagggtctgcatggtctttgttttattttgataaggacttctagctatgaaggtatttgtctcgaggacgagaactaagtatggaattcttgagtgaattcctaccaagagttgaactttctttgggccagtttgtaatacaactattgggctattttagataggattgttggaaagatccagcatcacacatctctatttacttttttgagatctgtttggatcttaaagtactttatgtgtgccaggggatcttcttttccagtgtacatcctccaagctggctttctaactttggtgggggcagtccattaatatatgttgagagaggtgatccccttattctatctagttctaggtctaataactttgggtcagacagacctttggtcatgtctttgagttaatcatatagtgcttgtaaagatgggtctactctgtctgctccctatctaaataacactccgtggctgaccaacactcattggtcggctagtactcaatcgtcggccagggcggctagactcccttagtaggccatgatagtttttgggtcgattgggggttggttgtaccaaccacttcggtttgtggatccacctgcctaaaattattattaagaggagggactaagtcacattggttcaccctcgtcgagttattattgtgttgtgtgttttcgtctagcttggaacccaacttgtcaaaaatatgatccctaggccttagtactagggctgagcattggtcggtttggtcggtttttttttttattaaaaattccaaatttcagttttcggtctggattggtgtaatccgaaaaccgaccgaccaatataggaaaccccttagaaccgaccaatgtaaaccgcggtttggtcggttcaaaccaccgaaaccgattttttttttatcatattttaattcttcacatcatagccaaagatatcaaccttagaaaccgtttcaaaaactccagaaaaccgttcaaaccgacctaccgaacaccgttaaaaccgaaaccgtttacaccgaaaaactgaaaaaactgttaacggttaaaaccgcctttaaatggtcgtttttttatttcgatagcaaaccgaccggaaaaaccgaaaccgatcgaatttataaaaagtataaataaatttatatatgtatactatttaagttaagtttatgtatatatataagttatattattattatataatattaataaataaaaaaataatttactataaaaatagtttaggtatacatatatatattctccaactccaacactgctctcttcgtctctctcgctcaggaactctctttttctatctctgttaatttttcatttaaaaggctaaagttactaaggaactaattatatcctttctcagtatcataaattatagtaattgattaaatcttcaaaaatctcaaagcctccattccatgaattaattacagtgaggggctgcttttttcaatattcattatctttctctatctttcatattcatacaaaattttctcttttctcatacattctttcaattttgcatatactaaactactaaagtataagaaatcagcaagaagaaatgagctaaaaaatagattctaactttcctttaaatttgataatattttacaaaaaaaaaaaaatcggtttcggcggtttgaaccgaccaaaccgcggtttacattggtcggttctaagggatttcctatattggtcggtcggttttcggattacaccaatccagacctaaaaccgtaatttggattttttaataaaaaaaaaccgaccaaaccgaccaatgctcagccctacttaaatgggtgcttaatgaatttagtaaggtgtctaggctaacaaatctcaagtctacgttagaggcatgaacgccaatgacaaacagactattcttagagattttcagttagttgaaggcacattccctctcaaatacttgggagttcctcttaggccaacgaaatggaaagttgaggactgtagcatcatcataaaaaagataaaacaaagactacatacctggtcgagcaggcatctttcgtttgttggtaaagtataattgattcattctgtgttactaggccttcgaaattactggatgagcatttttgtccttccccatagtattaccaaggaggttgaaaactgtgtagaagatttctttggggaatg

SEQ ID NO: 18176 - DNA, 3241 bp, Cannabis sativa
  modified_base (3174)..(3174): a, c, t, g, unknown or other
gggagcaccgcaaaaactgattctattttgactggtttgtggtagatgattaaaggttgaatgagtgttggggatgtcgatctgatacaagccatttctaagccttccctccagtaccaccttccttgttgttatgtccttaacatagcaaacatcacaataaaattcaataaacacattgttatcagctcatgtgagtttagaaacactaatctagttttttataatatgagatatatgaagcatttcttttagtagtacgggagaactagtgtgagagtttaggaaaccagaaccaatatgagtaatggagagctgattaccattttccactgtcaatttttctttaactccatagttggatctgtatgttaagtcatctccgtttgaggtaatgtatttgttgctccactatcagcataccattctcatggtccactgtttctggtgttgcaacataagcagaggggtttttcttctcctggtttggaccagattggcttgtatttgttggtgggttttttcccatgaagaagctctcatcatatcgattgtaacaatatgctgcagagtggccatatctaccatagacctgacatgttggcttggagtttctttctcctcttctgccaccattgccccgaccacagctattgcccactcaagtgttggaccctctattaattgccaaagttctgtgggtagtgaggccttttttttggggtttgtgagttatcgttttgcttgtttgcaaggtcagcaaaaggggaagctccattgggattaatctgcttgttggtggtggtctgaacttggagtcgaccagtttactatcgaaactgaggagaacttcttgaagttcctgctaggatattgattcacgaccttcgatctgcactgtaatgggaaaatattctacatctagaccacgtaaaatgttagcaatgagatgggttttagggtatatataggtcccctgctaaagcaagcatattagcccaagttcttttttatctaaggtaatctgccatagcagtgcgtgcctccttttcgagtcaattgaatgttgtcacggagctcatccattctaactttagaatgtgctccaaataaattttcaagagctacccatggagttcgagctgagatacatcccattacctcagttgctatggattctatcatagatccatagagccaatccttgagcaactggtcacacacaatccattgctcatattctaggtttggacgcacaccaaagctaggaagtccatcaccaaaggcaactcctactagtatgaactctggttgagaatgtttcagtccactaatgtacccatccaacctatgccctctgataatggttgagaccattgttttccagagggtatagttgtttcaatcctgttgtgaagctacttggtgttgctccattaaggcagaaggggaggtggttttagcaagaatagttcctttgcttcgacaaccgtctgtgtggcctaagcatcgtggtctgtttggcttgttccagatgacatgatgcgtgagaaaaaatactctgataccaagataagaaaggcaggtaaaatgctctgtagatggaaagctcagctcaaggtacaatggctgagacatgaaacatttatagcagaattcaatcattacagcagggtgatccacccctaggatataaacaggtgtacaagcaaaaaaaatgacctcataacagagtgagacacaaactcacacgcacaactgaaaagaaaatacaagactctctctctctcacaccagctgacaataagtacaatagcaggagtaattaagtttataattaaatttctaattatgtcttaacaaataattcattcaaaatattataaataaaatcaaattaaacatttatactccctttatatatgacttatataagttttagttacccacatgaataataaatgaatcaaattaaatttattatttacttataatacttaaatctctggagactataaatacacaatacaaatacgatctatcagaacaaattatcatccctaccaaatatatatttttaaaaaattaaacacattaataattatcaattctataaattaaataagataagatcctcttgaatgcatgcattattatttaattaataattatttttatgatgacgtcatgatcaattaatatatttttatcatccatttttcctataaataggaatgcaaattaagaacttgaagaggccaaggctacaaaccaatttaaaatataccaccaaattatatatatatatatatatatttcttattgatcaagatctagctagaaaataatgaagaagtttgtggccatattaataatgtttgttatgatggcagtgcaaggtagctatggcgatcgttgttacatagccggggaatactgtcactggggagaagggaagatttgttgtgatggattgagatgtgaaggtccaataataggtgcgagtcgaaaatgtgtgcctattgctgggtgtaggcctggtggtgctacatgcaatatcgcaaacccttgttgttatccctatcaatgcaatgctaccggctctggatattgtattccagcaaataataatgagattgacgaagctgcacaacaaaccaatgatcatcgtcctctctcatcaattctagatcactagtacgttaggtactattgcatgcatgcatgattacgtaacaaccatgcatgcattaaattagaaagtactatatgagtatggtttaccaagacttgtgcatgcatctagtatacgtactttatatatatatatataataaataatgaatagagtacaataaatagagtactcttgctttgtttcttatattattccgatatcatcgatcggtatttgtattttcttgctttctagctcttttaatgatgaagtggtacgtgcttatcttttattttaataaatgatacataaatttttgagatacgatatctttgacaaaacttatccatcttttgtagagaaacaatagtaaattgaaatagcaaagtagatgtgtataaatgatacaatttaattataatcaatcgttaaatattagatatcttaatgtgacctattggagaacatttttccacatagattaaatgtaaaagtantgagccatatataagaacatgtgtactccactcattgccaattagttttgagatggaaccccatgat

SEQ ID NO: 18177 - DNA, 2508 bp, Cannabis sativa
ggttattttttagcttttgaatttattaatgcatgccatcaaatttaagttgaaaaggaaagtcaaataaatcaaataaaaaatggtcaatatgttattagtgcaaaagctcacagatgccaaaaggaattaaaaaaataacaaagtgcagcaaacagtgaagagagagagagagagagatatgagaaaatactgccatgtgcaatgaggactaatcattcatttcctttcctaagcaacatgggaacaaaacatcactaaataacaaccccactaagagtgagggaccataacaaaagaagaaacatcaactttgtgttacataatatcatgaaaaaaacagcaggtaaaaagattaataaaaggttgaagatacttacaacaggatcaggggcatcatcttgcttacacatgatccaaggtacaccggtgcctagtcccacagccatatgagcagcccagttagagtatgccttaccaggagccccaagttcatattccatgggaccatattcgttttcaatctgtcacatatatcaaaaagatctttccataagtctactatttaatccatcaaatttacaacttaactatttgagaagtctaggaccagaaaatagtacacttagactacctgtgataatattataggaccaccttgagttgcatacagcctttcagctttcatcatattgacaatctttcttgtgaatttttccatttgatacttcattgttgaaattcaaaaatcaaaattcagcacattattaatatatataataataataataaaaaaaagtaagtgaaaaatcaaggagaactagtaaagattccataccttgaaaggtccattatctgttctaaatcgaatacccggaatgtatttcaaccagacaggaaaacctctgtgagaataaaaattttataaggttagcttcacatttcagcaacttccaaaaaaatctttctttttatagaaatgttatgacttcatcattacccaaaattccattcagcacaaacatatggaccaattctaagatttacatataggcccgcttgatgaaccagcttgacaaatttaaccagatcataatttccctcaaaatagtactgcaaaaaagattaacacaaaaaaaaaaaaaaggaaaaaaattacaatctgaatgcatggtcagaatcatctaagcacacaaaaacacaaaaggtggccatttatccattactttgccttgtgaaggttcatgcccattccagaaaacataagtttgaatcacatctagacctccttctttggccttttgaataagatctggccacatctgcagcaaaccagaagaaccaatatcaagaaactatgacttttcagggaaaggaaaagaaaagtaaataattatataaatacaatacatgtatacacagacacaaataatagtttggggaggagaaaacaagtgcccagatgaaaaaaaatgaccaaagtaaggaaaagaaagaaaaaaacaaggaaagtaaagagacccatgaagcacatttggaggattacctcaggagtacttctggggtagtgaatggatccagaaataaggatccttctctggccattaacgacaatagccttagaatcataagaaacagaggcttgaacagaagaagcccaaagggacaataccacaagaagcaaagcattccacattgctagcttcaaccccatcatgacatgaaccaaaagcccctgccctctcctctaacttgagctccaccaaagtaaatgaaatgacctttttggataaatattctttctttttcttttatttctcttgagtgactttattctatgccctctttagttgtacaaacagagagagagacaagaaaacccagctgggcatgtctttgcttgccagaatgaagtttacttttttcctcactcttctcccttttgttttgtttgttttgagtggagagataagaaaaaatggcgtgttttaattcaaacaaagtatgaaagcttgaagctttaattaatgtatgtgtgttttgccaaaatgcatatgctttgcagctgcttttaaacactggaaaatggaggtttttgaagtgaaagctggacccactttttggcctcacttgaactgtcactcagctaatccagtagatcaatataattgtataaattattattcattaataatctctcttcttcttttaccttattttacgaggaataaattataaaattaatttattatttttatcgaaagtaaatttgctataaagctctgtttgggtgttcgctaaaaaccagggtattttattttgtttaaagcgttttttatttatttattttttaattttcagacacagagattcttaactcaatccccatatggtcggctccttcctacttagtcggccctaatatttatgttgtcttatggattttcacaccccacgcgccgaagctttacacagtttcttatctttgaccgattaatttagttgttc

SEQ ID NO: 18178 - DNA, 2278 bp, Cannabis sativa
tatactgcagtataaaacttgcagtataaaacttataaatataaaacttataaaaaaacacagtaaaaaagtaaaaaatattgcctggcagtatttgtgtaaaaaaatgtcaaaagttagtatactctgtaaatttcccattatatttttaaagatgttaaacaaattatttagagaagtgtgagggaagcccaatgtattctcaaagatgggcttagacgtcgggtcgggtccggagcctctatttcatatttttcatgacctatgcttctcggtggattcgaatccatatgtcacctcttcttctacagggttggaaggccatatggtgtgtgatttgtttcaggagtagagtcgggagtgagatgtgaatttggtttgggacatgtttaatgacagtgatgctgagattatcttagacattcattaaagtttatctcaggagaaggataattggttatggaagaaagaaacaatttattctgtcaagagtgcttatggtggcttcagtctttgcaagttgagaaccatgatgatgataacttgacacggcctgtcctttttgtgatgtttttaatgaaataatatttcattatttagtgtcttgtgagttttataagagttgttgagttgatgtggggttggattttgtttcattatgtttttttcttggcttggtgtggtgatgagtagggtagatgagaataaatagttgtgatgctttgttgggcaatttatcttctaatgtggaatcgaaaaatacagagaggggagtatgtggtgtcattttctttattaaatcttgattaatgtggattggtactagcttaaccctactagcttgtgatgggggtgaagtattggagaaaacatgtgagattaatgtagatgcaactatttttgaagaagatagacactttgattctgcttctatgattcgggatttgaggggagagttgctagcatactgcttcttattcgcaaggggtggtgtctccttctttagcagaagtgatggggatcaatgatgttcttagttggttgaagactcaaagttattttagagtgaaggttgagtcaaataggcttgttgttattcaagctattcatagttcttttataatgctttctaattttagtttagtggttgaagattgtaaggatttattataatctttgaacaatgttgttttatattttgttaaacagtctgctaatttaactaagcattttcttgtgagacagtctcgatattatgttggtatatattcagggaggggatattttcatattaattttttttttttttgcaataaggaataattttcattatttattttttatataaaatcacaccaaacatagtatgtatctaattatatcaacaatatttttcattagtacaaaaataacaataaaataaaataattaaattattaatatccaccgttaacaaaaattaatgaaattatagaccatatatattaaccatgtcttgattttaaaccctaggcttaattatttatcaacattcagaaggtgttctaaacttggctgaagatctgctaataagtttactaacttgccaagatcatctatgcttgtgagctcatcctttcattatagtttatgtatttcctgttatattgcttttgttcagtgactacatagtacctccaacaataagggccaacacctatcgtcactaaaattaatacacattattttaaaattggataatgtaatgcatgaatgtttaattttatattaagttatatattttttttttctaatgttaaaataattaaataatattataaatacatcagttaaaataaaacgtcgtaacacaatctaatatattaaggttactatatatgataaaatactaacatcattttgtacttattattatttgggtcacaaattaatctactttttaatggtaaattttattttacttttgactaaatttattatattacttttgttcattgactatatcagagtaccttcaatgggggccaacaccgatcgttgctaaaatacacacattattttaaaatatttttttctctcatttatttaagatttgacacatttttttacaaaaattactccaatggtcgacaactccaaatgttgcccacatactactttttaattaaattttaaaattatatatattcccttaaaaaaatggtgataaagtaacattttttaaaaaaataaaggctaataaggatttttaccctctaaactttaacatgtatcaaat

SEQ ID NO: 18179 - DNA, 4954 bp, Cannabis sativa
taaacaactgagaaattctctttcactttctctttctctcttcatcttcttcttctttcttcttatctattctatattattttataacaaatattaatttatattgatagtaatttaaatgtcttttatgttttgttctcagcctatttaatggcttttattttcttagttaataaaattatcagagattaaaaattcatacctataaatatgtaattgtttaaggattaataaatagaaattttgttcgttttgggagctgatttatcaaagaagagtataaataaatatacatactatattataattgttatatatatacatacttataagttcatatatatatgcatgcatgtatgatacaatatatttatataataaatacatccaaatccttatgattattaaagaaaagaaatcaacaaagtctaggtagggttttagaatgaggtgtagcaaagacactatgcttaaccatccttgacatttgacccttcatctctctacaaactttctccaactccataacccttctttgcattctttgcaagttttgctcaacaaattctttttcttctgtgattttttcgctattattattgcaaccgccatagaaagcacccttattattcctcgaagcgattttcgaagtcaaactgggaaaatggtgatcatctccaaactcattataattatttgtggatagaactatttttgattgttgttttataagagcttcaattgtgatttcgggtgggatttttggattctttgcaagctctttgcaggtttcaaggctcagcttctcaaatttcaagcatttacatagttttgatctttcctctgatgataatgtgggatgagactgcaccaaaaaaaacatacaatattaattattataatttagctctcaaattattaagcaaataaaaatatagattttttaaaatcaattatctaatgacatctcaactgatggtattgatatcaccatgtagctaaaaaacaaggaattgaataggatatctatctattacagtttgtgagttatttaagtattttagtattttcattacataaataaatttaattacatgacagttaatatagttacagaaaatctcttaatttcttttagaaaattctaaatattaattttaggagaattactatatatgtatatatatatatttttaatattttttaaaaattttacggttaggttatttcggtagttattctggtagtttctatgtggattgctatatatatatatatatatggattttaattgcgatttaagttgctatataaatttctgtaaaaatataaaagaaagtttatttttaagtgtaaaaataaaaatactctaatattttataacatgtaggattcagaatttcaaatagcaataatacttgtgttttgaatcataattttgacatcaatattctaaattttctgaaaataattggtaagaaatctcgtgtaattatatcttatatatatatagtcatgtaaattaagagaaaaaaaaatagaattacaacttgcttatgtacggataaaatattaaaaatactcataaaaacagtcactactaaatactagggacccatatataagacctacaatatactactgttattgaacattaatgtttagtactatggatttcaatacttaattacactaataatagtataataaaaaagatagtgctagacactactaatgttttaatattaaaacattaatcatagagagaaacttatatagtatataagtaataaattgcatattatctgttttagaactaacctctccaattggcaataatagagagtggtggtggtactaaaacactagtgactagctagtttctaatagaaggaaagagttgaaagaccaatcaatccaaaaaagagattccatttgtctcttggtacatcgacaaattgatattttcgtcaatgcatggctatcaaattaattaatataccatacatacatacatatatcctagattgcccggcacattaaatatgaataatccaaaacaacaccacatgcaaaagaatatgttaacacacaagggtcactttcactactactactagtattaaaaatatacatgccaaagaaagatcttactcttacccctagcttacaataataactaatagtatttatatatatatctatatatcatatgtgtgtggttctgggttgttgtgaaaatttaaggatatatatagaaaaatatgataaatttattcctttcccttagaacttaatataagcaatttgtaagtggagctgtcccttttacacatgaaacagaaatattaataataatgtacacaaaagatcactttcccaatctggctggctggccaagtttttatttggccttcttcttagttgggaagtgaagtgaatacccatatattgatcttatataaaagacaatagtgtcacggggacttattatgtatatatatatagcttaggtcttatctattggattagatgtcagtatctctaataccccaaatccacaaatatacaacactattgctatcaccaccacctaattaatttctatatgacaaacaagtaataataagaggaagaaaacaatttatgttaaaaatctatcttgggataaggaaaaaccttctaactataagagttctaaatttatattttgggctatatatctattattgtacttcttgaacttttcaatctattataaatggtccatgaactattcacagtattgtaaagtggttcttctatcaagttttatcacacataacaaacaaaatgatgacatgactacttagtcaattaacagatcagtaccacgtatataatttaatattaaaaaattataaattagacatttttgaaaaatattaaactaaaaatcaattaataattaagaaaattttataaaactcaattaaaaaaattaaaattattacatacatatagtattagtactcacctaacaaatgattaggtaatcatattattattttgtttgttacatatgacaaaacttgacagaaaaattaatttacagaactgtgaatattttagggactatttttaacaagttgaaaagtttaggggtacaataatacataactcattattcgagcaaaaattctaaatagtctttttattatttctttcttaatttctacatttgttttgtcttttcaaacatgaactaattataattaggcaatacatatataagatgaaaataatgaagaaaaaaaagaagaagaaagaaagagatattcacctcaaggtagatgtcaatagctctgtaaactccatcaaaactgtctcttgatgaatgtggtaaactttgtgccactccaagaaattttgagatcttaaggctttgatcaggtgaaatttcactcaagtaattatcaatcaatctaccaacttttttcaacttctcagtagtaattaaatcctcagagttaacaaatactctaaccaatcttatcacaaaattaacatcatatattgcattgttgttgttccctgcagacaccattaaatcatccaatgttgccttatcaagtacttgaccaatcaacctctccaaaccaactctactctctttactaattccaaaaccagataaaattctcaatacccaaaacagtgatctacaagagaataatgatgatgatgaattttcaccacatgacaataaaaccccattaacagctctattagctaaactcacaagcacatcttttgaagcattattattattatagtaataataagcttttaggtaatgaaggagaaatttggtaaggattaggctactgctattgttcatgtaattttctaagctatgaatgactctttcaatgattttagggggtaaaatggtcaaatcatcaaaccaccatgatgatgaattagttgacttgaataaagattctggggttgtattggatttgcaataagaagaagagaagaatctttcatcaggtgatgatgaagatgaagatgatgaggtattaagagtagtattttgtgaaatttttgataaaagagctgagatgagcttttccaatagaccaaatgaatctgcatatgaaaataatgactcacaactatttaagcatgtcaatatttctttccaagaccaataaaacaacccatctagaaaaacttgtgtttgttgtaaaagattgaaacttgagattttctcagtcattccaagaaaaacagcagagcaatacagaacagagacatttgtaactgttatattgattccattaccattgttgtgacaaaaccttgaaattaattcaaacccatctgggcctcctgggaaatcatcaatctcaatagccaatattttcttcttcatcatcatcatattttgatgggctcttctcctttcttgtttcactatctttttaagcttttctgaataagttgatatcactttctgcaacaacaacaacaaaaaatttaatctctggaataagttgaattgaacaaaatataattaaccaaattgtatgtataaatatatataaatatatatatatataaatgtatatacctcatttagaaaaaatgtttcttcaccattaatttgtacttgcaaattacaaagccttgacattgcttcttaaatttccctcctttgaaattagagacctctttgttatgtgttgaagtaataataataagagcaaaacaaaggagaatagtttgtactattttgtgagcagtgaccttattaagtactgtaaaatatattctgactcatcagaaatattatgggccatgcttttatagattttagttctaataaataataaaaaaaaaggaaatcacataaataaatgatataaactataagacaaattttgttttttgtttttttaatttcagg

SEQ ID NO: 18180 - DNA, 20303 bp, Cannabis sativa
  modified_base (5774)..(5786): a, c, t, g, unknown or other
tttatttaattttactaatgtattaatttttcatatactaaattaagcttttcgaactttgatatgtatcaaccttaaactactttaatatgtactaaatcgtgtcttctaaactttcattcatgtcaggcattcgttagtaaaattagacaaaaaacttaatccaacattcttaataatttaagaagaatttttaatggtctaaaaaattttaaaaatatgatttgatacatattaaaattagaaagaaaaaaaaaacctatttaagctaattatacactaacacctcctgatgataacagacctactagtggtattcttagcattttttctagaactattccattttttgtactactttttcttcaacaaatacatatctcacaattcattattctttgccaaacacatttattcccttaatttcatccttgtaactttatagaagtaccatacatatgcaaatatacatctacaaattaattgtttggtgttttttttagtgcacatattcattttcatgttcattaagtgtaaccccaatggtgatttgtctcatataattatgacaacatacaaaaagatatatatgattggaattttttttcttctgtgtaatggagtggtatatattattattttatattaaaaaaaacgatcttatagtgctttatttattgatgataaaaaagaaacatacttattattaaaattctttatgtgcttccttttagataattctattgaaactattatttttaaaaggaaaaattctattgaaactttttttggttttttttgcaagcaaaaattctattgaaactttgatataggtacacagacatttttcaagagaaaaaagatttaattaatatatatatatatatatatcgatcaaccatgttcaaaaagaaaagttgttagttagatatcaaagtttgatggaatactactttttttatttttaagaatgaaatactacttcttatgaccataatgcattaaattataaattgtgttaatttgaattttaatattgcagctgatcttgattaattatacatttatactatagtatatataaaggcaaacccatatagagcataaacggaggagtcttcatcctcttgaaaatatatattttaattatttacaatatatatttatttttaaaagttttatttatttacaaagtattagctttagtttaattttaatgataaagttattagagattaaaagtttaaatcccaacttagacatttttattttttgatttttgaagaagattgtcttaaaatttaaactcataccaataagacttgtatttattatcttaaccattttattattatatctttttactttaaattatattcaatactatgaaaatatcaatttgtataatgcacatatataacataaaacagtaattaaattattattgagctgctaatttttatgtccatatattacaaaaatttagaaagagattccttaaattgacttaagtagtgtttaaaaataaaaataagaaataagaaataagaaataatattgtaattatatattaaatgaatcaaaatatttttttttatgatcttataattgttttaatattaataataagtaataaatatttatattttttaaatgtaataaataattatatttttaatattaatattaataatgtaatatactttcatcatccacttaaatatagcacataatttatattaaccaaatgggtataataaagacatcatttataaaagtgaatatcttaaaaattaaagtaaaaattaaaataattatacaatgtaattatcctaaaaataaaatttctttagaacaaaaataaaatgaatagtatttttttttctttagtatcaaagagttatttgtattaaagaacttttctttctttctttttttttaggaaagaacttttctttcaagaatattatcatttcagaaaagaaaaagttgacctgaacaatatttatgatttcttttttcaattctaatgcataatgtatattacatatagattaatattatgaggtcatgattgctgttaataattacgtaatatatatgcatgtattttataaaaatataaatttatgataattaaagaatctgtatcattcatttgcatatatttatctaccaatatattatgcaggtgaggcatttagtttttgtggccccatatcatctactattaaatgaaatctatatttgttattgtgagtgaatgtgcatgagattaattttttgttttcaataaaaataaatataatccttcatatatagtagagggtgtgtgtgagagatttcagtatatatataatctgcgaccaaactatatataataattttctgtcttctgcaacaatataagggtagactttaacttaaggaaaataataattagccaactaactaagttatatagattgaatatatatatatatatatatatattgatgaaagtaggtgtctcacaggaagacatatattgagttgttaattttattttagaattaatctaattttttacttgggtaactataacttaatttatctgcaatagaacatatgtctataattttatttgcaacgaagatatgacataattttctcgttgagaaaaaggtcgccgcgaggcaaatcccacatttccaaatcacaacatgcggagaaatttttttttagtagtccaaaaaaaaaaggacaagagaagaaaaattaagtcgtaaagataaagtcactaaatttaggctacaagaacccttaaaagaatttttatagactagtgccatattgtgagcttgagatatagtgggagaaataccatatgaatataaaataaatgacaagtacatcaggttgccctccatcagctggtcatccctcctcagttgcacgtttgttagcttgtcgtccctcagctggttttccgttagctggtcatctgtcagctggtcgtccgtcaattggtcgtccattagctagtctccccttaactagttctccatcagctagttatccctcagctagccttctgacaactggtcgtcactcaactggccctccgtcagttagtcgtctgtcaactagtcgccccttagctggccgtccctcaactggttgtccctcagttggccctccttcagctgatcgtccctcagctagttaccgtcgactagccctccatcagttggtcatcccttgactggtcgtcccttattcagttgtccattagctgatcctccttcagctagttgtttgtcagctggtcgtgggggtgttcaacaaaatttagaaaccacccaactcgaataaaccgtccaaaccaaaccgaataaaccgacaaaaaatacaacctgaaataatacaataaaaattcaaaccgccaaatgaatataatgggtggtttacaaattattctaaaccgcccaatcaacccgaataaactgaattaaaccgatttatatttttttttaataaaagtgtatatattatatttcataaattacatttattagttaaactactttgtatttaaagattggacattttagtgtttaacttaaaacttagactttatagttaataatttttattatatttggatattgaagttgaaatttacaatcttaaaacatatcattttttattattattttattcaattattttatgtttactcaattatatttatcttatattaaagtttttaacattaatttaagctataacatttttagcttaaaatataaataatatatttttatttttttatatctaattatttaaatagtaaaaactaacaataataattatatatataaaaaaaagtgaacggtttggacggcttaacccgaccaaaccgacgaaatcattgagtgggttgaactttttctaatttttaattgagcaggttacggttaaatatttacaacccgatatttatattgggttaataaaaatattctataacccgaccaaaccgaagaacgtacacccctaaatggtcgtccatcaactggtcgtgcccatcagttggttgtacctcaattggacattcactagctggctggatgtccgtctgctggtcatgcatctactggtcgtgcatacttcttatccgcgagcataccaacaccttaatacaatgataaagggctgaagaacgattagactatgtctgaaagacctatgataaatagcccacaacaccagccttgggattaagtgatgaagacaaagctcaccaaaattagtctacaagaacacatgaaaaaattcttatagactaggggcaagtgttgacacccaaaaattgctaagtgtaatttttggattcattggtattatgcctaaaatttcgccaagtgtaaattctaaaatgcacccaaggggatgtgttggtactaagaggaggaaaggcacgggtcaagccttgtgcccatgccagcgtgcctaggctccccgtgcgcccagcagactccccacgcccacgctcgtgcacccaactccccgtgcccacgcccacgcgcccagcctacccatgagtagccctcctcgtgcacctagcctcctcatgagaagccttcccccgcgcccaggctcctcgcatccactcccgtgagcagcccctccttgcaccccctttaccttcttttcttctcctcatacaaatagcctatgcacataagctcaatatacatgaatgtcttaggtgtttacataatcgatcttgtgggcatagggggtgaggagtaataatttagactaaggccatgcaagcaagagcggcagagacaagatatcgaccatacaacaagtacgaataatggagacaaagcctgcctcactcaaattactacaaatggtaggaagaacttttgtcccattaaaagtgctagagatttcagaccacttgacatactgatcttcctattatgaaaataaccttgcatcctcaaactaggagaccacgtgaaattcaaaattgtataggcccactacaaggccggccttgagatcgggtgagtctttaggaaaataaaaattattggaccctttatttaaaaaatatatagtatttttaaaaactactaaaaaatatgtatattcttaaaggagaaatatttttttgggcccttgggctaagtgagtcctaggcgtctaatctgctttcaggctcgacccttataaataggtctttggaggtgtttgcaaatgggatcttttttttttgaaaaaaaattaatagaacaataattttttgaagagagttagagttttttctttaattatttttcaattcaaacttttgaatattgcatctggtttttgacatttccttgaggaattttcaccgtcacatataccatttcatatatatatatatagagacatgattttatcccgtgattttatttctacggaatgtattccgtgatgtacggcagccgttagatgagtgagttatttaatctgacggctgagattgatttaggggtaattagagttaaaaaatagtaacgtaccctaacacttatctaatgtaccctgagacccatctaatgtaccgcggaatacatttcgtgaaagtacatcatgggacaaaatcgtgtccctatatatataacatacaaaatctttattatagagagtgttactctctcatctgacggctgtcatacatcacagattacaatccgtgaaagtacaataacaggacaaaatcatatccnnnnnnnnnnnnntatatatatatatatatcatgatgcaacaattatattgtatatcctccatatgattgtatatggatctaaattcaaacatattaatcctaatatattttcctagaaaagtcacgatcgactccaataaaaccaattgttaattaggtcttgcatgtatgtgggtcgtttcaagtaaacattttttcaacatatatatataatcaccatcaaattaataatacttattaataaatttatacataggcattttcttagtcatcattatcgtaatgtagaacacaatctataattaattattattttcactaataatgacatgagattggaaattaatttcaattcgtgtgttgggctctttttgtttttttggttgaaaaagttaatatttgctcctttttcaaacccttggcgtataaaaatgtaataatcatccaatttcaaatcattttcagtgttagtgaaataacaaattagctacaaagatcaaaccgacatttacacttttttttctgattggacttctcactttaattcttgttatttttttagttattatattatttattattatcctttaaattagatgagtaacctcttaatttcaactttctcagtagtaattaattgatgaaattaaattgataggccaaaaaaaaggcattacattgtacataattatttaattaccaactgccaagtgtacatgattagtaatttggtgccactctttcaacaataagttaaaaaaaaataaagtaagaaagcaacattttatctattaaatattaattgctgattatctctttttctgagttagtgacaggtataaaaacaaccgtcaaagttgatcaaattattaggacccattaaacaaattctatagataattttattgataaaacaaagttatattggctctttataaattatttcttttgttattagttcatgtattatacactacacacattattttatcttgctaggttagtggtttagacatagacttcttaactcctttttaattaccaaattaaaagggatccctcttagttaatttattcaaaaatatatgcagtgtgtagtacatgtaatgtaacatatataattctcataataaaatatattatattatacatttttcttcttcaactatatacatacaaaaatatataattcatgtcattgtcaacagaaaaaaaaattataattaatatctttccaaaaagaaaaaaaaatctgcaagaatatttagggtgctggtaaattgaaaatgttataaatatacaaatcggtgattgtctaataatgtcatcattaattattatatgaattacaagtttttttttttgttgaagttgaatagagactttaatttttaaggccccattttgaaataaatatggttgttcatgattgcatgacacaatttggcagagaccaatatttacatttctgtagaaacagcccatatatgtatattatttgtatataaatataataacattggaccaatctattttagtactcctcaaatatcttagtgggtacattaggtgtgtccatttacattcgatctccaacaattttaaccatcatttcagagatatggaattaaagtagccatgaagtacttataagttcaaggcagtacataatatatatctaagtacatgtgaactaataatgtatatatattaagcttaaccacttaattccataaagaattaatgatgactcatgtctaactatgaaacatattaggtatgtcaaaatgattcatttagtcgaattgggtcaaaattttaatttaaagaattatttctgatctaaaatattcggatatttgttagatctcggactagatctgctctgcctaccctaatttttttacggatcagatctgattcaatccgatttcaatatattaaaaaaaactttattcaagacccaaaagcgagacttgagacctgagaccgagacccatacctgagacctagacccgggacttgaggcccggactcaaacctgaacccgagaccgggacccgaacccgagacttggaccaggacccaggacccggacacggacacggacacggactcagacctagacccaaaacctaagacatgggacccgaacctagacccgggaccggacccagacctagatcgggacctgacacctgtactcgaaccaggttctagacccaaaccccgacccgaacccaaaaccctggaccgggactcaggacacagacccgaatacgagatctagacccgacccaaacctgagacccgaacctaaatccaaacccagacccaacacccgagacctaagacctaggacccaaacccagaccccggacgcgggactagacttaaacccgagatcggacccagacccgaatccagacatgggatttaggaccgggacccaaacctgaacccagacctggacttggacccagacctgaaatggaattgggaccgggacccgatcccggacccaacacccgtgcggggacctgtacttggacctaggacccagacctagacctaaacccgaacccaggaccccaacccagacctaagacccttgacccagacccggacccagattaagacctgggactcaagacccgggatctggggctcggacctagactggacctgctcggatccagtcccaaacccgaactcggactcgggacccagacccagacccaaactgggatcgggaccgaggacccgagacctagatcagacccatagttggtgttggggttgagtttattgaaaatatattataattttacacaatttattaatacaagtcaatatcaaatacagtattgtattaaataatactattataaaattaaaatatatataaaattataagtttaatataaagaccgcctatgttgatatgttgaattattaaataattagggtttatttataagatttaattattagttatgatttgcataattgtgaaagatttgtttaattttaatacgtactaattatgctatatgtgaattttttgttttcgattattgcgttcggtagcagtggaaagcgacgttaggctagagagtcacgtctgtatgatatagaattttattaatagcggggcgtcattgttaggttttggaggtttcggaaatttccaaggctgttatgaccaaactacccttggttaccattaacctttgatttttttttaattaaaggcaaattggtaatttattgaaaatttagtttgtccttttatgggcattatgagcttatttttcttagtttaattgataagggttaaattatatattttagcaagtaagtaataaactagaactttctcacctagggccagcaagatttgagagcttttgttggtttaattcaaggatttcagcagggatttagaatctcaaacacaaggtataattttttagtactcttttgttgtttctttggtcttaaagtgaattgtggttgtatatttgtggatttggttgttgtggtaattggggttgttagattttgtattctggagctaggttgaagttagttgtgttgattttaagctggtttggttgagtggaatggattttgtgcaagagtggtatttgggaactcaacttagggctttaatggtgtttttaaattttgagttaatttatgagttatgttacttgaattgggtttattgtagtatatacaggtgttattgaaagtattgagaagtttgggcttgaattgagttgcagggaacatttttgacgttcccggtgtgttgaactggtcgaccggttcaggggaacctgtaacaaccagtcaaccggttggtccttaaggaaccggacttccggttgggaactggtctaccaattgggccattttttcaaaaccttagttttccccatttttgtgttatttagggtattgccatgttattcattgataggaatatctctagttttgatttttagtctccgaaaagtgttttagcgtgtctctcacctgagttacaaatgttgtgatttagagctctgtgaaatctcgagttgcaattccactcaggctaaccggcacacctgagcacaaaaatgaggtaagatagcataaagtacatatatgtgaatgaaggtatgttattgtctgtgcacactactagcactgctaaatgtttagttaagggtgttagtacagtgtaggattttagggtagttacaacattaccaacatgagtaccaaggagtacgtcgtgcatgtggtacaacactcagtaactctcaaaagtacagtaatggccctacaaacacaagtacggagtcggtactctagtgcatatggtacagtggtcgtactttcattaagaacgttcttaaccatttgatgagctcagttgttgggctcaggacggcttaagcataaagcctgtatagcattgcttatatatatgttatgtatatcttactgagtctgtcgactcatcagtttgctaccttgtgtaagctggaggagtagtgagttggagcttggcaatgattgtacatatcgcggcagtgcaacctagagggtttcagtcttataacattttgagctgtcttttgtagctgccttgtattttatatgaaaaaaaaattattacgagattttatattagtaaatgtactttcaactgtgttttacgttcgggatcccaacctataaaactatttaaatataacataataagattcatttcggtttagcaagtttttcgaatacgggtgttacatttagttataaaattaaaattctaaaaaaaataagtcgggtcggatcagatccgattagaataagtcgggtcgagttagatctgatccgatttgggtatgtgatctagcggggcgagacgggagcagggcaggacagatcattacataatctaaattaggtcggatcataatcaaatcagtttcaacctgattcctttacactcctaaaacattccttatatgtttatttgttttagttatattacctgaccaaaacactaaataattatgttaaaacacatattgtgtgccataaatgtcactaaaactttaattcaaattaaaattttatatagaataattagtatttttgtttatttaattttttacactactaagttgtacccctttcatgatattttattcaattttatcgtgaaatgagtgacacgatagatggtagttaataaataaatataaattaaatatgtttcactatttttactttaataattaaaaaactaaaaatataaatataaattgttataaaaatgtaaaaattgtttattctattattcattaatgtatagatgtaaaagttactgtaattgatggaaggatcatgttactataaaatttatatttcgaatcgtattattaatgagttgcatactataaaagcacaaattggtagtgtaaaaaattcagatggaaaaaatgttaattattcttgtatatatacagtaaatctccatataaaaatagctttagaaactacatagcggtattgaaaaaaaaattaaaaatgttaacaataataagaacttaaaaaaaatcaaaatttttgggttgttgataagaaagggggtgtgagttggtatcggtgtaaattcctcaccgtagacacggttttacacgagaatcaatcctagatgctgaaaaaggaagtaaattttgggtaagcaagctttataattattttctagttccttaggctaaggttgataattgtaaaataatttggtgtctcttattcatactaaaatatagatttattctttgacaaacctcccatagtaacttgttaacataagatcatctgatgacacgaagtacttctacactctacccaacgtgtgatattagagatgaccttcatactctttttttctttgagtgccctttctcaaagcaactcctgaatgttattcagttttggcttgatgatgccatttggccagagtcttactcgtattagttgctgtagttgaatacaaaacgagctcgtagcttgcttcatagtcttattgtgactgccgtttcatttggtggaaccagaatacttgtatttttgagcaagaagtgtttatgatctcttatgtggataatttaattagagcagcgttaaaagctagattattacttgttgacatgagggaattctctaagagggatcaataagttttttattttatttgtaatacgtaagtgagtctatttgttattgacttgtggatgttggtttatatagcggcctaaattttgagtaatcatgaactcatgttcatgttattaatttccttgattcactcgttaaagtttcttagagaagatgattcttacaatttttttttagaatctaataatgtgtatggctgggaaaacgatctacaattatggaatcataattttcctaacagatcgaatgctggtttcgtttaagtgttaattctgtgactaaaaagttatgcacaaaattagattggatctaaattatactttcactagtaaattaacggtactaaaggataaagaagtaattagaagggtaaaatggtattttgatcaagactaattacgaactgacacaaggagggctaatctctggaatcggttatatcaatggacactatagtagatttcagtttatataattctataattactaagagttcaattctatatttgtagtggactaatcatgaaattaatgaacatgattatttggttgataagattcaataaataatctggtttattggagcttagaattataggtccatggtctccgaatcgccaccttgaaatactgtcaaggaaagagataaagaattgtataatgtcgttaaaaaaatatactttgaattggtaaaatagtaattatttatttttgataataaataaataatttttcaaatgaattaaacagagaaaagacaaaagtttaagacaaaacttgtcaagacaaaaattattgagataaaaattatcaagacaaaagacatcatcattgtcttaattgagacaaggtaggcgcctattatagggtgtccctattagttttgtcttttggagttaattaattcagttagatgaatatttgaatttaaaaatttgttaaaggtatttttaagttcaaagttagctgagatattctctcaagtggataaaagattctctcatctgaaatatcagtaactaaattcagttataaatatttgtttaaataattaaatataatttaattaatataaattaaactactataaatagaagcatgttttgaaaaataagcttttcacattgtaattatcaaaattcactgggagaaaaggaaactatttttctctctcaaatagttcttgctcatgtgtcgagaatttatcaagaataaattatatactttataataactcacattatttcttgtgtatggtggatcaatttggaagactacagtttgagcttataatcaaccaaaaggattcaacttacgataagtttaaaggataccatgatagtcatcaagaggtatatattcctttcatgtaatttatgttttgattaatatttatatatatggagatccattggggctatggtacaatgataatcagatatacaaatctttcactgcgtacctaagttagtaccgtaaaaccaacacctggtgcaccagcatgcactaagcccatatatgtctcatcaaatctgttgttacagtgagtagtagagtgatcatacttgccacaaacttggcaagttgatctagggccaccaaatcttcctcctctgcctctattgttgtgcctttctcaattgttgttgttatggcctcctcttcttctattactaccactatatcctaagtgattgttcccacctgagtagccagatttccacgagtgtggggtttgtttgcatttggtgagaagggagtgttttgacatttttttggtgcctgagatgacactcagtcattctatcttattgttaaagctcaataagatgtcctgcaatattggtccagtagtagaggacatggcctctatttaaagcacaatgagaatgtaatctaaatctaaaccagataacacattagtaataaccaaagactcaggatatggatcatctgctaagtccaaggcatcaacccattgtcttttctatttcatgtaatcaaccatgctgagagaacctttcttagtcgtttgaattttcgctctatactcatccatttttcccttggattgagctccatccagggcttcaagtgcttgccaaaatgatactgaagaatcacaccaaataacttcagttgtcatcccttctgtcatagacccatagatacatcccatgagtagttgttcgtagacaatccactgctcaaactctatattcacctaaagaccagatctgattttccatcatcacctagaggagttggaatgaactcatttggtcttttttttttttgttccttaaggtatccatccagacatggcctctaacaatagtagacactattatttttccaaagaaaaaaattcttcctatctaatttgagggcagagggttggttattgtgcttccaaattgtaggaaaaccaccctagaggcttagttttctaaaattattgaagactcgttagcaccatttgctaccaactagaactaaaaaaaattggggtgtttttgttattgattgattgccaattgacatcttgccagaactagctctaccaaattaaaaaaatgcagagaaggcttttgcaaaaatattcaactcaatgagcattaattctttcattcctttatataacctaaatatacaatacaatatagaacaataaatgagaatattttgcaaaacacaaaattaagaaaattgatacacaatgatgagtattttgacttttactactacgattagtcttatctctgtcatatgattttgagtattttagtcatgtctctataagatggttttaagtattttattcttgtctgtgtgacataattttattttgattcgtggttggtttttatttgttcttcgattaattgctcgccatcaaattgttgtaaataataagtactctgtgattgaaggagttgttagtagtagtacagttacatgctcaagctacgaggttgaatgaacttgttggaataatttctatttttgtatcttctgagcggtagatgaaactgaatataagtgttctaaaagttaacaatgatactataatatttttaatataattttttttttaatttctttgtcaaacgatatgggaattagacagcattatttgattcatttttctaatactaatgttaattatgtctctaataaacagatgtctcaattaaattacatattattattttaattgattgctattatgatttattaaaaaaaaatctctaaagataaaacatataatatgatttataaaaatctattatattgttttatataggacagggttaggcccatttcaagaggcaaggacttgatattttagtgtacccgttgaactaatctgatcatgttctttgactcatatacatatacatgtaggatgaatttgactatttttgtttctgtcaataatgcatggatctgagtttgcataattatatatacacacatatatatgatagtgatgatgggcctcactcagatttaggttagatgaattcatttgttctttttttttaatatatgtgatgaatttatttgtggtggcatgtcatgttcatgtttgatgtttcataaaattcacaacacagaatccaaagctaacaaagttgtattattttgtttatgcaattacattattaaattttattctctggggggtttttctctctcactcccccaccttttgaacaccctatatggctatatacatataatatttaccattaattgatgctaaatttgagtggtaataaagaatgacatagtttattgattatggttattaatctctatccctatatgtaatgtagtcactataactttctataaaagaaatttgatgtaacatgcatatattagagtaaaaataataaattaaactgaagtttgtcaaaattggtaggatgagcctatttttgggtatatccgaaatcacccttctgattcaaaaaaactgttccacttgctcggtctctctctttccctctcgctcgttctctctttcccgtttgcgactccccaccaaacggcaccacgtcgagccaccaagcaccgagctcagaccttactcacctaaatggagagccaccgtggagatctccgagacccacaacatttgacgaaggagattcacaacatttgacgaatcatgcaccgaccttcactatctccaccaccgtcagcaaaacagagacccaaaatcaacccttagaatcagacaacccgaggtgtacaaaaaaatgtcgaaagtaatctcaattgaaaaatatattgtgtattgtggtatgttaggggggagggagttatgttaagtccgatggggtatgatagatggacaatatatgtctgatggttgtaatgttgaatatgtaatttgaagatgagtacccgataatgggacgatgaggggtctgatagtctgtaatttttttagcttttgatttataattggtggacaatatgggtacgatagtttgacgatggggggtcctcaatgtcttctctagtaaatattttttctttgaatttaccgtagcttgtcgaaaaaaataatggatcgctaaatcttccaacatcactggttcctctagcatcactggtaccgtctggatgactagtactagtaccaggcgtttgaaaatcttctctacagggtcttcttctaagtgttgtttgcttgggtatttggtacgatagtggagccaggttcaaagctatatcagggacgtatgtctcttggttttctcttacatcatcattgccatcaaaataagcttcagggttaggaccatcaccaaactcatcatgcaagggtatttgtgctacatggttaattatcggcatgatagtgtttgattcaggtaacacatcagttagcaacaacttcagatttattttcgaaacataagtcttaacctctctacaaatatccttaacaatacttgatggaggactaagatcgatacaaacaatcttcttcaccaaatgcacaaaaaggggaacaaatttatctagcttctttgaaagcattgataaatataaacttagacgcatatcattatttataatttcaagatgatatattaatcatttcatgtacttgtaattaacttctaatttcaagtcatattgcactttgtcaatctccagctctaagtagaaaagttcaacccattgtgagtaacttatgttcttattaatcttgaatatcgaattttttgttccattaaaaatataatttctactctgacactccaaataccattatacatcaagaacgcaaacacagttaaccttatcatacgaaaagaaaaaaaataggaaaaaactcaaaaagaactatttaaataaatattaaatttacagaaataatgaaaactatcggtcatatatcggcacaccatcagtcactgttttgcacgaggctcagatgagtaaaaatagtacatattagactactatcaagcaacattgtactcatagggcttgtaagttttaagaaacaactattggcggtcatcggagcactatcaggctatatcgtccaactaactatgctccatcatatcgagatgatatcccgccactatcaaaattttatcctaaccttcaaaccatacaaacaatacccaaaaaaattcagaaaatgtaaatttctacctgaactcaatttccagcaaaaaatattaacaaaccacatatcgaacatctaaacaacattcttaatcatcaaaataagaaaaataacaacaaaaatcaaagaaaaacactaacccattattttcttgaaaatagaccttggctcccttcaattatgtacaatgtcaaccgatttgttttcttcagtcaaataaatgtctttgttacaagattttagtgttaaagtcttgtacaattgataatttttttagagaaaaagaaaaaaaaaattagtttcggacatgagaataagtaaaagaaaagaaaagagaaagagaagggaaaatggacgtgataatttttttctgttttgtttattctcctcttggattggatgagtcttgacatctgtcatggtttgtttgttttctctctgtttcattggtattttctaaaaagtgttttcttgtcgttttgaaactgatggcttcatcgagtaatccttctcatattatggaagaattagttatcgaagaagagttagaggaagggcttgtgctacaggatcttggtgaagggggagaggatgagttcgtgtatgactggagactgtgtctggtgggccgtttcatctcaactggtgcaattgatttcccatctatgcagcaaacactggcggcattatggaaaccaggaaagggagtttacattaaggagcttgatgttaatcgattcctatttcaattttaccacgaaatagacatcaaacgtgttgtggctggtagtccttggtatttcaataggaaggctttgatcatctctcgtatgaaagaagagtcgaatccacgatgtttaactctaaacactctggatgtatgggtccaattacatgatctaaagactggttttatgacttcaacagtgctaaaggctgttggcaattatgtgggagtgtttgtggaagcttgtcctaagaattttttgggtgtatggcgtgattacatgaggattagggtcaccattgatctcgctaagcctctgaaaaggcgtatgcgtattcgtaaaactggggaagagtggatatggatcactttcaagtatgaaaatatacccaccttttgttttatctgtggtatattgggtcattcggaacgattttgccccaaactgttcgagacaccgaagcatgagattacaaagccttatggagattggatgaaggctccttttcggagatcgactaaactaatcggggagcagtggctgagaaacagtggtcacggtgatacggcaaggaggactggtggaggagagaatcatggtggatttcatggaattgaaggcgcatcaatcaccactgatttccagggtgctaatgatttctccacaaatcatggcaaaggtatcttaatttctgattcagttgacccacattttgctcattctaatcctatagctggtacaataatgactgatatggtaaataaggctccagtaataaaaaaagggcctattttggtggagaataagaagcgtaggactatagatgaaatggatcaggttaatggtttgggctctaatactgagttgggcccagaaactgatgatgataatgatcaagttagtatggaacaagacaatatcagtagcccaaaaaactcgaatggggcgggtctcggtgcacgggcccgccaaggattatgagcatattgagctggaattgccgtgggcttgggaccccatggactgttcaattccttaaggatattgttatccagaagagacccaattttatttttctttgtgaaacgttgtgcaaaaaagcaaaagtggaacggtttaaacatgccataggctttgaaggaatgattactgcagaagttcaaggtcgaagcggtggtattgcttttctttggagatttcaggaagaggcgtttcttcaatcttatgatcataatcatattgatatggtcataaaggttcaaggttggcctgaattccgtctcactggtatatatggtgaacctgatcgcactagaagacatttaacttggtagctgataaatgatctctctcttcgttcttcattactatggtgcctcattggggatatgaacaatgttctcagtcaaacagataaaaaagggggtcgtccttatcctaattggttgttacaaggttttcaagatgtcctatcaagttgtaatttgattgatatggatatggaggggtatccgtatacatgggagcgtggtaaggggactgccaattgtattgaaatacggctagatcgtgcactagtctctcctacttggatggacaattttcaagatgctaaacttgtaaactatgagatttccacatctgatcattctccattgtttctggacccgattatgcgaactgttgctgctacaagaaggaagttcaagttcgaaaatgcttggctccgtgaacctatgtgtcgtacgatcgtggaagctgcttggtcttctactaatgatcaaccgttgacttcgaaaattactcattgctctactgttttggctgaatggggtaaggacatcactggcaactttcagcagcgtatagcagccagtaaaaagaagttaaaaa

SEQ ID NO: 18181 - DNA, 5537 bp, Cannabis sativa
accataggcatgccacacattttatgttaacaacatgacaaagcaagctagaggaaaataacacttagtgattaattatcaaccacttaactatttcttgacggatgataaatttcttctaccaaatagaattcacttttctctagcatctcaaaagcaaaaatatttctcaaattttgacctaaaatccgactttttgaaattgggcatcaaagaagaagacaagccaaaaacaacgttttgcatcctgaatcaccatttctaatggacagtaatgcccttcgaactcaaaaggatgccatcccttttcgagatggcaatgactaaatatacactctaatcctaaactaggcctaatctacattgatgatatactgttgttctcacctaataacaaggcccatgctaacctcctggcccaatttccagagatagtgaaaaagtatgggattatgctttctgaaaagagatggtagtgggataaatagaaatagaattccttagagaaagagcccagacgagagtttggcaaaagggtagtctggatagaaagaaaatttttcggatataatctggccatatcccctgatgagagtcgaatgaagttctagggctctttggattgctataacgcttgggtttttggttttgacaattttttttttgcatcattggggatgtagaaatgataagagataagttagctatgtagactaaggtgattggatttttttttctttttgtgtattgatcatattttagtagttttgcatggttgagagatgaaatcaaaaatgacatttgtttttcctttaatgtatttgatttgaaaagtttaacgtgagaatgacgtggctaatttgagtagttgagcattgactactttattctgtttaaacatgagcgtcctttaaaattctgcaaagtctgtttccactaaaaaattatgctcgatgagtacgtgcaaactctttttttgaatttttgaagaagtgtcgacacccattatggaagaatgaagaatcttcatcttcttccattcaagcaaaatgaatatattaatccaactaaagctagccatcttggaatgaatcctgaacatcagcagatggaaagcgaataatgtgaccaactcaaatcacaagggctaatcaaagacactaagtcaccataggcatgccacacattttaagttaacaacagggcagagaaagctacaggaaaacaacgattagtaattaattatcaaccacttaaccatttcttggtggacgataaatttcctctaccaagtagaatttcacttttctctagcatctcaaaataaaaaatatctcaaagtttaacctaaaatttgacttttggcaattgggcattaaagaagaagacatgccaaagacaatgttttgtatttggaatcgctatttccaatggacagtaatgctctccggacttaaaaggatgccatcccttttttagaaggcaatgactaaaatatacattccaatcttgaactaagtcctaatctacgttgatgatatactattgttctcacccaataacaagaaccatgctaacctcctagcccaatttccatagatagctgaaaagtatggggttatgctttctgaaaagaagatggtagtgagccaaccaaaaatagaattcctcgaagaaataacccatgtgagagtttggaaaaagggtagtcttgatagaaggtaaattcttaagatatagtctggcaatatcccttgacgagagtcaaatgaagttctagggctctttagattcctataacccttggatttttggttttgacaatttttgcattattggggaatgtggaaatgataagagataagttaggcatgtagactaagaggattagatttttttgtgtattgatcatattttagtagttttgcatggtcgagagatgaaatcagaaatgacatttatttttcctttgatgtgtttgatttcgaaagtataatgtgagaacgacgtggctaatttgagcaattgagcattgactaatttattttattttaatgtgagcatcccttgaaattctgcaaagtctgtttccactaggaaattgtacttgatgaggtggaactcaaactttgtcattcccatttttactgccagtgtctctttgagtgtggaatggtagtgtagttgagaatctttaaaagtcccacttttgtaactgcacactcttcgtttgctacgattgtcttcttctactaggactgctccctagtgtttggcacttgcatctgtctgtaagaatatttttctataaaagggggtaggccttgcattatctcttttagttttttgatcatgtccatttgttctctttcccaaggcagggatcctttttgaaacattttttataataggtttgtgatcttagaagggcgagggggcacacaaaatctcttaggtaatttaatattttgaggaattgtaggatttgtgttttcatgaggccttcatttgggaatttaacatttcttgggctatgtgttattggacgtcatattttccatcatgtagtttcattctgagatggccaaccccagggttccccttagtctacacgcccaacctatctcttatcctttccacaattcttagtgatgccaaaacaattgtctaaagtaaaaaacccaaggattaaagtatagcggtcgctatactggtatctcaccagttcagacactatagcggtcgagatacacacaatatgacttctaacctccgtccatagctacgtacaacatcttgacctaatgtcttcttaccaacatccaatgacaatgtttcaatggttcaaaacattgcccaaatagaaggcactcctcacattggagtgggaaaagatctgcaataaaagaattgtgggactcaatttcccagctagcgaaaacaagaaatatgcactgcaatgttttacaatcttgccactaaggatacatatcaatctagacctatcatttacaacaagtgtcaaagtacaaaagtcaagtgagcaccgacttgtcgtaataggaaatcttgaagatagaccgttagaaaagcttttattttcattaacatggagattcctgatgcaatctagccaaaacctaaagatgacacaccatgagaatattatccgtccgaatacctctaaaaactagaagacgatatgtttcattatacaaaacactatgttgaggacaactaggttaactacaatccaattttccaagattcgcaatacccaaacactgcctgtagctgtccattctcacttaatgaacttgatgaagaaatatgctgacgactagtaatgtcttaacctgtcaataacaaaacgactgcgacaacaaatggcaacaagagagcatgtccatctacaggtgtgaagatgatagtgacacagatgaatgcatgaaccttagtccgtcatgtgagtccattagtaaaaaatgataggtaaagcacctgaaacctgtaaatgtacccatctatacttgtgccttgtttgtttatgtcagtaataaggtggacatgcgattcttgaaaaagttagtccattgtttcgtgtgccaagatcatgtgccaactcagaagatcaacagagatttctacacaaaaatcaaatggcttctaaagacaaatgaatcatgcagacgatagagatttctctgatcatatgaaaaggttgtctgtttgttgttataaaaaaagtctagaatgctttctagggaagaatgtaatttaagtttttgtggtttcttgtacttttctgttagaagagagcctatatatagcctctcattctcagttgtaaggaaataagttgaaatattatgagaaattaaaaataaaaaatataccgataacaataatacagtaaatatctactcgtaaaataatataaactagcatattatattgcttaattacataggaaaaacttgactgaatctatataaaattaacacatataataccttgaaatatgatatcaacacatgatatattgaaatgtgatagaaattgatagaataaaaatataaaactcaaatatgcaagtatttgaacacaattgaaaattaaaatacaataagatcacgcaacatatagtctcatctctaatctcaccaaaagaactctggcctagttgctattcattttcacaagttttagagagaaaatatgataaagaaaatataagattaaactttacaataattttgctaaagaaaattacgtaaaaagaaagatagcccatttgtccataatctgaatcctatttataaagtctcacaaatggtacaagaaaatttgcaattaattttcaaataaatagaaattaaattgatttaatttgattaatctattataacatttactccaaaattgtaggcattatttcaagatttggtcaatgaattaattttttgctcatttaatgagctttatttggaccaacaccaatatatagagaagaaaataatagaattagaaatggcacatggcttggctctatagatatattcagggacaatttatatggggtactatttttgtaatgccttaatgctaagtcacgctacagtgatttatcaattgtagtgcaatctttgctaatcaaagaatttttctcgaaaattgtaacaaaataaaacttttaatcttaactataaaactttataaactttaataaaatatttacaagtgtcgggatccctttgttaaacttttacaaattatacaaaatataaatgtcaggtcgcacatcgattgcaaaatagaaaccccagacgtcccgagaccaaacactctaggttgtgccgccatgacatgtacaatcccatcccagctcaagctcactcctattcagccttcccagtcctttacctacacatgagagtagaactgtaagtcgacagactcagtaagaaaagcatataacatatcacataataacgacttgtatctaggcgcccatacacctatttacaaggcttaacagatgagtaagagcgttctaactgagatacgaccatgtactactatacaacatgcacttagtaccaccatcgtactagtataggtagggtatgaatcataccccgagtactgttaaatgtcgtaccacatacaccgtgtaacttcccgtactagtgcttgtaataccgtgatgtactcttctgacatcatacactttatcaatacactttgtacctctaccgtacaagtgttggtagtgtatgattcacaacaagcatgcatataaatatatatttcacacatacatacattcgcatgtatatcatatgttctacactatttttacctcttttccgaattcaattgagttggctgacctaaacagaaagtctcgtgctggatggatgcccttagcttcaaagttactcgaatccttggcttaaacccaaaaaataagatgaaaagatgctggttccttctaatttgggttggagagacaaagagagagagagagatagaga

SEQ ID NO: 18182 - DNA, 7324 bp, Cannabis sativa
  modified_base (7266)..(7266): a, c, t, g, unknown or other
aggcttgttcaaatagttgaagcagaagaagaacactacgagcctccctttcaatagccttacaatagatatagcaatcatccgcaaacaacatatgagaaattatgggggcaccattacacattaatttcgttaattttaaaacataatttatttcaatttttcttttaaaaaaaaaaaacacacaacacatttgcatttgatcacataaataatttattatgtcgtcttaggacttgaaaggtagaaactcttatttcgagacatgtcgtttaccactacaaacgacatgcagtttatttattcaaccaaaacaaacgacaagcgtttaacacaacaaccaaaaacgacacaaaaattcctgtcgttttccctaaacaaaaccccctcaaaatctcagcttataagatatttcttttatctctgagctttatccaaaaaccattcttcttcttcttaagcttccaacaatggagggaagctcacttctcaccacatcttcatctcttccaaccttcataaccaaaacccatttctccttctccatctctctctctcctcctcaaactttctcacccactttctctcacatcccatcaccattccactctctttctctctctctttcctgccccaaaaccagttcttttcgaacctcggccttcacagttgaccaagctcctcaaatacccaccaaccattcgactgaacctttgcccaagactgataaaagtggcagattttgtagcccaagagctgctagagaactcgctctgtaagtttttctaaaaattgaacctttttctttctttctttctttgatttgtatcattggtggaagtaatttaattttaattttttggcaggtcgattatttatgcttcttgtttagaagggtctgatccagttcggttgtttgagaagagaatcaatgctcgtagaggtaaattttaaatttttcttactttgcttgtaagtaaatgtaagagtgtgttgagttagcggtttactacaataataataattaaaattggtaggactcacgaaaatatctgaatagatggaactgttatgtggatatctttgctttggaattaaaacaattagaattagtcggtgaactggaatttgtattatcgccgtcgatacaaagatgcctattagttttatttagttattcagttgaatcaatgattcgttattgtaagatatgttcttagttgctgaaaacatatgcatcttagtatttcaaaagaatgtattctctaattattggcaattaattttgagttgttagagatttgatttaagattagtatatattagaatatcacattatcacattgagatatgcacatttggttttttgttcatgctgttttttgaagtagtgtatgtgtgttttcagaaccaggttatgagttcgacaaggcatcattattgcagtataatcatatgagctttggagggcctcctgtcacggtagagactatcgaagaagcagacgagctaacaagaaacgatgacaaggaatctgcgattggttagtttgtctcaaaactaacttgccattacttactaaagtagtttggatgtttgaagtggaaagacctggtgctttgaagaagctcttaagtttatacttatttttccctctttgacattgagctcatttagctagaatgcactaggtatgagtgaataattttgatcttgtgaatcgtagaagctaggaaactattggtggttgattggtaccagggtaataaccaaccaatatagagtaatgataggctactgatataggaaacaatggaaatgactaggaagaaccgatatttgatattgagtgaagaaagaaagtgataataacacactagagaacaataaggaatttgagagatctcaactctcccaagagccaaagttaagttacaatacaattctcatgatcctcccattcttactacctatattccatctcatctcattcactaccgattattactttacacttactcacatacccttcaattttcagataatgcttgtttatccatgttaattttctcttgcttttttttcaacttcagaagctgaggtcctttcagctcctccaaagttggtatacagcaaactgatcttgcggtaagcatatgaccgaaattgtgacttattatgatatgagtgaaaaatgtccattgcaatgaagggctaatagctttgtgttgatcttatgttgacagtttaacaaggaaacttttagttgcagtcatggatcagtgggatagtcatgtacttgttattgaccaagttgtccctccaaattggaaggtctgaatctgataccactttaattgtacttgagtttcattttataaggtttcctttcatacttctttatgactttttcttttgcttcaatgcatataaacagtaactgttaatgttgagtctcaaagctttgatccacctcactgagttggccagaaaccgatcacactcggacataaaacgaactcagaattcttggacagaaagtgaatgaatacttctctttattgtaatgagtgtttaatagttacaactagggaatacaatgcctaaaacagaaaactcggtcagtcaagctgaccgttccttaggcaactaacaaactaactcggtcagcagaccaagaacctagactagcaattaactgacagttaagatcatagtttttcaattcctgcttatgagtgacaaatcgaacacacatcgatagaaccatggataaggtagacctctgagaaagttgggtattcataaaattgatcattttctgcaaagcatgacatttctcaatctgccttagtgcaaacttatattcatctttttcagttttctcaatctgtttaggactaaaaataattcactaagcatgatcatttcgcatctactttaggatgagcccgccgggaaaatcttggagctatgtattcttcatttagccatgtctgaaataacagtactcgaaacccgacaccagattgtcattaatgaggtacattttcattctcaacctcttataggatttagctaaatgattttatgtaaattaatgtgtgattgctattccaaaggctgtggatcttgctaaacgattctgcgatggagcagctcctcgaataatcaacggatgtcttagaacatttgtcagaaacattgaagaaaccggtttacctatggccttggaagataagcaaaaggcggttactcttagttccacatccacagagtaacgaagaactcgggtcgtgttagtttgtagatgttggagaaaccacttgggggtgggagaaattactacaattttttgtttcattttggctcctatcaaagtggggagcagcagcacttagagcttacatttaaaaggggcttagtttgggaggggaaattttagaggtgattttgttgtattgagaaaaaactaatgtgaaatatgtattatataatttactcaacaaaaaaaaaaatatgtagtataatttgataaaaatgatgttgtataattatataaggatttttgtattgtggataatccaataatactaatattttcttctattcaaagatattcattagagattggttaatcaaaatcaataaagtccatcgtaacttaaactactttggtataagatatcaatttacattgtgcttttcaatgaagattttaagagaaatttatttcacaaacccactaaaaggcatgtacaataactttataacaaaccaatctaattatatcaaactaattcaatttaattacaaaaagtttgatagccactaataattggatttgattagatgtgaataatttgattgaattgaattacaagaataatgttggattgaatcaaatgctcacctctgctcacaggtgtatttcatttgaataaaatttgtactatttcttttttattcaattatgagaaaaaaatagcaagacaagatcttcaagtggcaaaaaattatatatttatttctaaagcaaaattcttgatgccaaaataataatacaacataatgacaatttccatatcatatgtacaaggcttaagaccacaagggaagaaaattgatgatcatttatcagaaatattgaacagaaatcagcaaaactttcataaagggtcaaatgttaagggttaaacttctaagatttaactcagagatttctctgggaattattgaagggcactttgtatgaacaacactctaaatattgttttggcgcggccggatgaattccaaacaaccgagcaaggaattgcttttcgctcgtagctatcaagctagcaatggagtagtttcttgtacacaaaccgttctcatcgagccaaacataaaacccgtatctgcgtttaattcggttttctaaatcgaaacacaaaaaagctgggaatttatcaaggtattgcagtgatgatcccatatcctggcacaaaaaatctaccttctgttctaacatttcggggctttgaccgagaatctttggggcaatccttatgtgaaaacacagctttgagtattcaatacctttgccaagaaggcaatcgaaacgcttttgcaactcattgctagttccatgtaagtttttcaaaacctttattgtcaaagcattttctccaaacccgattcctttcaaaaactcgagtttacacatggtatgaatcggtgtcctcgaagattccatctttttcaatgcactaacaaactctgtgtctaaatcttcatcaggtgaagcaatggtgtaagatgccaataaccgaccattcgagctcttgatcctatcgaaaaaccattcatgaagatccaaagccctcataaccctaggcaaattagccattttattccttcccaacacatgatgatacttttcactaacaccctgcaattcctcagagctcaatccaaaatgtttcaacaatcccgaaaccgaaatcgcaggcgtttcaaaatcaaaactcaacatttcgggactctgaagaagaaacaacccaacacaatctgttccaacacccaatttacaaaaatacttcactttttgaaccaaaacctctttagggcaatcaagaaaaagccctttctttctacacataagttcaccaacttttcctttctcacaacccaaatcataaaacaccttaaccttacaacaaacctcaaaccaagcatcaacatttccttcaacagaaattcccatattaaattcaacaaaaacccttttcaaatcacaaaacaaagcctcaatttcaccccctaattcatcactttccaacctcaacaaataaggaaaagctaaacaaataccaacaacagataaattcccaaaccctaactccttaaacccattaagtctatccttaatctcataacaacttctactaaaaatcaaaacttcgtctctatacaacttccctaacttattccaaggaaacccaaatccagaaagagcaaaagcaacattaagaacagacccatcttcagaaaagaagaatttattcaaaggcaaaaacccattaacttcactatgatcaatcccaatactttcaaagaaaaactcaaattcattaatgggttggtaccttaacagcttcctgaagcttctggagaaagttggggctgaaaaatcgatcttcctgatcaaattagcaagagaaacaatcgagtttcgaccaatgtgttcggcataagtaaagggcaatgatcttgtggcatgaagatattcaactaaagctttctgagcttcttctacgactttgggtttgtactttgagtggatttgaggaaggtttgggtatctggagagacccttgggtatggcggaagtggatgtggagaagtggcgaaggacgatgaagagtgattggggaatggtcatgtttggtcaaaggtcaaagctttgaagtgttgtgacaatggaggtttaaggggttttgtttattcctcggaggaagaagattgtgggtataatcggccattgcaatgggccgtagctcagggaagatacgccgggaacggcgagaaaaatcccatctttaacaaatctcttaaatcttttatttatttattgcaattttttttggctatacatattagaaaatagattcttcaaaaaaaatatattagaaaatagagtaatttgtagattattaatattgaaatgagtaatttgtgatataaatatttatgtttaatttcaattgaaaataaatacttaattttaatttttggctaagttatattttttagaactttgtaaataattagttgttaaattttaagtcattatctcgtgtcattttttattgatatatttaaatttttttttaaatcaaaaattgtcacgtgatagtttacttaacaattaattgtcacgtgaaattttaaaattatactttaagtattattactgtcaaaaattaaacttaggtatttatttgcaatcgagagttaaatttatttatgtcgtaataaaattatatgatgatacatttttatttgtttctggattggaataattttttttatagtcgttggagctatttaaaattgttgcctccgatttttcccaaaatacgtgacagcgactgcatgcgacacgtagatctcaaagaacatccattcacaaaaattggctaagtcataggcaaagaagttcatctcacggagtgggcctcccagaggagagcatgagacacgtttttactctccgggaggctggacttgtaacaaggcatttccgggaggaaaagagattattcgaacaatcacttcgcatttaatgctgcatgggggaaaacgtatcagaatctccagaagaagatttgacagatggtgtgagcctctttttacggcgattacacgacaatcgacaagtctagtgacgactccattatgaaaactcacatcaatcaaggaggataaaagattatattcacctaatccctaagatacctacgacataggtcatgtatttcctattttgtatttgttagaaatttgtgcctctaaggggctaacactaaaagacaagtaatccctttctagaaattctcccaaaaatcactataaatacccccaaagacaaaatgaaaaaggggtcgatcgattaattaaggaatcgaagggagtaaagaagagagagagagagagagatttaccaagaacattctctataaaaaatactctcataaataacaaagactcgtggactanggctcattaatgcccgaaccacgtaaaaagcacatgcattaaagcttctacagctctt

SEQ ID NO: 18183 - DNA, 2634 bp, Cannabis sativa
gggacaataggctctattttgctcactcaagaagtcactgcatgtttaactttctttcttttttttttcttgtttttttttattttttattatttttttttttgagaaagcatgtctaacttaattgtaacagtaataaatacatgatctcataaaaaaaattaaaaaagaaaaacgcaaatcatctcaaaataataataataataaacaaagttcaagttcaaggaaaatagccaaagtactctcttttttcccttatgccaaaattaaattgaagagcaagagtgcaatgattctttcaatctcttccctatcacatgacaatgatgctttgcttttttaatttttcccatgaaatgatgcttagctttcggattagcatggttatacaatttgtatattgtatttcatattgtatatacactattaatttattataaaattgagagacataatttcagttgcctaaaaggtgggtgttgctggtcataatgttttggaacatgacactacatcctcttctaagtagtattttatacaagtttattatgagttaataattttgatttgaagtatgattaatcttattatatatcctcatcatctaatatcattagtaattataacactttctgatacttatctttaagagtgaaataatgtagaaagaaccaataatactagagagtatcccacatacattttcttcgtttattgatacttattaggaccaaaagtttagaattattactcttgagtcttactaattaagcttatattgctaacaagatcataattaattaggatagagttggagacaacaagcaatacaactacataatctttaacaaacccaaaaaaaaaaaacaaactttgattttttaggttcaaatattattttattatcaatttgtttacctgatattatattgtgttgctttgttcaatttgatgacaaataatgtttgagtaatcaatatccatactgtaattgaatttcggataactaccacaagaagtcgatttttctttattgacattgatcatttgattttattttagcaaatagattatagattatattatgtgaacagactgttactgaaattaaacgaagaacgaaattactgaataaaatttttggattgagttgcggactaagtcgttcttttatatttgtggcactgcttaagaatgtgcaattaagcagtcagaaattaccgatcatctctaggataatacaacccagtcgaaaatctactatattagagctttactacacgatagagaaccgtcgaaataccacactcaaatactactgctcggaatacttatataatataatcgtaaatataaattaaaaatgattctttttctttgagaaagatgtatttctccagttagttataatgcattatatagaaaaagcacggaaggtagtaatgagaagatagacgtttttgattatgtgaaagatgagtgggatcgtgggaacggtgctaaaaataaagagaagaaatcgactctgtttaccaagtaattaaacacctttaaaaattgttttaatttattaaataaataattttttttcaaaaaaataaagtgacaccacaaccgcctgcttgactcagccagatggcgaagcgaaagtagcgcgcatggtgatccagtgtgtgagtcatcacccacgcacacaaaactaggtaccccttggggccccaactcatgtgccaaattcgcacattatatacacttctaatgaagtgttcatatcccatatgagactccactcacacacttcacttctcatgaattttgaaaaaattccaacaaatcataatctcgatttttgtatgatcgtattcattgtattgtacttataacaagcctcctaatatattttggaaatattcagatcatatcatactgttacgaaaaatagaattacccaaccatataattagtagtgttttatttaagttttatttaggattttagttttgtattttaaatttgagattgacaaaaattaagaggaagaggaagagcttggtagaaaagctttgagtattgtgataaactctaaaatgggtttttctttctatctttcttctcttttaaattttgtaatttcaaaaaaaaaaaaaaataataaaaaaaaacttgtattcaattatataattaatggtctaagttaaaaatataaaaaagaaaattaaaatcttaattttttagatttttataaaatttccaaatttcttgaatataaattataaattttcaaggaattaattaaaggtgtctctaaaaccatttattagaattctttaacactcataaaatatgcaatatcgagattgactttatagataaacatactacatattattataagcatagatttaaataaaacttttgttgatttaaagagaagaagaacatgaataagggaagcgtaccttaatccattgatcaaaatgatctttgtagtgattttgagttatgatcttctaaaaatacaagacttaaggtttcctagttttctctcttgatggggaagatgagaatagagtttcttgtttcttagagaccgctaccaatatataaccacataactaggttattaattttaag

SEQ ID NO: 18184 - DNA, 9686 bp, Cannabis sativa
ttcatgaaatatggatttaaaataatgattgtgatgatttggatgtgttcatgttggtttatgtgcgtatttgatgaatgtttgttaactacaaattttgcgacgaaaaataattttagtttcgtacaggaattattttttctggaaagtaattgaaaaattaatgaataagcttttataaacttaatttggattttcattgaattagttatgatttttttgaattttgaataaaaatatctaaacctgaggcactacgtgcgggcgcggatttaagtgcacctcggtcatgaccgaggttcagaaaaacctcgtgatagaggtttctcggacagatcttgttcgaagcatgcatgcgctgaggttcctcggccaagaaggttgcacacagcctcgtttcctcgcccagtagccctattgcgcgcccagggagtatgcattctatgccatcttgttattgtgattttttaacttttagaaatcagttttcaatgaaacaaaattcaaattttgctagaattttgtgtcacaatacctaaaatataacaattgaatgtggaaaaaaaaaatattagtgctcggtttagacgggttaactcgactaaactgaccaattgggcgggttgcacttagatttttgtaactcgatatttacattgggttaaataaaatgtaacgtaaactgacctacgtacacccctaattagtggactttaaatttgaaaatttcatttttccacaaactagcctttacggttatttttgaaatttgattatttttgtttgttttattaattttaattataagatcagatatttacttattttattaataaaatttgaaagggtcttattttgacattaaaatattaataaagcttaaatataatttagttagaatttcaaatttgctaaccatatcagattttcaaaaaattttattttttaaaatatattttattaatttaaattgtaagattagaaaaatgtttgttttgacattttatcaagatttgtccaataataatggcatcactagcatttttttttttttccaaaatagagaataacgaaggggaaggaatgatgagtgtatacaataaaatgtgagcaccgtattttttgtaattaaaatagaaaataccgtatataagtttaaaatctcttgtagccgtattttgttaatttttaactctttttgtctgtatatgaaaaaacttcccaatattaaaactacttgaattaaagtatcccattaggtttcccgtgttccaatgaattagacattttactcataaaacccaaacgctaagctaacctaattaaacgggtagcacaaaggaaaaaaaaaaaacctaaattgagagaagcatttgtttgctacattgtgttttccttttcaagttagtttcccacattctataactttggttaaaaacttttgcattttaaaataaattcatcattgtaaaatctattccttgccgcaacaaatacataattttaattatttattagccagttgagtataaatagctgtgacatgtatgtgtattaaacacaaaatattcattaaaaatcttaagaccctgtaaatcgaatgggtttggtttcaatgtcaaataaagcttacagaagtaaaagaagcaccagtaagtgaaaacatggctagcaattaccgaatgccttaataatatattatacttaaacacacccatactactaaatatttttactgctttcctacatagctaaccaatagatagtataccgattgagttggaatgccactacctgttcattcctaaacccaaaagcagactcttgatgacatatatagtacaaaattgctaaagggaaaacttattgtacactagtatgactatcactgaggctcctatataagtaatcttccaatagatgaaaattcaatcactgttcccatcattatctgcatacaaagaccaaatatcttgtcagggttagacatggtaactagaagagataatgtagcttcgaggagtttagtaatatgaatattatacaagaaagaaggtaatttcattttagtagaatgttagtagtatgaaatgtttaagtgacaggaaataaaaagaaagactcgatcatatattgattccatgtcttttaattatgtaaatgttgccttattcgtagagaccaacacaaaatgcagggggctaggtgattccaaaagatccaatattaatattaaaaaattggtttagctttaaattgaaatcaaatactacacaagaacatggattctgcatcttggagcataacatcatataaggcttgtaacattaagactgaactgactgaaaactctacaaaattccagccaaaaaaaacaattcaacctttatgtcacaacattgaatgccaattctataagatgctgaagaaaaaaattatacggctaacccctaggtaatataaggcttgtcataatacctactcttgattgcaacttgaaggataaaatagcagataaaacattaaaacttaccctcattagactcttcactctggatgtcctcatcactatcaccatcatcgtcatcctcatcgtcattgtcatcttcatcttcttcagagttgtcaccatcattttcaactggtattttgggccttggaggaggtacaaaactggttgtcgaccttctgcgagtactagatacaatattgctcatatcaatgccctcaagttcttttgctctttcctttttctttcttacttccttgatttctgacaataagaaattgaaaaatcatcaatcatacaccccaccccatgagtgaaattttaagttcaatctactatgctataaaagaactgaaatttcaatgaaaagaaaattcagaaataatttacacaggaagtacaattaaacaagttttttataagaaaggacatggtgtattgttagaagatgatattatcttcctgaaaaaaccaatgtttaaaaaggtatttttgaggcacgcctcaacttgaggcgttcaaaaactgcaccagggcatgcgcctcaaatggtgaggcgcttcgtttttctgtgaggagtgaggcagaagaggcatacgcctcaaaaaagggcctctttgagccctaaaaaaaaggcccaagtcactatttttcttttgttttctgcttttaacttaaaacacttaaaaagccaaaataaaatttaaaaccctaactctatcttcttcccccctttctcttctactacagctgctctttttcttcttctttccaaatagcaacaaaaagcaaagcaagaaattaaaaagaagcagcttgctgccttgctcatccctaggtgttctaaaaatattatttcaattaatttttgaggcttacgccttgcctcacaaaaaaaaaaaacagctcaaggcatatttgcgttattttaaacattggaaaaaaaaaaacaaatatgctatgacaaaagctagaaaagaaattaaaaaataagagaaattatgttaatcgtttactaacaccaaaaatggaaaacttctaaatcaacactgttaaatatccttagtgctaccctgtacccagtatatcttccacatggaagatatatcagcttccatatcttgaaaatttctattgtttctctcttaacacaatacccttcagtaaccaagactgcagcattctacaacttctagcgcttacttccgacacaatcacacaaccacctatagtgcaggtagttcttgagtctaacaagatggcaaaggttttataaatgtagctactggcattagttggaagaaattgattaaacaattatttggaggatattttaaaaatatcatttatatttatagattccttagtgggtttctcctttcaccttggcttgcctatcacggattgagctttgtgtgcatgcactcccacatgcaatgtatgattctttgtttaatcatcttttgtaacctttgcttcagttctaaatatagctctttttgctcctccaattccaaagaagagaaatatacatttcctttcaacactaacatactgtcatgtttttattttaatactcgtcaaatcctcaatttaatttcttttacacttttactacattaatgtgcatcacctctttcatttctactctaatctgccatcccctacctaaaagactggcattccaggacctagaaactttgtttcaccgttaaagtttcaacaacacaatcagtgtatgtgttagagagtgcactaagacgtcgaaagagatatactgcccaaagtcccaaatctatcactttataaagcatgtagagcatattagcatatagatgagaaaattgtacagaaccaatatgcaatagtgggtctctctcatacaaagagtttgaagtctcacctttttcagaggaattggcagacaatccttctttagacagcatctcctctaactccttttctagatacgattcacgtttgttttcagacacctgcttggctttcttgtaaactatgggaggaacactgtaaaaatgataaattaattttaaaggcaatcattaacaaaaatgaaagctaatgaactctaagtcaaagatataaaacctcatcccacatgctttgataacggattttagactttccacacgctttccatatgcaggtgcagaagctgacaccactttcttctgcatttttaatgaacgagctataagcagaactacatcatttaatcaacttatatgagctgcaatgaaaaatattttcacctttgtagatttgtcagcagatgattgagaatgatcgtcttcagaaactatcccattgtcttctgcaccaatattgtcctctgtcattgtttctttagccttgatcctcttcttgccagaggcatttgtatcctttgttggttttttcctttttttggattcattagagttcttttttctagtaattgatttctttttaggtttgactagatcttcatccccatcacttccactattcggagaatcagaactctcttcatttctagtttttctagctacttttcttttagagtccttaacaacatttttctttgcattggtaactggttgagacacttcgcaagaaattagtatctgattaagaataaacaagacgttttatcaaacatactgattggaattcaataatgaaacataagaaattctactcacctcatcaacttggtcctttataaactccttataggaatcaagagccatcttttcaagttcaagatcttcctccaaaatccggcgaagtccggcaagtgtaacttgcctgaaaaaggaaataacaagaaagtgatgcgggcggatttctatttttgcaagccaaatgaaaagtaacataatagattagatccaacagttaccaccatatatcacccgagaataggaaacaaaacgcaaaagaatccggtgtgacattaaaaaacaaaataatgaaacaagaaaataaactgctaaacaattcaaataatgaagaaacatactctgaattatctatcagataccgagctcttttcctaagggccatttttattgttgctttactcagagcctttttttcattgacttgttcagactccttattttcaagtttggttgttttctttccagtcaaaaggcctaaaacaggtgaatcattcattttatctgcatctttagaaaaagattcactggcgtcaatgtttgactcatgaccttcagttgattcgcattgctcatctcctgctacacttttttcagcagtctccatattactttccttttcactcctctcctcacagttctttgaatcattaccatcatcaacaccttctaacaactacaataggaaaaaaaccaataaaatatgtatagagtgctcagtagttataaaagaggacatttccaaaagcccatctacaaagaattaattacaataaatgccccatataagcattgacaagcacaaagaaaatctatttacaaaaagttaataaaatattccaccaacaaacatttcaactcttatcaccatgcaaatatttctaatggaaagaaacttaaacaacaaatcaatgtgctctttatcaaagaaaaaaaaacacacaaacaaaaaacaaatcaatgtcctcatggatgattaattcaatcactgatatgcatgtcaattctatcccgtgaacatatcgtattaaacgttcattttgcaccctaagattgggatccagcaaccaacccaagttgtgctcagacaatatcaaaatgtttattccatgaatccagaggggctccttcaacagcaaaaacagtatcttcccagtaatttatcttaccagctttgagttgagccagaaacatcaattcaagtgaagcatatgttttctttcctctcattattgaccacaatactaccctgtacgaggacaattctgctacttatgctatctttccaagccaatgttgatgatgttccaaaagatcttcaaagcatccctgaaaccatgaactgcaggtttccagtcctttcccttttgttcatttaacccccaccaagactccccgtgttcagctttattgtgcataggataggggtaaagtgatacatgttacgaaacggattaaggaatttgttaaaaaaggacagctgatagtattattaacggacaactagtaaggtaatttgttagcctaaagaatgaggatagcgatgattcaagagtttgtttggaatattctagtttgttgaatgggaataaatagagaaggagaacagattatgttagacctatccgattcacatactctaggagagccaagggtaagggttgggtaatatgatttgtcaggggctttttggtaatttcattgtggtgtagtaagaaagggctatattggctgtttgtgcttttgggtggggtatgtaagaattgagaacttctctctctacatctttgagtccgagagggattttccttgttctgtaaggtttcctttttgagtaatacaaagaaagccgtggctgtaagcctgtaatggcttaatttgctactgttccttgagttactgctttattgcttttattttgctggtttggttgaagtattgattagcaggtagcatgaatcttatcaaattaatattagagccaaccttcttggcgaatgatgaacactaagagtaccagagataaagaaacctaagagagatgatgcaaaaaaatgtcgctagagactgccacgcacatacacgcgtcaacgcgtggagagggtcggacagatgaaggtagtgcgtggggcccactcgcagctcagatggacaccaaatttttggattttgccgatcggaggcaagacaaactccctgggtcaaaggtcagaatagaaaactccttttaattagttttctacgatagagcctccaaactctaactttaagaaccccaaaattaagaaagggatgaaaaagataatatgctttgagaagcttcaaatgctctgacaccatgaagcaaatgagggaaaccattttttattttcttacatcttagtacaaacaaagggtatacatgatacaatgtgaacacctagtaatactatagtaaatgaaaaacgcattaaatgtaaatttacaactaatttacaggtagcttgatttcctacattatcattctcgacaagtttctgattccgataataaatgaactcttggatgagttgagcagcgccaaagtgttttccaagctcgatttaatgtccagataccaccaaatacgtgtgaaggcagctgatgttcacaaaacaaccattcgaactcataaaggccactacgagtttttggtaatgctttttggaatgactaatgcccctgctacttttcagtcgaccatgaacgagattttcaagccctttctacgtcattgtgctggttctctttgatgacatcttagtgtatagcctaaatgtcgaatctcatgcaaaacacctatccaaagtgctccaactactctaccaacattaattctatgccaattggaagaaatgttgttttgagcataccaagatcgagtatttgggtcatataatttctggagatggggtagcagtggacccaacaaagatacataaaatatgctagattggtcgctacctacaaggctacaactatttgagacttccaaggcttcttgggactcacagagtattgcaagtttgtggctggttagggtagtatagctcgccctcttacaatcaattaaaaaaagatcagttttatcggtcataggaagccaccactgcctttcagaaattgcagcttgctatgacgacagttccaattttggccccccctcatttttctaggacttttggggtggaaattgacgctttcggctatggcataaaggatgtcttaatgtaagaagggcaaccccttgcctacttcaaccaagttttgaaaccccgtcctcattttaaatctatttatgagaaggagctcatggcgatcgtgttggcagtgctaaaatggcaaccatacttggccagaagtttgagcaacaaatctaactccgaatacacagaaatgggtgattaaattgctaggattcgactttgagatccaatatcgtcctagcacgagtaatcgagttgctgatgctctatctcgaatggctacagtagagtgtactgtgctcaccactacttcatggctagattggaacatcgtgtcgcaagaaatcaatcaagacacctttttggcagcatactcgctgagctagagcatggtgatcgagttccgtgtttctcctttaagcatggcaagctgctatataagggtaggttagtgttgtccgcttcatcttccttgattcctcaatttcgaaaggaatatgataagtttcaacaacttatctctcaaagacaatcaaacagtaccaattttagggaagaattaaaaaagaaaatctctactagagttcaagtatctccaacaaaagtgtcttaattctatttgaagagattacaattggtaaagaaaacctccaggtctcagagagtctagtctccccactaaaccacaccaattccccaataccccactctacctactctattactctttcattccaactgaaaatacacacagctacccaaaaccaatttttaaaattgcgttcttattgcgcgcctcagtttgaggcagaaacttttcgctttgaggcgtctgccatggtagtcgtgggagaggcgtacgcctcaactgcttgaggcgataggaaaatggtttaggcataaatttcagtgaggcgcacgcctcagttttaaaactaaagattagggttttttaagcccaatttcattctgttatgtttaaaaaggcccactaaagtttttaacttaaataaagctcaataaaacataaataaatttataaaaaaaaaaaaaaagtcaaaaacttatcagctagggttagaaaaaagtcaagttacccacactcaaccttagacacaccattggagaagaaaactgaaaaaataaaaataaaaatggcactgaagattcctcctccgcttccaactcattatgccttagctgaagcttcatcatgccattattgctgaaattttttctaggatagtgaaatatgtaatacttggatca

SEQ ID NO: 18185 - DNA, 8756 bp, Cannabis sativa
tttttttatatctatttatcaaaaacactctcaaattatatttcattaaaatatacacacctttgtgatttcctcacctttcacttaagtctaacacataatttacattaacttaagggatataatggggagatcatatataaaaatagatatattttaaagaatataaaaataaaaataaaaattaaattatataaaataaagtgaatatacaatgtaaatttctcatctttccctattcttctctttcttaaaccgatcattattatatatttatatataatatataatattatataatggattatttcaagtgtggtaaaaacttacacactataatattatattattattactgtaatttaatatcgaatttcaattattttactaataaatattataaaaaaccgttaactaattatgaacgcctcctcataatagtactaggcaacttgaaatagtatcttataacaatgctctattttttatggcctgaaaaaatgaagagacaatcatatcacagttcgcataaaagtcctaattagtctaaatattgtgaggtaaaatatagagttttctttaaaactcctcatattgtaaaacaagaaagacaatcgaaccaaagtggagaaaaagcatgtatacatatgcagtttgagactcgagtaggagggatgaaaaggaaggttcaatgtaagaatagggaaggtatgcctttagatggggtgtcagtcagtacatacagcacaaatgtagcttaaaatccaaatccaagatatttcagctatttcattgatttaagtaaaataatggaaacccaagttgaataactcatccacaaaccctccattgaattgttctattatttaatcatatatatgtattatagcccatggccttgacaactaatcaacactttcaattgcagctggttggatttacaagctgaggcaatggtcttctcaccaactgcctccctctgcatcacgtgattggtagaaatcagttggccgcgcaatgttcacatcttcaaactcattatcatctgaaagaaaagagaagaattcaattgaattgttaaactgaacacgagccatattccattgtaatataactgttctgttcccaagtataactgtcatgaagagtttgaaagttgagctaatcgggaagagtttacaaacacctaatcccagttcccaagcatacttgcatacaagaaagcagtcagctagtaccagaccagaagcaacagtctttaattgcttttagcttctacttctttatccaattattcaaacacaatctccgattttctctcaaggttctgccaaaaagcaatgaaaaatagcagaatctaacaattgtatccaacttaacctaaaatacgcactcgaagaatgtctctcatgttattctgtttggtgaagcagaaaaagcattattatatgcaaagtattatcatctacaagctaaattgtaacgaaagttgcaccatactctaaaatctttcaacaaaaagaagctctccaacaataatctttatcaaccggagagcatatgaaagactaacttactacactccctgttctatgttgctaaagaagttcttacctgcctttgaagaaaagacaaaacagggtactgagaatattaaatttattgtaattgggacattttttatttttggtttgcatacggtcacttagttctttagaacagtaataactaataattgatatgacaggatttgtataccacacaaaggcagcagcgtattaatctatgtttctagtaaaaagatacgattccattacaaagaatgagagtaagaatatatcaaattgattccacaacattttctaaaataccatggttacgttaatgtaggattagattaaagaaaaaatataaaagaaaaaacatagaagaatggatgagttgatcatttgcaacagcaaaattagaaaaacaaacaaacaaataagttgcatgcaaagttgtagccctttttttcttcttcttaccattgaaatacatgaaaatggaggaccggatagggtaaattatacctagtttttgaatgaaattatgctatacatgctccgggattataagattgttggattaatttaattcttttaaatattctcttcaatttcaaaaccaaatcacatgaaaaaattattcaatccatgcctatataatctaaccttttatgctctttggtagaaataaactagctaactataatgtcccaaaatgaaaactaccaaagataaagcaaatttacaccaaactcagatgtaagccatttcaaacgaaatagaaaaaaggtaagaagaagataaaaccacctttcttcaaagtaagtgccacgacagaatcattttccacctgataaaagcaaagaaatttataattagcacattaacagataagtacacctataggaataagtacagcaatagaaaaaccaatcaactcagataataaaagaaaaaaagctgagtggtaccttctgatctgccaatgtcttcacatcctccagtacatgcccactactgaatagaatcaaacgctgatcatcaactggttgatcaataagaacatgtaatttctgcttaatatctaaaacagtctcagtcggctcgcattggatgaagtaagttgttttatttcgcttaacacgaatatacattgcctgcacaatggtgaaagtattcatcaagaacacagcagcaaacttgcaaagaacgagcaaagcaaagccattaagaaacacttcaagacattgctgcaagtatactaaatttactcctaaaatttacacattacagttttgagccatttgacattgaaaaatgatagataaaacctaaggaagaccaaattcaccagcatttgatgatccttccaaatgtggttagcaagcaacatgtaattcaaattcaatcacccaaaaattcaccaatcattcatatacatttcaacagccaaggaattttgattgaattaaagaattgagaacaaatagataatgttagcatttcattggaaatcaactctaccaacaattgataaccaaatgagaaaatgaaagaattggtaaccaaaaaaaatgcataaatcgtagagaaggtgggcaaaaaaatctcaacataaatcatcaaagcaaacgaattcttttatatatatatatataaaaatagaaattctacaaaaccctaataagtggaaggttgattaccagtccagaaaataattttgtttgattatggtctcaaattcctttaatgggtttctcagtaagcatagaatttagaaaaaggagatggaatcaacccactacaagtacaactcaaaaaacccatacacatattgtcataggcaaattgcttagctacccaattattgtttatataaattaattaaaaatatataaagttaaactaaaaacaaatacctgtgactgtgagactttcttactttcttcttcttcttcttcgaatggaggaaagtgaatttgtttccttggaagttgttgctttggagtgttcaaaagcaaacactatgcacttttccacattcatatcggcctggcccaggcccatttcaatttaatttgggcctaagcccaataaaagcacccaaaacggagatgaacttgttccgcctgaattgttctcctcctccgctcaaagctcaaggtttttgctcaatcatttgtactgtgtagctttgaacttatcattatataaaggattcattcaagtgtggtagcatattccagccatggatttgagttggctgagcgctattctagttggggcgggttgccttgctatgggctacttcgtggggacctctaaccctggtacgaattttctctcaacaagatcaattaaagacactactgcacttgtcagtactagaacgaacaagaagaaggataatcccaaagacccttttgagattgaaaacctagttgacaattttgaagatttcaagatggtatttttatttttatttttattttttctcactaacagttgaaaccaaaagaaccctttttttttttttttgttttcagttttttcgttctgttctcttttatatttcagattttggtggtgagaaatgatctaaagatgggtaaagggaaaattgccgcccaatgcaggtaccttattgaactttgacatttcccttttatgctttatagatagaaaccacatgttgcaacaagtatttgaattaaatcttcaaaactgtatatcttggagttaaaaaatgaacttgtgagatcattctgctgttcttgtttggcctttgaatatacattgtgttgttattcaatatctttcatggggtagccaagggcaaaagaagattaaaacaaattttcacgtagtacctttgttaacaatgaaaaataatgaaaatactttatggcgccttttattactattccaaattttggtactaaaaacacttttaatgacaaaattctttactgtatttgatagtcatgcaactttgggcctctataagaagctactccgccgagcaccaaaagccctgaacaggtaccgtctttggctatctatgtttgtatttgttgcatataccgttgatttggtttgctgtttccataaacttgcagatgggagatgtgtgcacagcctaaagtggttgtgaaaattgagagcgaggaggatatgctcatgttgcaggtcactatctcttaccattcttattcttaccaagtcaggcttgatattgttttgtttgtttttgaagctttctaatgttctttcatatcagagttatatgcaatctcatctgtatttccattgctgtcattgattcagagcattgtttaatttttttttgtttctttttcactgattttccaacacttggtgatgaataaagggactgatatttcttcccttttcaatccatactgcatacattttgtatatgtggtgctgaaatttgtgataagagcaaggttcctattaatggttgcaggagaaggcaaaatcagtcaagctcccaacccatattactattgatgccgggagaactcagattgcaccaagtgagtttgctgtaacctacaatatgtagttcatcaccatttgaaatagtttcttttttcttttcctttctttttggtgcattgaagtggaactactagtatgccttaagacttgttcgaaacaaattacttggattgaccaaatgatcatattggtacttcaagagccttaatgtgcattctgattccaagagcttacttgcctctcttctttgaaatgcttgtttgatcataaatgagccatacatgtatggtatgaatctatctagtgtcgttctgctgacacattttcgcttttgttgcagattcaaggacagtgatggctattcttggttagtcttttgaattgcatatccatttatctttagtgaccacttatgatattcctttctaaaaagtgagcattaaacttcggtttatgtttgatgtgcaggacctgtcgaaacagttgataaagtaactggtggactgaaactgttgtagctttgctgaggtgaaatgggcttggttgggtgattttgaaggctagctatctatgagtgaagacacatgtaaggatatatacagatagatagatagatattcttaaattgaaacaaacacattgatccattttcatggacatcttcagtttgggacattattcacgtcttgttattaccaattagcaaacatgagttttaatcttaattgagtagtttgggttgtgtacatgcaacactttaaggtgtctaacaccgacattttacgtttattttaaggtgtttaatgcagtatttggtgacactccgaggaacaaactcaatgattagtcaggatatatgtcactcacatgcaaatgacaataataaaatgtgaggtagcacaaattaagtcatccgaaggtcacaaataatgtcccccaataacatgtggtgacacaccaaatcataaataggatccgttttcatgagtggaaaccatatggtaatggtttctttcttgtgtgttgagggaaggggtgggggggtttggtttgaattctacaaccattgtaatggggtttcatatcatattgcaatgttttccgcaattaatagatctgagttgtgttcgagtttaattctccttaataataatcttttaacaatgaaaagtgcttaagaatattagtatatctatgacatttagttagttatttttgataatctgatattgaattacaccaataacgagattacacttcataaatgtgttaagtactgtgggtgccaagaaaggagaattattctatatgctattttttaatttttttttttaaagttacggtttgggttgctccaataatttttaggtgggttactatacgaattttggttgcgatttatgtttctccgttagttacaagggagttttgtgtagaattccgcataaatacaaatttttaaattgttttgaagtataaaaataaaaaacttcccaaataataaaaaattggggaaggattcatattatagttgcaaaaaatactaaaaatgcaatggtcggacgttaattacattttatctgtcacaaaatttaaatttttaatttaaaatcactattttcaaagttacagtttctaaattaccgaccaatcaatgtgctaagtaataagtattccaaacactaataaaaaaaataaaaggagttgtcaaatataaaagttgaatcaatggttgataatgacaaccaaacttattatttaacatatcttatgataataattttaaataaacaaataaagtcttttattgacttgttcatgtgctgtatattaataagttttttatatctcttaaaagccatatccagtctttcattcataattactacatagattataatcattatcattatcatgagtagaaaaacaacaacatcatcatcggctaagctggacgaccaacaaatatctgatctacgagaagtatttcgatcattcgacagcaacaaagacggtagcttaactcaggttgaaatgggctcaatgctaaaatcattgggcctaaagcccagcccagatcaagttgaggccctaattaaccaggccgatacaaaccacaacggcctagttgaattctcggagttcgtggccatggttgaacctgagctcctccactcctctcgctctccctacaaccaagaacagcttagaatgatgttcgagatgttcgataccgacggcaatggctacatcacggcggctgagctggctcattccatggctaagctcggccacgctctgacggtggatgaactcgctggaatgatgaacgaggccgatagagacggcgatggtcgcattgattttgaagagttcgttactgccatcaccgctgcggctttcgataattcatgggcataacttaatcatattattgtactggtaattaaagattatatatcattatcattcatgatttgctatttaactgtattgtattatgtatattagttggtattggtgatgagatgagagtaatatatttaatatatattttacatttatatttttttaataatttagaattaatgcattctcaaaaagttttaaatatagaaacggaagtattttttttttttgagataagcgtgcttatatatagatacattagaccaacagaaatccagccaaactgtttgggtaaaagtctacttatccacatcaaacacctaaaattacaagttctactaatattgtttagaatacaactcacaaaaaaagaaaaagattttttacaaaatgaggcaaagttctggatcctccaacaagacttctttccattgagtgtattgaccacaaccttggaattacactctacaattataaattggtggcaattatctttggcgacttccaaagccaaacaacaggctgttgtttccccacacagagcgtcagtaaaatccatatgtttagtttgtacccaaagcacctcgccgtgatagttccttgccacgattgctatacacatgctatccagttcaactctaacattacaattgagtttgagccactcttcgggaggagggagccaaacatccagcgcagcaggagtaggggcagggagaagagaggcgcagtaatctgcataagatatagcaatagattcaatacattggttaacattatctagtttgttattgtgtaccttgtcatttcgaacccgccaaatagtatcgataaccgatgaagtatagagaaaaacttcatcgatattgagacctttcttatctaagctccaaagaaattttacccagtcccacatgtgaatactatttccaacaaatcgaaaaaatgccccagggagaagatcgccataagtggaaggccaagttacatgatagaaatagatgttccattgattcctccacacacccgcaaatagggcaactagtatcctcaaacctgaatcttttgttgagaattgaacacaccggtaaagccttagacaagatacactgccataaaattttatgacgctccaagatcttactggtccacagtttattattcgaaagtgtttgaacaacatcacaatgcggtgctcgttgcaagccagataagcagacttacaagtaaactctccatgcttctccaaagtccaaatctacttatctttgccct

SEQ ID NO: 18186 - DNA, 4627 bp, Cannabis sativa
agagagtcactaaaaatgagcttctgagcttgcctactgtacagaaatatttacataacaagcacacaagctcaatcacataccaacaattacttactgatacacccttctaaagtctaaactattgagctatatatgagctcttaccattgctaccaggttggttaatagctgatatgatttttctcaattttatcatctctggcaagcttatcaatgcttgcagtccataacggctgcaagagggaagtagcacacttggtcgatagctcctgagccacataacgcatggtgggtcgtgactcgggacaggttctggtgcaagacaaggctaagctcactactaacaccaccacagccgataacttaccagttggagggagcaaacgtttgtctaacacatttttcaagagcaattctctattgtttgatgaagaagattctaatagttcccttggatgttttcccatcatgacttccaaaagccaccactccaaaactatacaacatcacatttttctgtcaccttcgttgtcattgctagctctgtcctcacaaccaaacatattacattagccaataaatactcttaatttataaatataattcaatttttcatgtaattacctggtgccatgtagccataggacccaacaagatttgtccaatttgatgatgagtcatggttcaacagcctagccatgccaaagtcagagagttttggaacaaaatcctgattgagcaacacattgttcaaagacacatcgcggtgtaggattggtggagagcaatcatggtgcaagtatgagattgcagcagctagtccttccacaattctcaaccttacatcccaatcaagttccacacctccctttttcgaatcataaagcacactagctagactccctctctttgcatactgatataccaagtacattgagcctttgcttgagcagtatccgtagaacttgatgatgttcctgtgtctaacttcagtcaaagttcttatttcactcacaaagctcattatctggtttagttctgtttgttgatcacttgtttctaaccgctttactgcaagagcgcgaccagaacacaaagtggccttgtaaacagtaccataaccgccttttccaatcgaatacttgtcgttgaagtcttctgtggcctccacaatttctgcaaaactgagttttccttccttttcccatatcaaacactcgagagctatgtcagtgttctttcgagaatggtcagccactttttgtttacgatggcataacagaagaattgaaaatatggcagctgcaagagctacaaggctgcaaacaacaccaatgatgacaaagacaactttgttacttttcttggtagatgttttgcagagaatgaggcctaatgcatcgccacacaaaccatgatttccaacaaatgcacttgtgttttggaatgttggtcctattgggattgaaccttccaagttattgtacgaaaaatcgctggaaagtagacttattagcctggaaaaggaagctgggattctaccagagagatgattgtgagagacattgaagctttgaagccttataaactttgaaaagcttgaagggatttcaccagagagaatattgctgctgagatccaatacatattgtaacgaaaccaagttaccaagctctgaaggtatttctcttgatagactattgtggctgaggttcaagctaagtaatctttcacagctaccaagccaatttggtatgttccctctcaaattgttggctgagagatcaagatcttcaatctcactacttatcttggctagacttggtgggatttttccagtcaaacgattgttgctgagatgaagcttgtacaatttgtttagattccccagttcaattggaatttcatcactcaagtcatttgaactgagattcaaaacatgcagctttgtcaaatttccaagctgaggtgggatttttccagtgattttgtttctgtccacttgtaaagtagtgaggtttctacagtctccccactctaatggcagttttcccacaaattcattgccaccaaaagagattaattcgagataagaaggaacacacagtgcagttggaaggtttgagctactgaaatgttttactttagagaattctgaacaacttatagtgtttgatggtggattttccaatatagggagggcactgcatatttcttttggtaattcaccagagaagttgttgtcattgaagatggcatagtttagtttcgaatctctcttcccgaaatctcttggaatttcgccataaaaactattggactgcagagacaaacttgtcaagttaccaagattaaaaattgtatgtggaagctctccggataatttgttaaaatcaacaagaaaggaaaccaaggatgtcatgttaccgatctccaaagggattgtaccattgaggttgttcttgaaaaggtgcaaagacacaaggccatttaggttgcacaatgttgagggaatagaacctgagagatggttttcggagaggtccaacgatacaagtttgttcaagtttccaatctcgaaaggaatcaagccagacaagtcattttcgtataaagataataggcttagattggaaagctcaccaagtttgggagggatagttcctgataaatggtttacagaaaaatccaagtgtattagatcctttaaggtgcctatctctgagggaattgtaccagaaaacttgttttggttaaggtaaaggtagttgagatgtgtcaacagtccaattgtcaatggaatttctccactgaatctattgaactgaagttgcaatgagattaatgatgtccaatttgagatcataacagatgaaagatggccagaaagttggttacctgataaacccaattcactgattttgttcaaattggaaagggacaaaggtagttcaccattgagattattatcagcaagggccaagaaggtgagtttattacaaaatccaagctcagaaggaatagaagagttcaataaattcttgtgaaggtcaagtttggtgagctccttgagttggcctatagaagaaggaatttctccactaaaggaattattagacagaacaagaatttcaagaccatgtatgaaaccaatttgaaaagttattgaaccatttaagaaatttgatcccaaattaaggtgtttgagtttgaaaagcttcgaaatttttggtgacagcggtcctatgaatcggttatcattgagtttcagagtttcaagcttccccagattagtgtataaccattctgggatttgtccagtcaaagtgttcaatgacaagtctagaaaagtcaagtttctacagtttgctatgaagctaggaaattctgaagtgaggctattataataaagatcaatataagttaatgatgacatgcctgaaaatctagaccaatcaggagattccaagtagtttgctccaagatcaaagtaccttaagttttgaagattgcccaattgataaggaatcattccaccaagactgttgttgtgaagactcagatattgaaggtttgttaataggcctatctccataggaattgaaccattaagattgttgttggtaaggttaaaactagtgatattggtaaggaatgatgtcaaactgagctagtgtcccggtcagattcaagttggaaagatcaatttcgaagactgtatcatcggtgacattgttgcagacaatcccggtccagttacacaagttgttgaagttagtgagggaccatgaattcaaagaagaaggcgaaaaagacaagctttgtttccattttacaagagcttcagcttgtgttcgaggcgaagatgtgatcttaaagggaatcaacagaagaataatgagaagacacaaaggaatattgatggctttcatggtttttgctttggcttgtttaggctttaaaattctgtgactgaagttggtttagtctaatatatgagacagagtgagtgagtgagttacttctttggcaagaaacagacattgtaatataaaatgtttcaactactttacatttgttttttgtgttagaatcaaaagaagttgttaatgattgaatacatttgaattcaaataacaacagagaaaaatacattatagctataaatgttaactacgtagatgtgtaagaagaaagaaacaaatttgtcaatagaaaaagactcagtagtgatttgactgaaactgaaactgaaacaaatattcttttgtcttaaacatttattcttacataggttgataacatcaatgtcttaatcttctaactactacactcaaatcatttctgttttcatgcaatactttatatgactttatgatatgattaaacaacaataataattgtattattttatggtaaaacaacaatgttattaacaaaagacacaaggacaataatgagagtaatgatagattataatgcataaaattgtaaattaaatcaaaaaatcccatccattaatcaactaaaactaatgcaatcatagaaaacttgaagcaaaaattagaaaacataagaacaacaatggaactcagttcagcactctcaccagttgacatgattt

SEQ ID NO: 18187 - DNA, 9012 bp, Cannabis sativa
tctctctctctctctctcctaactttacactatcacgatttcactcaaacaattattatctaaatctcgtacagattacaaagattgatagctatttatagatttgaattgttgcctaaaataactctaaaactattgtggcatatttacaccgccttaaatgttccactcatcaccagcaataataatccacatcagctttgataatgcacttttatttggtacagacatttcagaagctttaatacagataagctgatacgtacaagcgctcctcctagatgaacatccttgactgacagtaaggtacccagaaagtgcatctccagatcaatgacaaactacctggaagtgcatctctggattaatgacaagctatccggaagacactacaattacggaagagaagcttcatggaagaaccatccagattgaccacaactttactaacaaagcttctagatgactaccaagctttttgtaatttctttatggagtaacatggagtaacatagcttcccgaatgacaaaacttgtaattataatcaataaatctccaacttgattttaatgttgaagttgcttaataaatcgttgttaaaatactgttgtcccctcagctcctccgggctcagctgactccaatcagcttcaggcagtgctcaaatttcacacttggctctacctcgattatcatgttagaaggatcgtcttcatttggaactttggcaatcttcacagcttctttctccacaacctctcgtacgaaatgaagcttgaaatcaatgtgcttagatcatgatgcatacaattcttaattaattaaattgcactctggtaatcacaatgatcactaataaccttctagttgagtttcaactcttccattaacccagtcaaccatagtgcttccttgatcgcatctgtcaaggccatatactctccttcaattgtcgatagcgccacaaccttctagagattttctttccaactaatagcaatttcgaacatatatagtaaacacatatctggttaaagactgtcgggtatcaatacaccatgcacaatcagaacccacataaccattgatcacatcaaagtattcattccggttattcatgtcgaatgtcagttcccttcaaataatgcataatcaatttcagggcttcccaatgctccttttcaagattttccatgaatctacttaccatgctcaatgcatatgttatgcctggtctagtacaaaccatgacatacatcaggaagccaacaccactagcatatggaactctcaatatctttgacttctcagtctcttcttctgacatctgagtaacactcattttgaagtgttgtgcaaatggagtactcgctaccttagagttactcatttcaaaggtatctagaacctttttgctatagctcatctaattcaagtgtagtagtctcttccaccttttccttcttatgtccatgcctaagatcttactagctggacccaaattcttgatttcaaactccgtcttttttttttatgaatcaagaatttcattgcactaaacaagcatttacaaactaaaagcaccttaatcaaggcctttgtgtaaactatacaagtgtgtatatataactattgtgttaaagattgcatgctgaaccaaaatttggctttttcagctacttttttggcattacacttgaaattctatgtttcaaaatccactttgtttgctgctgcatttggctggaagtatccatctttgaattccaaagctgatcattcttattttgccaaattgaatacaccaaggctgcaattgcagcacaataaacacgttttttgaattttgagtattcgcccctctcaattcttcaaataattcctcacaagctgcttgaatttatcctccaatcaagccagaatttcacctgctgcagagcttcttgggagaacctacagccaaagaataaatgctctaatgtctctgctgtcatgttgtagaaagagcagttctcatcctccagaattttgaattttgctagcctttctttggtcttcaatcgattttgcattgctaaccaaagaataaaactgtgcttaggcacattgagcctactccagatctctttgcactagaaaggatgctcaaaattaccctgcaacaaattatatcctgtggctattttataatttttagaggcaaatgtattggtgcacatcagtttcttcactttgtcttttgcctcaactatttttcgccaataccagctgctattcaaaggagctttatgctcccaccactcctcaaactccgtctttagctggagtttcaattgcttgatctcctgtgcactcttggtggtaatcagaatatcatctacgtatagcaacaaatacaatgtatctccatttctctctaagaaatatatacaaatatcaaacttacttctcgtcagacctatcttgatcatataatcatcaaaactcctacttcactgtctaagagattgctgtttcaaactgtacagagacttctgcaacaagcacaccaagtgatctttttcagcctcctcaaatccttctaggttggtcaacaggtacatttcaaacccagggcctgaacattgggaagcactgaaatcgacaatgaggtatctacaacgtaccctagacactaaaattgtgttcagtaaagagatccagttcaaggaagaaatcactagttatgtagactaaaattttgtagcaaacctagacactagaaggatcctaacaagctttgtgttcactgctcttgagggctgcatcaacttgaaatctaacctacaaaaagtagtggcattgtaattaaaaaagttgaatacgtggctactacaaagccatcaaagaggatatatggctaaaggggttaacagaggagttaggtttgaaatctgacgatatcacaatttactgtgacaaaatcaaagtgctttgcatcacatgaaaaatctaatatttcatgagaggtcatatcaagttacactttataagggatattgtgtcatcaaaacaggtgcatgtggagaaaataagcacacatgatatccttgcagatatttttactaaaagtgtaactaaagacaggtttaggcactgtctaaacttgttcaacattcaggacatttaatgtcatcactcatttcttttggattatggataagtgagtctaaacaggtagaattattgggattaaactcacttaacccttgtcatgtcagtagttccatcttaacactcatcagataaatctaaaggaagttgttgttagttataatagttcgctttgacaccaacttaaagagagcctcaacaagacctataaatacatgtgtcttactctctcaagaaaactccaaggctcatacttcagatttctgagccaagtttagagaggagtccaatattacgtacagtgaatgtatgtggagggatgtaatgggagtatcacttttgaagtaatttccctcagtgtgtgtgagacatttttttttttttttgtaattagtcactatgttgagttgtaattattcactatgttgagtatgtttggtagactcatcattaattcattcattctcgatctaaattatattctcttctagttttatttaagttcagtttttgatatgcgtaattagttctagtttaaattatgtttctttgatattattactattgtaatagcaagttttgggggtgatctttcactacatttatagttaagagtaccaaacacacataatgatacatttattttttcttcattaaaagtttattttggtagaaatacatagaaatcatctaggaccagggcctccatatgtcatggaacgtcgaaagtcatcatttacaaatccccaatccctaactaaataaaagtcaatatcaatagaagaaatttctgtgtttttaacatctacttggttgtaggcctcatcaatagttgtcattactctacaatatgcgtcataatgagaattcccttttaaaaataaaccagaacccattggaggaccgatttgaccaagtggactatacgtttcgccaccccattcaacataagtagccaaatctttcaatccaccactaaatatacttgatggccaatatccagtttgagtaaggtcctttcccatctcaagccaccagtttccagtaatttgatcctattatagaatgtcaaacaattacaaaataaatacagcccaaaaatgtggggtaatattaaatattatatttgttttatttacccgataaattttgattgggatttcccatgtaggtatatcaccaggatgagtttcccttagatacatatcaattaaaggttgaggatcaactaaaacgaatcctggacacactgtattgaaacaagataattgaccagcctggaaaaatattaatatatatgttacacataactacacaatgaatatgaaaaaatatgaaaaaaaaattaacataaaatttaggtaacctgaaaatatatgaagatccgagttttattatccccgtatacagaaggattcacctaatatatgatagtataagaaattaataagtgaacaaaatatttgaaattattataatttatctaaaatgcttaagttgaaccatttttaacaaaaaaaataatttaacacacaaaaataaaaagataattcaactaaaaaataaaacttactccccaaccagcttgaattatatcaagtccattttgtaatttcattcgaccgaaagtatattgtgagtcggcgacattatataatgtgtaaaaacttgaaactgttccacctccattgtatttcttggttggatttggtcttgttgaaacaatcgcgtgctattttatcaaaagtgtaattatattttaatgatagaatatgctatttaatttgtcaaaacaaaatgtgaatgcaaatatgcttacatgaagagtaggaggggaattaattcttgaggtataagactttgtaaataatttggctctgataagatcttctttggttgttcttttaattggaacatatccagttggacatttttcaccatttaactcactatttatcgatacttgttccacattctttggaggcttgtcttctctaaccatcgagttgggacgagaagaaggtttcatctacataaatattcatgatccttagctagattataagatattataatacaaaatttggaaatatttaaaatgataagttattgtagaaataattatttaagaaacatacttgaaaatcatatttgtgatcctttagcaaaggatggtcaaatgctggttgttcgtaaaaaccaacacaatcataaatatctccatgttgtgtctgtataagtcacaatttacatataagtctaatatatacatgcaggagatgaagttgataataataataataataataatagatgaataaaaatactttaatagctttgattgatgacttgtttagtcgcataagttgattctcaatttcgagaagttcatctctcgataattctacttgttgttcatcagatttgcaataacataaaagtgtacacaacacaatagaaaccatgaaaaatcccctcatacccatatcgatgtgtgaaaagaaattcttatctgcaatacaaatatacattcaaattagctaaagaataaaactaaatctaccaaccaaaaaaataaatgatatgaatactatcaacaataattttagtattttaattcaattctagaagaatcatataaatatttatatatatcatataccagcaatagattaatatgatatgagagtttcaatagttgaatttgagaatcggatttatatacagctaataaattatgtaggtgaaataaaatttataaatattttaattttttttcttaaaaatatttaatacaaatatgcacgttacaaaatttgaaaatacataaaatggtatatgttgtaagagagtttcaatatttgaaatgtttgactgtgattttgattttttcactcaagaatgaaattaatgaaattaatttatatagaaattacaaataaatattaattacagtaatctgtaagaaatagtcttagctgtataattacagtggtgactgtgattttgatattttcaataaaaaataaaattaatatatagaaactacaaatatatattaattatgctattatgtaagaaatattttgagctatacaaatttaaatttttaattagatatatactatcgttaaatattaattggattactactgtatcgacttcgagattttaccgttacatatatacaggtgtatacagtgatcaaccagttgatatttaacggtaatatttaactggtgtgtcaaatttacaaagaaaaataaatataagggagttttgctacaaaaaacaatataagggggttaagtgtataaaaactaaaacataagagtgttttgccaaaaataaaaaagataagggggttaagtgtataaaagttaaaacgtaagggggttttcccaaaaaaaaaaataagagggttaagtgtataaaaattaaaacataagagagtttcgttgtaaattactcaaatatttataaattaaaattgttaatgcaaaaatttatattaaaatgaacagtaaaaatttacctgaaacgaattaattaattgtaaacacacatatatttattaaaaaataagtgaggtcagttgcctcatttatcagtaagcctaccactgataatatcaataattttaacattttaaataagaacatattagaaaaaaaatatttacaagaacagtaaaatgtaataaattggaaagaaaaatcacaaaaaatagcagattgtgatgagaaattaaaggtgaaatcatacctgataaaaaataatggtatattttcaatattatttgtaatgttaagcttaagtttgatatattttaattgtgaagaatgaatttatacaataataattgtacgttacaagttcaatatttttatatttttttattattagttgcacaattatatactattttacgttacaaaactaatttaactacaattaattagtacgtgacactacttaacatgtgaatgtatgacacttgtgcctttttttctttttcctttcctaatagtaaccttaaaatattaaggacaacaaaactactcgagttatatgatttgtgatatttaattttacaaattaattttttggtggtaaaatccttaaaattaccgttctgttttgatttttacttttccatctaaaatattgtgttaagtgccaagtggacaacctaattgtacccatatatacacgtggaaattttttagtggtctatataattttaattatttaaatattataaaaataatttaaaaattacaaaaaaaaaattacaaattataaaaaaacaataattaaattaataaattttatgtttttccttttttttttgcttcttccctcacccaaaatttccccagaatcgtgccccatttctcgccaaacatcaccttctccctctcaggctccctactctaacgacgacagaaccctcctcccctcccctctcttgtttctttctcccttctcccttggccttgctaccccgacaacgacgatggttttgatggagcaaccctgaaaagcatagaatcacaaagcactggaaattagtttggtcgcgaatagggtacaaattattacgatatttcttatggtggtgttggagtattttaagggaaaagaatcacgatcttgatcggacatgttgtttcgagaatcttcatcatgcctttgaaattgctctactcagtttcgggttcgtcaacacagaggaacatgacgctctttgttcctggcgaccaaaatttgttttatgtcttatatggttcttatcataataatttttaaaaactatataattacattttttttaaatgttattactataaatttaacaatcataacattaaaaaatagttattattaaaaaattataacaatattaaaatataatatttcttcatatatatatatatgataataataatgtaattaaaacttatgcgattacattttaaaaaaaatgctattaatgaatatgtaatataaagaaccatataacactaaattaatgttaattatttataatatataacaccaaaataatgttatagtatgctatttaataaaatgtaaaaaatataattaaatgtcaatacttttaattacatatgttatcttaacagttgcttaagtgttataaaatatacttaattatagtttttaagtattgtaaatatttttgcttgtagtgatatattaggtggatgatcacctgtgggagcatatccatcaaaggtatcgagagtgggagtaattcctcattatgctaaggatgaatcggagatgagatggttcgagatcccgatgcagatcccttcttcaccccttcggtcatattggcaatctcggagacctcatgtcagctataggggccttatatacctcaacctgccttaattgaatcattgataactacctcaagggtcatattggcaatctatgagaccttatgtcagttataggggtcttatgtatatacctcaacgtgccttaattgagtcatgataactacctcaagggttcttatcactgatatgataccacctacaacactaagctggccttcagaatggacaaaccttaattcctttcaagaggggttgtgatggatttcgaacccttaatccaagcaaaaaggaagatgcaagtaaagataatctctatcaacacactacacagccatgaagttttgtctgcatctatatttgcttatgccttttctcttttgtttcactacaaaaaatcttatttttagtcacaaattttagtgaaaaaattgtgactaattataaatcatgattcctatgttgtgactaaaaggtccgtggtta

SEQ ID NO: 18188 - DNA, 3455 bp, Cannabis sativa
aatcctaattaaccttacaaaaaaggataattaaatccctagaatatatgactaatatcttgagggaatatccatatcttcatgggttgttggacctgtcccgcaatagcaggtcagcttgagaatcttctagaaggcttgttgtggaccctgcaacttgtttagcctatgtaggaactgtctgcacattctggctggccagccatatctttgggggttgtccgtacagctttgttgtacagcttggtcggtcagccttccttagtccgccaggcctctttggtcgaacagacctccttggtcagacaaccttccttggcctgccagccttccatggtcggccaagcctccttggttggacagacctccttggtcggacaaacctccttggttgaacaaccttccttggctagccatctatggtccgaccagggtctaaagacttgtcttattcttaacttggaagttgcacgaagtgtacctattcggttgttaacaagttgtattccacatgtcttctgttttgaatatgtggatatgccacatcaggcaggcaaaaattagaataacatttgcccccaagtccctgtttgaacatttgtacatagataaacatttcagctcttgtcttggctcttgaagcctttaccgtgcagcattgtctggccaagtattggactattcggatgacgtgctttcatgattaacaatgactttattgtcaatcaattatggagaatcgtgcgacgactccacattttcccatgtttaaacctttgatcttctctctcccatgtatgccttttactttcctcatcttctcttcttcgacatgtctctctttctttggatctaccattgatgagttttaagcttcttaaagtttttagaaactttttgattctcacgttttaaagtagtattttacattgcaatccgcttaatagctttaggatgcataatgtacgactttttgatgaacaagattgagtcttagactggtacttgggtttgttagagaccctgtccgactcttagatcttgtctaggaactctgtccaatacttagatcctatctatgaactctgtccggtacttagatcttgttcaaagtccctgcctggtacttagatccctttcaagaactttgtccgattcttactgcatggttcttgcatggccctggccttatgcatttgaaccgattttttgttcttgtattatggccttaaggccctttactttcgaacaaatgaccgaccaagcggtctttaatcctgactatattctttcgatttttgaacatgtagctgactgggagcctttgatcccaggtttatgcatttttatgttctccttgaagcatgcccgtatgcatcttgcttagctgttaatatctggctttaacgaaacttcaaattttttgcccaagcatctgtgcttgttcaatgctatgtgtgggtgtgtcccaagtattaagcagacttatggtctcttgatcacttgcaattcatcaagtaattagatcctttgcctgtgcattttcttgggaagaccattttacatgcatgtgaaccaaaaataagaattatctttaaaaagctaatttgttagcaagttgtttgatacaatttgaactcaagaaacgtcttttattcattaattggtcttaaatatgtgttgttgttgtgcaatgtatatttttttgataataaaagcttacaattataaaacctgctttcattcatcattctagctacccctgcggagcgtactgggtaggggccaccactaaagagtggtggaaacttagctcttttatactaattcctgtacggtgagcaggaaccactactgaagagtaatattttcacaagttggtcactggtagtacttttttagatgttctccgtttttgtaccttggtaggaaaattaattccatgttcttattgtatctaccaagcttgtacgcacctttacttgttatcttggtaacttggtacagacctttccagtttggcccaaacactcctacttctggatctttggtattcaagaatactctttgaagcactaagtctcctacgaagaatttctttttcttgacttgtttattgaagtacctcacaactttttgttggtaggcatgcaactttcagttagcttaatctattctttcttctatttcgtcaaaggattctactagcaaggtgtggtttacttcttgatcataggctgtcctcctctgggacggtggttcaagttcaacgagcaccattacttcatagccatagactaatgcaaagggtgtttttccggtggtcgtcttctcggtggtcttgtgtgactaaagtacctttgggagtaagtcaggtcaattggcttttgccttttttagacatattgtactcctcctttcccttagggagttaaccgattaggtctattccccatacaacgaagggccaaggaaactgcattagtgtgagctcgtttagtggagctcttgggatctttgagaatctttggcactgttcacattttttgacacagtccattaaatcctcaatcatagtaggccaaaaatacccctacttgagtgtcttttgggacaggctttgccgcagaagccttcattcacttctattaatagccgttcaacttctgtcttggtgacacatcttagaagtggcatggagaaaccacgtctgtacataactccgtccaggattagatgtcgagcaactttccacctcatttttcttgcttcatttttgtcttccaacaagaattctgtctggaggtatgccactatggatgtcatccatgttgggttgtcatctatcatgtctatttcttctaaaatagtgatgctcggttctttgaggaactaaatgggcaccaagtttgtcttgtttgtcaaggtgcagctggttagtcgagcgagtgcatcgactattgcattctcttctctaggaacttgccttatagtatagcccttgagctgacttaataagtcttgaatcttgctcaaataggctatcatttttcgtcgagggtgtatattcacctaggacatggttgacgaccaattaggagtcgatgtatatgtccaggtaatctgcctgcacttcctgtgctaacttgaggtcagcaattagagcttcatattcaacctcattgttggaggctttgaaactgaactttattgccccgtgcagctgttgcccccacgtgtaatgagggcaatgtctgcaccagacaggtggtcagtacaacttccgtcaacatgcaacttccaggctaaattttcttgctcttgcttcttctatggatcttgcttttctcctgaatcttgagagattttaggagatatgcatgtgcattcagccacgaagtcagcgagattagggtttgttttaaggaatgagttgaaatatatatatatatata

SEQ ID NO: 18189 - DNA, 2971 bp, Cannabis sativa
aaataaagtgggataaataatagaaggtatgtgggcaattataatgatggttagtgaatgagatggaatagagtagtacatataggaaagtagaaaggagagagtttatgagttttagctcttgattaattgagatctctcaaatacttcattgttacagtttgttcttatcaatttgtccaattaaacatctacattcagatctgcttccaccctcttctactttgaatcttcctttgttcccaagtggggtatatatcataatgctgatagtgtcagcccagatgctaaacatgtgggatcatgtgtatttatttgtttccaggtgataactagaacttggcaaactgctcacaagatgaaatcacaaagagggtcaattgatccaactggatcaaacaatgacaactttcgaatcaaacgatacattgcaaagtacactattaatccagcaatagctaatgggatttctcagtatgttggttcagttgaggcaagttactaagaattcttattcattttacatttgatcgcaatagctaatgggatttctcagtaagatatcaagctgaggttttgtcatgtgtgatcgcaatcaggtgggcaagtgggctgatcttgtgctatggaaggcaccattttttggagctaaaccagaaatgatcatcaaaggtggtgtaattgcatgggctaatatgggtgatccaaatgctagcatccccacacctgagccggtaaagttcatcctttttcacctcattttgtttcaaaggtgcatgatgagactgacaccttaaatgcacaataaacttcatagttcacatattatcagactgattagaaaatggatagtgcccctgcaactttgaaacccttattatagttgggctgagagtctaatctctctaatttttggcactagctgagatattccatgtcagtaattaataattttgttgacaatcatgagtggttgcaggtgttgatgaggcccatgtttggagcatttggcaaggctggcagcaccaactccattgcatttgtcagcaaggcatcactctctctctctctcactctctttcactctcataaatatatatatctatgtagaggtctgaaaatcatgtttgttttttctttcattttcttacaaaacaggctgctttagaaaatggtgtcaaaacctcgtatggactgaacaaaagtgtaaaagcagtgagcaatgtgaggaatctgaccaaactggaaatgaagctgaatgatgccctcccaaacatcacagttgaccctgagacatacacagtcacagcagatggtgaggttctcacctgtgctgaagccacaacagttcccctatctaagaattacttcctcttttagtctccttacaccatctccggggtaaattttgtgctaaatgcacaaagtgtaaactaacagaaaaattcatcaatgtttattgaaaatataaaccaataaatatatataatggaaatgatataatgcggtataaatacttaatgttttatattttatacacttaaatacattatctttattttggaggcaaaaatactcaatgttactattctcttagttactaccacttctgttaactcataaatataaacacgtggagaacccagatgcattacatttatttattttatttcaaaatttaatatttttaatatcaaaaattaaatgttatttgtttcaaaaaaaatgtaaaattaaattactatatctgagtaaacgagtgcagtatataaaaataaaaaatctaggttgtgttataaaattatgataaagagtagaggttataacactttaaaatttttcttttttactgttaaattaaatccttgacttttctttactcaaacaatcatccatatcttaattaaccttaaaaagaattgcaaaatagtcactgatgtgagtttgtctataggataaattattctattggttgcttattttaccatttattcttccatcacttatcattatatttattgaaaatccaaaatgtatcttctcttccttgaagatcaaaagtgatagacatgtaactaatccaaagcaaatcaagaggaaataattctctattatttacaagagtaatgttaaaaatacacaaaaattttataaatcttttatgtgtaattaatttatatgcagataattatatatgagaacttttaattgtgtgattaaaatgaattatattatgtgtaaatagtgtatataatttttttttttgaataataatgaaatttcattaaatcaaatcttccaaaacaaaaaaaacaattacagtagataactcaacactactaaaaacacggtcagcctcaaaaagagaagatcgcgccaatgaatgcacaacttattagctgactgcttgacaaaattaaaagaaacatcagcaacagaggctaacatagccttacactctaaaattatacgaccataaagagaggtcatatcttaatttccttgaagatccagcacaactctacgacaatccgactccactatcacactaggccaattgttgtccttaatccaactcagagcctcttttatacaaatggcttccacttcatgaggttgtatctgagtttataaaaaaataaaattaaaagtgtcacaattattattttatttagagtaaatagtgatataagtatttaatgttttgtgtttataatcgatataaacttaataattttttttagtggcgtaagtatacaatgttaataaaattataacttacctcaaattttattagtacatactccgttaatatcttaaacatgatacatataacacagattttaaatgagtaatttgcggcaacccccccccctctcccaactattaatttacttacaaaaaaccatctaacttcatattttggtgggacaaccctccaaagtactgttccatttacatttttaaggtg

SEQ ID NO: 18190 - DNA, 14087 bp, Cannabis sativa
ttgctataagccaccactactaaccaatatattgtaggatttttttatttttatatttcaaagcagttttttttttgttcttatagaaatttacataccaatcaataaaacaacttaaattgtaaccgaaattcacataataattcacaaaaaaattaccaaaacaacaactaaaaatcgctattaatataattacttatggacactacataatttaatttaataatcatccaacaaattacaagacatagtactagactagtatacctaatgtgagttattacaaattagatgaaattaaagtgccaaattagggaaaaagatttgattttttcttcttctttaatatacacagaacagaagtgattgtgaccaatgtccatggcgtgctttcctttgttttgtgtggccactttgccttttcctttctttccattgcttgcagttacagtcaggaccctctctcttctctctctctctcctctctctttttctttaatttttctcgaaaccccatttgcatacacacacaatttaacataaataacaataaaaaatagcacttcattcaaaaaaattctatcttttttcctttttcaccttaaaaaagccttttttttttggcactgtaatggaattgtgaagatttatacatatttttttagtatcactaaactgtttgactatgcaatcttcaaaaattcacactttgtcttcttcactacaactcttctcccttttctctctctgctcttttcagtaagatgcttattcgattcctccattttgtctgaaacattcccatttttcactttttccaattttttttttcttgttctagttttggatcatgctcagattttcagttcagccattgttttgattaaagtttgttgctttttcttaatgggtatttttatcttgtaatgatttttttttgagcagtggctatgggtggtggtgttgttgaagtgattaagagcaagggttgttcaagactatttgttgggatttcttctccattgaattcttttaaaggtcttcaaccagttgagccaccaatgtcccctgcttcctcctctgttgggtctgaacgagttgttctcagatcacctggaccttttaatggtcttgttatatgtgttactggactttccaaaggtttgttcaaagctctcaattctacttggtttttgggatttttgtatgtatatatgttcatgaatttttggttggtaatggttttgatgagtgatgatttcttcattaaagtcaagttcaagtcatttaggtcttgaaatggtggtgcaagattgattagctttggaattaagggtgattcaatttggttagtttgaaatatatatatatatatatatatatataatcaaatggggtcttaaaaatctacataatcatggcatacaagcttctgttgatacaaatttttgtgtgtgtatatgactaagtagattaagaagaatgagcttgttttgttgcactggactttccaaaggtttgttcaaagctctcaattctacttagtttttttgggaaattatttatgtatatatgttcatgaatttttggttggtaatggttttaatgaatggtttcttaagggttgattaggtttgagtgagataatagaatattggttaaatgatttaatttggttagtttgaaaaaaaattcaaatggggtctcaaaaatctgcattatcatggcatataagctttctgttgatacaaatttttgtgtgtttattatggctaagtggattaggaagaatgagcttgttttggaagctattgaggttttggaactttgttcatatttgctttcattgtttttggcagaagcaagaaatcaagtaaaggaagcaactgaaagattaggtgggcagtacagtcctaatttgcatccacaatgtactcatttggtggttcaaatatcctttttttatcaaagtaaatggcttgaattggatttgctcttttatgagatatttgcagcataactacctaatgttttgggtttgtaattggtagggatccattgaattttttagtggcaaaactacctaatgctcctaaaagtgtaatttcgtctatttttgtcccgtcaatcaggttccatttgtgagtttggatgcacgcatgtaatgacacgattaatacttgtttaatttagtatcaataattgtgcagacaaactcacaaacagaactttttggggcgaaattgagtagtttttctgttaatgggtttgtgtcggttacaaacccaaaacattgagtaatcatgctgtaaatctttctttattttatataagtataagaagatagattggactatgtaaaatggtactaaatagtatgaagggttgaattagctctccttaataagtgtttacagttttggtggacgcaagtttgagcatgcttcgaaacatggatcaaggaatggtctctttattgttacacttggatggtttgtagatagcgtaaggaagaacggtaagagtgactcgcatttgtgttgttatgtcaagtttgtttgttttttcggttcttgataattgagtttgccttgttatgttgcagttaggcttagtgaatcgctttataggatcaaaagcattggggaaaataaggctttggatgattggaatcggcttaatggcttcaccggtgctgagaactcttgcctacctgctggagttcgtggaacattgcactccgagactagtgaagaacaacatggacggttttctgggagagcctccgagagaaatgatgactacgctctatccggtcactccttgtatatcgatttggatatttcaaccgagcttaggaataaggtgaagccaaattctctaagctttttatgaatttcttgttactcatagatcttagtagagtgattcctgttcctttgagcatctcttaaaggttatcgaggctgctagtagagaaggtgccacatttgtagataagtggttcgccggttgccatgccagtcatgttgtgtgtgaaggatcttcactccggagatatcttggccacactaccaatcttgttactgtgagttcttcagcaagattttagtttttattatatatatttttcgatttagtttatccaaattattttgaaaggacatcatttcttatttttcgaccctacttggcgcttttagcttctcaggaagcttttcccgagaaaggcactcagagttttttagagttaaaagctgaaactcactggttactcaacgagcatagagtgatctttaaaacttctttgttatattgaaatttatttgaaaatcccatgtttcatgtctcagccactttgggttctgaaaacagccaaggaaaagtatgagcaaaggcttgtgcacatgtcaactgatttggccaggcaagtcaatctaatgcttgaagattttcacaatggcattgcaaaggaggtaaatttcttcaaccaactaaaactttttgaaattttatcatagccttgtttttctgttttgccatgaagtgaaatacttgttagaacttttcgaaattcatctttcgggtgggttttaataggtatcgaaaacgattaatatccctgaagatgttccaacttttgcaagtaaaccaagttttgtagaaaggcaacagattgcaaattctgctaaaaatggagtcagaaatcgccgtggtcgtcgaatgcaggtttgtttgttttggcttgaatggattttcatttattccatgttatgatatgatatacaaaacattcaaatctttcagacttgtcaaaccccgatgcgtccaataactcctacaactcttctcgattcgatttcctggtcaatatctgagccaacttctacagtttctatttacaccgattctttcagcgctggagatggcagcgaacaacatacacctcaattctttgatgcaaaaggagatggcaaagattccgaagcttcctttgcaaatttgactaggcctctcaccgaaaggttcttatcttacttttacaagcaagttgtccatatcacaacatccatttatgtactttttgttgttttgcagtgagaaatctgaagtgatattcaagaacaattttctcaccgtgttgtttcccgttgatcgattttctgagatggggccgtcttcaagaacatttttcagtgatgatggcttcacttgcttgcaggtgttggatcatatacatgcattttatcaggtacacagattcaagtgttccattcttgtgattaaacagggacggcatgtcgttcctaattccaatcaaccgagcactaaacatgtcctttttgtaggaaaacatgtcagttcacgaaataacagctgcaatccacacagactcgaggcatgctgaccgccttcgagcaatctactcgagtaaagaaacaacagagaagggctatgtgatattcaaacgcgtggagtttttagggagtcgaagaagtttcgaaatgttgaagcgtgttaatggagacaataacagtaatgtttatgagcttttgatcagagcatgagatgattggagaatgagccttattttgggtgcaacaagacatgtttgaagaacaccatttgtttttgttttttcaatactagatggcctaccaagctatggagtacaaatttttaagtgtgccatacatatatatatatatatgatatattcttgtaatacatatatgtaaacattaattgtgaataagtcagatcttttgtttgctgtgagtttaattctttcaaggggaaaatagaaaaaatcctagttttccagtgtgaatttcatattttaatagagtaaaacatataaagtgtagattacttcttgttgatttatcccatgaaatattaccatttttaaatcatgtttttcgaatttttctgttgttgaaaattttacctgaactctttctgtttctgttattgaattatgttcttgctataactttttgttttttactacgccaagtaacaagtttccctccaagaaatttatagtaacctgaagttgaacgtttattaactgaatttttagtcaaatccgcatctgtataagcttccacttgtaaatgatgatgattgctgaataataagtctttctctggtggttctgaataataagtactcacctggacatagcatttgagtgacaagtagattaaccttccaactagtctttggtttagcaaaatactttcgaccttgaaaacttattccaaagaaaatatttgagtgtccccaaatctttgattttagttcttccgattcttgaccatcatttcctgttaaaattaagtcattgtcctcttttccatgtttgtagaacatagtatggtcactatgaccacaacattttacagctttcctaaacctctcaaaccaagctctaggcaattgtttgaggtcgtataagaatttctttaactttacaaatttgtttttgaacccattttttcctcaaaatatggtggtagattcataaatagtacttcaaagtcttcatttagatctaaagtattttttcttacaacttaagcgcaatgttttcttaattattatgattatttttgctaatcaaaaaatctagtgtagaattgtgttacaaaagcttctgcaataaacagggagcgccaaccctagcgcggtgtgacacgaagggcgcaccacgttggggcggcatggcacggaggggatgctaaccttggttaaatatgattatatttagtagctgattaaatatgattatataattggtatcacaatgtaaattttccaaaaataaattaataacgttaattatttaatagtaatatttgggtatatttctaatttctctaataaattagtaattattttctatataaggttagatgtaaatttttctaaaatattcgattactacataataaaaactcatttacaagttacaaattaaaacctcatgcaatggagatcgatagggattgtgaattataactttacaacacaagttgaactccctacacaattattccactaaaaaattgagtcaagacttgtcaccgatgacgagtttccctaatttttcaagctcgtaaagcatcgccaatgcagctgaatcaaacgagctcttcttatcggcttttgcatcaccggtacattcaatgtcaccggagttaggaatgtacaaaactatatctgatacaaaactgttgaagcctgttcttttttccaagccttcaccgagctcaataggagttctgcgagaccaaaagataatttatagttaggtcaacaaagtatcttaaatcctagctccgtccctgaatgtaaaaagatgcaatttgcttcaccttgatttagtttctctcgttttgaactcgggcatttgccattgttgcttcttgcaaagctcgaataatgtcatcctaggtcctcctttgttcatcttgatttccgaaatagatgggatgtcatcgttcgaagaacatccctttttctcagagaactcggcgacattaaccataactgctttagttaactttacgagatttctagttccatctgtcttaagttttttatggttttgtgcttctacaagttcgtcctctattgttaaaccattttcgtcaatgttcatgttagaggaagacgaatcatccacattttcggtatcttgcttcctcttcttggagaaccatgagtatgaaattcctctagtctgcatattcattacaagaatttagagcaataactccaacaactattaaagttaggatttttcaaatgaagccaaacctcgagtttcttcaacaaccgacgagctgcttctcctttcgctgctttcttgctacggtcacttccctctccgatcaactggacatctttaagctgtaaggtaagctctgcatgcaccatttcgcccttctttgtgcaattttctttgatgaaatgcccgagagaatcgcatagttcattcaattcacgaagtggtggcaattcgagtttatctggagtcacaatgggagacaatagaggttcgaatattctccacacttcgtcgatattaagcttcgtatcaattagcacggcccctgcaatactttcaaatatgtcccctagagcctgaagaggaaacacgaaaatttacgagatttttagatgtaaataccaaactgatctcgaaccaaacatgaatctttcgattcatttggctctcatcgctcaatcactttgaaaataaaagaagaataacaacttgccttgggaccttttgctccttcaaatgatctacttgcattgttatgttcagcaaaagatttcacatactctgctatttgattttgaagcagacccgagcaatgtagaaggtggtgttgaaggtctcgtcttactgcagcttgagcgaaattttcattgctaacacaagccgaacgcaagtctgttaactcacctggatcgatatctgtataggtttcataaaggtaccttgttgtaagcaagtccaagaccgaatcgccaagaaactcgagcctctgaaacattcaagaagttaataggataaatctttaaaaaactcacttattcaaagataacgttgattaagggatcctaaactacctgataacagtaatcgagattgagttcttgatcagaggcgtgcgtcattgcttcttgcagaagacctttcgttgaaaatacatactcgattttcgactctagggttgcaatctcattttcttttggggtataagaccgaagagatgcaatcgaaatcgcttctaaaactaaagaaggctcaagctcagcatcaataccgaaccacttcattgtatgaattgcagcagtcaatccaccgccgacataatatgctcctacgagggcttcaacacaatcagcaatagttttcgagcccatccatcgatgacctttgtcacaagtctttcccagtacaactttcgggtcttcggtttggaatttttgatcaagaggtacttctaaagtatccaatccacatttacaaggaactggtcgtaacgaatgttgtcctggagcgacccaacgacgtggatcaaatgcaccatcgcgtatatacccctaagaaaagcaaggtgtttaactcatttgagtaaactttgaacaaaattaataaagaaaggtcatacaaaaatacctgcaatttatgatctattcccaatttatgcaaattcttgttgcaaataattgaagaccgtcgagaagtgagttgcccttcgtgtatctttggatatttaagaaagaggtggcaactaacaacatatttcaaaaccgagtcaccgagcaattccaaacgttccatagaaaaattttcacaacatctaagggttgtaagaccttcaagaatctaatcaccaaagaaattagttaggttagtcaaaaaaactgatttaactagcatcgacgaatattataacacttagaaacataccaatgagcttgaaattcgagagctcatatctgaggtgcgaaaatctatttcttttctaagttggctagctagcattagggattccaaacggtgcatcaacgacggtattagataaagtgattttataacgcttctcggtatatcaatagtcatcaaaagctctggtggcatatgggcatgcatttgtggcttagagacgccattttttgatttcttacctaccatttaagcaaatcattcaaaaatatacattcaaactattttctatttcatcttttcagctcaagcaactaaacaaaccttcatcactgaagttcaccaaaaggttgtgaggattatgactttgctttaaccgcaataaaggttgattcggatacattagctcaatcccgtacctgatcagaacaaccattatttaaccgaaaagaaaaagagattagttcaaaaattgtgaattaggacattcaatcacttactttttgttaaagtactcggtataggaagtgaacggtgatgaaacatcgtcaccgttaacctcgaatgggctctcagccgatgtgccactctccaattcaacaatcgagtataatttcccggtgtgaatagccaataccaccctctcttcgagattggatgtatcgacagaaccattagcaaagtgaattatattatcacacatactctctaaggactcggtcttgcatggcgacacattatctgattcgccattatctggcaatgacttcttcatcagtagttctaccacggaaacacaagaatccatttcttgccaacttattctccaagattcattgcttgccccgtttgatgattcgagtggaagaagcaaataggtatagaattggttccataaccttttctcatcatttcgtagtaaaaattgtctctttgttccagctgatttagaacccataaataccctcccaaataatccattaaagaatagttcttgaaagcattttgctttcttcatctgttaaaaatgaaaatcgaagttagtagaccatgataaggattattatttaacccggggagcttatatttgtacctgttctgcatctagatttacttgtccacaataagaaaccgaagtcttaactgattttgtaaccaagaagagttccaactcgaaatttccaacatcatcatcaagcttcgactcgattagaagaacaaattcggaaaagaactcgtcaacattactgcaagcaaatacaaacctataagcatgaaaaacagcatcatgcttttcttcccaagtgccagataatgcaagagcacgagtcgatccatgcaattccttcctttttgttgttccttcaaacacaaacatgaagacaagttataaaaacacatacccttgttcataatcgataaagttgttagaaaacttatgctaaatctgtccaaattatagaacattcacataccagcaccggaagcagcttctttggtattcactgcgacacttttttctgaagattcttccgtggaagggagaagatgatcatctaaagcacccatgtgatgtagttttttacaagcttctaagcaaacgagttgcttagataactgagagctcgtacttacaggacccattagcgttttaaaagccgcatttggaggtaacattatttgacactcaaatgaccgttgcccaagattcgagtacttaaatgtcggctttggagtgaagtacctaagaaacataaaaccaaaaaagacacgagtaataattagggaaacgaactttttacaaacacacacttagggaagactttatgatgaggaaaaaaaatccatacttgtcaccggggagtcgttcacaataccgatgtatgagactgacactagaatctggtgtaattgatgctccggtggtatccacataatatgcaggcgcaaccttgggagtaaatggcttcacggtgcacaaattatgatctctatttgtagttgtatctaccaccgaacgctcgctcctaatgacttcatataatcgatccctttgcttagcatttcccctgcaaatttcatgcataacaaacataaatccaatccttttattatattattattattatcatcttttaaattcaaaactcacctctccaacatcatgacaaactgcgagtcttgttgtcgagctcgtccccttgattggacatagcttcgtacagtcttaggcaagtcaaaacgtatcacataggagcagttcggtacatgaattccctcctcaactacgtcagtagcaaataacagattgacctttcctgagcgaaacgaatccaaagtctccttttgcaatttgggagcaagggcatcaacagatgatgtattacttccagttaaatatgaaactgtaaaatgagacaaacaagcgactttcttcacaaatctttcgattactttagctatgatgattctatcgacaaagatgaggcaaagtatctccatagctcctctgttaccacagaaatttattaagttaacctaaaggatattaagttagaacaaatttggcaaaagaagttgttgtgttttacccgaaagattggaaaaggttaatcaactcttgtagttttgaagaaacatagcctaaatgcacagcctttacatagtcaaattcagaacccatgaaatcttcacagcctgaatcacaaaggacagatatcagaaaacatatcgagaagtggagacaattcaataacggtataccatgtgcaagtgattcttcaaaagcgcacaacgcttcctcgagaaaagacttgtactccatcaaaaattttctatgaacttcacaatcttcttgagaattcgggaagttttccagacatatcttcacggcctacaaaacaagtatgttaataaatttcatattatgataggaattgtgaaacaaaaattgttctttaagatctttaattacagccatacctcaaaagcacatacgagaccaagttcatcaaggcaatatgatatctttacgtggtcatttgtcaaccgtttttgcagtgtcttcattctatcatccatgtccttgtaattactttgcgctgattcttgacacttcggaaatgaagcttcagactgttcaaaaaaaaaaagaaaagagaaaagaatcatcatctctgtgatgataccttcaataaaaaaatacatatacaaatggattgctgtgtaaagttagtatattgtaatacctttaaccataaagcttccatttttgctttcaaatctagaaatggataccgattttgatcataaaatttgagggtctcttttgcagaggggacaaatgtttccatctccgtcttgtcttcaagagtataaatctaaggaatcaaaatttaagatacaaaaaagtagttaattatcatgattgacatctaatcaatgtaattaaaacaaaaatgtacaagtactacctgggaatccaacatggtttcgagttctgatagttgaccttcacaatccgttgttgacgaaacaccttagtaacaaattcacatttcagtcacaaactcggtcatataagctaaatgtctcaattcaagccaagctttctaagggcgcgtttggtataccatattgtgttgtactgtattgtatagtattgtgttggattgtatttattagtattatttaatacaatactttatttggttttgatttgtattaataggttgtgtaaaattatattatctttaccataaacttaacctcaatcccaacctcagccctggactcagatcaagagtcaggtccgagaccgaggcagtgtccaaggccgagggcgggtccgaggccgagacatgggcagtgtccagggttggggtcaggtcgaggtctcggtctagggtcaggtccaggtcggggtacaaggtcgaggtccgggtctagggccaaggtccaggatctgggacccggtctgattcgaactcggggtatgggccggggtccgagacctggtcagggtccaaggtccgggttgggttcgggtccgagttcaagtctagaccctctccaaatactataatacaagctaatacaatataaaattttatccaaacttaatgttcctttttatttaatacaatataacccttgtacaagctatcaaacgagccatcaatgtgttaaaatgaaaaaaacaaatggaggagttcaatagcagtgacaaattactaccttttctaacaacaggtgaagctgtcattccgaaaatcttaggcttactactacatttgtgataaaattccttcagcgaaacaggagagcaaatcaatcatcaaaaacacttcttaaacatataatacggatgcaaattcaacataaatgacactaaccttcattatttttgtataaggatgattaccagtagctcgatggcattcgtctataaccattaaacctactgattctaagctaaagaaagcccttcttaatgcatctaaaagaacctggggtgtcataaccaagacctgcaagaaaattatgtattaatctaacaatgtaataagatcaataaggcttctatctttgtagagatgttagttacaaaccaatgttactatcaaatcatgattatgcacataaaggcctcagataattggccagtgacactaaatgtcagctatgagaaaaataataaaaaacaaacaaaatagtcactttttcctttctttgtaactaggatcctagcctaaccagataggaaactgtaacaattgctatgtagatacccaggaaggactagaaccacaggccacaaggccttgtgggagcacaccacaatgcccgagaggctacaagaacccacatttcaaaaccgattcacggggttattgaaaattagttttttcgacacattcgattcgatactctctaatttactcgaatgaggaatcggaattaggaaagaactcaattgcacaatagtccgttatctcaacaatcagaaaaccaaaaatattactcaaaactttcaaaaaacaaaacaaaaaaaggcagaaacttacatcatgctggtttatttcattttgccatacttgttcagtccaatcatcaacccctttacctccatagcactctccaacttcaaattcagtaagacttttaataacctcaaattgctgaaacaaacccaaaaactcaatcatcactttattttcttcagaaataaatataatcaaaattatgtgggttttccaatttaaggccaaaaaataaataaaagtaattgctgaaacaaacccaaaaactcaaatcatcattttatttttttcagaaataaatataatcaaaattggccacaatgcaaaagtgggtttttccagttaaggccaaaaaataaataaaaatcatttttttgaaacaaaaacctgattaacaagatgaacagtgggagctaagaaaatgatgatctttttaacttgtgctgactttatagtttgaccaatgctttgaataagcataacggctatcaatgtcttcccagcaccagtctccattacagctatggtgtttttctttgttgcaacctcgtacatctctaattgatacctat

SEQ ID NO: 18191 - DNA, 3884 bp, Cannabis sativa
ttttatgagtgtttttcagctttggtctgaaattaagtcattgcagatttgatgatgaatcagtgttgctaaattaggcattatacaaaatatgtgtatagcaatgatatagattatacatatatatgtatatatagatatagttatacatgcaaacataaagggtcaattattagcttagaaagattaaagctttattaagcatatctgacatttaaatttgatttcaaataattgatgaagttgatgactttgaataacaaaaccttaaagcttacattttcaccataccctgaaatctccataacttagtttgtggtcaaagtttgaatttttaaaattggtttcctataaagcagtaaactttaaaccttgtgatagtaaaagttacaagcttgaagttttgaggtattcccattatccaaatttggttctttttgtgtttatgaaattgatagttcaatgcagtcaatgttttaaaggctatcattgtttgatctagattttagaggatgaatgcggttgggaggctagggagttacatctctcgaggtgtatacacagtctctgggccctttcatccattcggtggtgctgttgatattattgtagttgaacaacaagacgggagctataaatcgtccccttggtatgttcggtttgggaagtttcaaggggtgttgaaaacgagagagaagattgttaagatatgggttaatggaatcgaaactagttttcacatgtatttggatcacaaaggggaagcttactttcttcgggaggtagatgatgatgtggaagaaggcgaatctgtgttgaatcgctcttcctcttctggtgatgatacagaagggaaatcctcagataatcagacaccgttgaagtctgaaaccggaagttttgatagttctaaggaagttgatcaaatcgaaaagagcaatgggaaggttacaagcaggactaattcgcgtagatcaaagctccttggctttttcgggaggacttcaatgaaagtgaatgatgatggagaagtgaatgatatacaaagggctgattcattgcagcgtgcagagtttgcagctaatcttttagaagtgaaatggtccaccaatcttgctaccgaaatacctgtgaacgatgatccttttccaagtttggctaccgatgttttggatgagcaggctcatcaagaggtggatgataatagtaaagaacgagatgtgagcttgtctatacatgatagccaagaacatagtctagaagaagagacttgtcccgacaatgagaaagtgatccttgattctctgtctagttttgatagtgttcaggaaactacagcgaatgaaagttctgttgtcagtaatggtgaggtagtagcatcaaatggagttctttctgggattagtgatgctgatttgctagttgcacaagagcttgagttttattccggcaaacaattcaatgaggaagaggttgttactagaagagatgttgtatcaccaagttatcaattttctcgggatggtgaatcgtcagagagcttaatagccaagtgggatgcttcaagcaaacaaactcatgaggctgctgacattgatagtggtaaaagtgtggaatttcaagttcatgctggaaccgaatcatcgtctcaggtaagcttctatcaatatcttgtacttttgttccaattcagttcttaaatgaattagtgaataggtatttaattgatatcaatgaaggaattacaaagttctaaacttttcgagacagtttgatatctcccctgaaagcattttactttatttacacataaagtattctaactaactaacttattatacaatgaaaattcggtaagaacgttttcacttattgttcaatctatatgttatcaggatacggcttctcatcagctcgtggaggattttgaatcacaagctgagagacctaacgaccaatcagaactaacaaaaccctctcattcatccacaccgaacaacaatgtggcctttgatgagccattcataccgccattagaggaagactcattgttttttggtgatatcgatgaattcaaaaccttcgaggatcaagaaattgaggatttttcttgttcacaaggcgttgaagagctaaatgactcaattagcaaagataatcaatcacatttattggaagttaaaattaataaacgaaatcaaccatctccttttgaaaattcaataggaaatccgagggtgtcatcgagtcccataggtattattagaactcctaaggtgattgaagaagttgggtggctaactgaatcattgccaacaattcgttctcatattgacagtttcgacgatcacgatattcaatgtttaagccattcactggattcgaagtccaaattgctgaattggacactgcacagtgaagatgacttgagccttatgaaatcagatggagacaaagaggagaaccaattagaaccagaagtggcggatatcgaagatccgtcggaaacaggggaggttaataatgactcttccaatacagttggtaagaatttctataatttttttcgatgcttcttcgtaaaagttgttatttttgtgttttattttcgtcatatagtgaaaaatcgtcgatagtttcatccatataggataaatatcttacctttttctttagatttgttctcattttctactttaaatgccttttttgttcaaaatagtaagcaaattaggatttcttttacggatttgaagtttttttttaacaaaaatacgaacttttgttgtttctattatactatattgtgttttcatgttgtttctatggagctcggtaataatataatgaaaaaaactcgtaaaaaagtaaatcatagtccgtacaaatgtaaaaaaattccttctccttaagcagaacacttcaaaagtcacactaaattgtgttctatgcagagatttttcttcataaaacttgttcttttatggtgctgcttctcaaacatttgatatcgaaaaactagatcttgagaaacttcacttctctaaaaccctgtgactctgcaagatgataggcttgttatcaaaattatcggtagttattttcatgggctatggctactcctgttattttagggacggtttcacttgggacgagttcacaaatatttgaaccagaaggcgcaatagctgttgacacggttgaaaaaactattacaggaggagatcgagatccatctataccaaatcttcctcctagcgggagttggagactctggcctttctccttcagaagatcaagatcttggaagggtgtgaagacacctttagacgacgttagaatttctgaggctgaaaatgcttccgagatccaaagtagtagcgttgttgaagaaaaaagtatgcttgaacccaagatggggaagaaaatggttagaacactttgtccaacatccgagcaactcgcatccttaaatctaaatgatgggacgaatacaataacattcacgtttatgactccaatgctcgggaggcaacaggtaaaaatgaaaattcttctaatatcggtcttgaccaagttttctcacttatattttgattcttattgtttttgtttaactataatgcatcataggttgatgctagaatttataaatggaaatggaacactcgaattgtaatctccgatgtggatgggactattacaaggtaattcgaatacatttgaatacataaaccgattacttgatgatgtgaattcaactatttaatctgtgctgttatttcagatcagatgttcttggtcagttcatgcccatggttggagtagattggtcacaaacaggtgttgcacatttattttcagctattaaggtttgtgaattc

SEQ ID NO: 18192 - DNA, 2061 bp, Cannabis sativa
atcaaacctagaatctatagtttcattatctacaatagagacagagtacataacatgtactaatgcattgaaagaagcactctggctaaaagaaattacaactgaacttggtatcaacctaaggacaataccaattttgtgtgacagcgaaagtgctttacacctcagtaggaatcaagtctttcatgagtgaaccaaacacatttatgtgaggatgtattttattcgagacataatctcaggtggaaagattaagctacttaaggtccctactgaaagtaatgctgcagtcatgctcactaagtcattatactactgctaatttcacaaagtgtcttcaaatcttcaatgtttcaagtcattttgagtgctaaggtccaatgctctctgtactatgtatattataggtcaaggtggagaattgttagatggttttgcccttgtaatatacacacatgtacattagcagcttagttagttaggactgaactattttacaattaagtcagttagttattaacaatacaaaatgaagtctattagtacttcccgatctgtacatttctttttagtcttgtaattagcactataattcatattaaatactcaataaaagattcattcatttctctcttgtgtctccctatgtttatttgtgattttgttcttgattgagttttggaatcctggtatcagtgcagatcagagatatgtttccaacaagaacaaaaatttggggctgcatgaccccgtccaaactctcacgccataacttatattgtaacttataaataaattgatcaatcaattctctttattatggataaagtgcattgtattttactatttaaatacactcaatttatatggctataaaaaaaaatatatgaaataacaaccgcgatggcagcaaaacggatgttagattccatatttgacgacaagaacaagctatctatctataagttttacatccgttttgtatgacaataacaacgtcaaatatggaatctaacatccgttttgcatccgttttacatccgttttgtatgacaataacaacgacgatgtaccaaacgaaccgtattgtattgtatttcatgcaatatttttatgtaaaactatatataatattcacttgtatgagcatataaatatataatatttttgtataaattaaaatttaacatagtattatatgaaaatatgataaataatccaatttaatatcatacaaaatgatttaatacaacgtactaaacgagcccttaatcaatcaagggcttagcttttattttctacaaactatcgacatgtagttaagggaacaacaagctcttgatcagtgcaaatgagatgagggagataaggttttgtttaatgagctttaatttttatttacatatttcttgttataatttggtccttccatttactttgatggtctaaaaatggtgtaaaaaataatgatataaaaaatgtgttcattgagtccatcccttattatatatactcaaaaagtaaggttgaacattaggcgtgtttacgggatttcgagttcacgggttcgggtttacgactttcgggcataagaaaatagcacatgtacccgtccgtaaaatgggtatgggtttgcgggtttaaagtttcgagtttgatgggtttctgagttggcagttggctagatttttgggtttgcatatttgtttgtttttgttagaaaaagaaaattaaaaaaggccaagctcattaacagtataaaccctaaaccatctccttccttttttctcttttgtctatctattctattcttctactatatctagtatctacctctctcgctctctttctttgtaataagttatttttttttaaaaaaaatgatcaatggctgttgtgaggcaaggaagagatcgatgtaggagtgtaaatgggtcaggtcggatctggtctagctatgatccaacctgatctagatcaggatctgccctgccccgtcccgctagatcagatctcggattggatcagatccgactagacttattcaaatcgaatttgatc

SEQ ID NO: 18193 - DNA, 3399 bp, Cannabis sativa
cgccgatgtcgagttcgatccctccacctccgcctccgccgccgccattcaagattcaggactggaaattcgtgaagcatggggattttgtgaggataaagagtagcgggagctcaagaagtgtgtccccggatttggatgatagcgaggattcttcaatagaaggcacgagtccgttggcggcatcggaaggtggacagtcgccggcgccgtcgttgttctgtccgagcccggatgttgataccaaagctgataacttcatcgcgagattcagggcaggtttgatcttggagaaggagaactctttcaggcaaagagacagggccaagtcaagatttgggccacaaacgggcttgggccggaaaaatgtcgaaggataaggcccaaaaataaggctcaaagtttaagttgttacgttttcttttggaaaaaaattacatataagaggtatactatactctacacataagaaagttccattgtagatataagtacagagttattatcatttgggaattgggttattacttttttttttttcacatttttgtaatgatttgattttttctgggttgaggaatgtttcttttttgggggaatgtttgtcgaaattcgataaataattttgtcggaatttgtgttcgattttgagatgttgtttttacataagatggaaatacaggatttgttttaagagtaatttatatttttaagtgagattatattaggtataattaattatatattattgtgtgtaaaaaatatgtataatttgagtgtgttcaatcatttttcttcttttaatacttaatttggttttaaactatttttagcatgttcagaggtgaattcaattaagttaagtttgctagttcattcattataagctcaaaatcatgtataattttgatattttataattttcagcgtacagaaaatcaaatgaataaatggtgatttttattaaatattagaggacaaaattaataaatatccaacctacgttacatatccatttccaaaaaaaaaaaaagaacacttacccgacatattgatattataactgaacacaaggaaagataattcaaattaatcctactgagcaaaaaagaaaaaaagtgatcctactgagattatttataggacaccagtttttttatttattattattgataagccatattgtatttgattattgctggtcgatttttctcttagttttggtaattatttatgaagagaaaaataacaaataaagaataaaagaaattagagtttcattcaattgtaaaattaaaagtgaaaaatacaattaataaaaaaaattatacaggcaactaatataaaatactaaaataaaataaaaaattaaaataatcctaaataatcatttaacacatcccctcaaattcatgatgttgctgcaagaagcattgcgagtttgcctaaaagaaaacgaaaacgagaaatcgtatgtgacttggtaaaaaagtcagcaagctgcagcgaggaataaaaaataaagtaatggtgtccaatttcaaatagtgaagagtaaaatggcaatcaatctcaatatgcttggtgcgttcatgaaaaactaaattgtgaacaatctaaataacactttgattgtcacaatacataggagtatgacaagagcgagtaacacccatatctacgagtaaccatcttaaccaaacaatctcttcagtagtagacgccatggcacgatacttaacttccgtagaagattgagaaacaacatactgtttcttgctcttccaagaaataagggaatctcccaaaaaaaatatagaaacaaatgacaaatttttggtctgcgggatcacgactatgatctgcatcacagtaagctcataattccaaagaggaggtagaaggcagcagtaggctctgaaagatgtagaatgcaaagaacaacagcccagtgaatcgtagttggagaagcaacaaactaactaacaatatgaatagcatatgcaatgttcggatgagtaacaatgagataaactagactgccaagaatagtgcgatacaaagtagaatcttccaaaggagagccatcagaaggagaatattgaacattcaactcagaaggagtgtcaacaactctagtatcagtaaggcgagcacgcttaataatgtcagtagtgtactttgacttagaaagaagataaccttttggcaaaaaggtaacttcaatacccataaaataaggcagagaacccaaatccttcatttcaaattgagaagctaattctgactttaacatttcaattccctgtaaatcatcccctgtaataatcatatcatcaacatataagaaaagctgaatacgacatgtagatgtgcacttgacaaataatgttgaatcatgatcacttgaaacaaaatcaagagataaaataacagtagagaacttctgaaactatgctcggggagcttgtttaagaccatacaaggccctttttagcttacaaaccttgccttgcttatgaggaacaccaggaggaggaaccatgtagagtgtagacttcctcatgtaagtcaccattcaaaaaaacattcttaacatccatttgagatataatctattgacgaactaatgtcactgctataagagtatgaacaataatcatttttgcaataggagcaaaagttttctcaaagtccatatcatacttttgtgaaaagctcttagtcactaatcgagccttgtaccgtccaatagacccattagaattggtcttgatattatacacccaacgggaaccaatagcatgtttaccaagaggcagaagcatgtttaagcttttagctatttttttttagcttctagctaatatagctcattttttatgagagcatctccaataattaaattttggagaatgcttaattaaaataaataatatattaaataataatatgtgagattatatagttctcttaaaactaatgggtcatattttatgatgtggcaagagagagaagagaaaggtaataaaaagattctaattgaacaattattttgtggtttcacacttttcgttacaaggaggtctcgtttgattctcttcaccaaagaacaaaaaattgatcattagaggtgacctaatagcattaatactgtggaaaagatataaaataaaatattatatttttagataatataaaaattttagaaaattattactattagagatgctttgagttctctaattaatgattgagttttttatgggtaaactctctcaactattaattctcttgcacttaatcttgtaagcttaaatttttgacggtaaaacccttcaaattactgaactgcttgcaaatttaaggtttcatctattttttacagttaactgccaa

SEQ ID NO: 18194 - DNA, 2721 bp, Cannabis sativa
catgggccatgcgatacaggtattatcacaaagtccatgttttcttaagttgttcttttaaggtcctttgactacttctcatttctatgtaaaataatgctaaatatacaatagaatatcaaaagtgcacatctatatgcttgaattctcaatgattgaagtcttatttgttcagggtcaccgagcttacgccggacacaagaagtacataactccaaacaagaggcagatgcttcctcattttctcaactcttccctcccagcagctgagttcaaaaggatcataagctacttgcatcgcgattcttttgggcagccagacctcagaaccagtaaagttggaagggatgtcacgaagtttcccatccctgagtgtatgtgcaatgattcgcagtctcactctcgttcctgaactgactgtagccagccgaagcataattttaaactacaacaaggcattggccgcaacaagattcttttcgcttgaatatgatcgaagcatctttcggtgaattgaatccatcggatcagagccccctttgaagaacagtggtgtttctcttcagggccatgatgatcctttgtgttaccattcttcacaggccaactaagccataacactgttaggcatgcttgcttaaacttttttggtgcttcccaaagtacatgaattattgtgatgcaagctggtggaacccccaccttgatggacaagaacagtgatgccataccttttttattctttgattcttttatactatatatcatatagaaaaaaaagtaatacagaacagtcttcttttccattcatttgtttctttttctactttttccacttattcgtatgtgtataaactctcatatatcaaaatacgtgtatatttttgtataataatgtgaagtctgttatgttacaaatttatatgttatcgtggtattatagtacttcttttccattcaattggtattgtatgcttgattgaagcattaattatgaaaaataaaattaaagaatgggctagaaatgatcatatataaaaggaaatgagactttaatatatttaattatcattattttttttttctcgaagtatatattgactcaaatggtttagtgagagcagttaaacagaggaggcatgaaccaattgacgtatgctgttcagaacaaaacagtaatattatggcataacagtaatagaatggcattatgtttcatagatgaatgaaatatgagaattatatatgcgaactaatttttggctatattactgtcaaaaaaatagatttgagggtattgaaagagaagaataccaagtgaaaatagagtatctccatccatgttaagtgcagtgaaagcaagatcaacattttgtttctgtttatgagtagagccgatagttaactaacacacaagcatgtactttctcaactgtaaaataatatagatcataattaaaagtcaaaattcattaaaaagtccaagtatattatttgtcattgtcattgcatctcaattcacacatggcattaattagtttcttaagaaaacaaatataaaaatatactgtaagctttaaatagcgttggatgcatgtgtgtactggtgtgcgtatttgtaagatttttttttttttctttttctgtttccttttttcagaagcttagactttttgtttgcctacaccaaaattggcatttgggtatcagtatttataagaaggctagattaaaaagatagtgaaatggacttatcaaatctaattagcttcgtttacttttctccgcccttgagagatactgtttttggcatataatgaataaaagacttgtggggtgattacaaatctcacacacttaaccgaaatatatgtacttacgaaacttataataataatacactcaaattaggttttaggtaaagattatatctaactcccaaataaattacaatacaatgaatccatttctcaaatattacaatcaagtgacgatacttattattgaattagctaaaccaccaaaatgttgacaatcttgaacgatctgtagattttgttttgaagcaattttgacggagacaattttaaaataaatagattgttaaaatattgtataggaactaacctaattggctatatataaattattttaatatcaaaattaatatatttaattggttggtattacattaaatcataataagatggatgacaaaaaatctcaaagactataatttacttattgactatcaaatatcaaaataaaaaataattaaataaaaagcataaaattcacttgaactaatgtagcagctccaaagcatgtagaagtaaaaagacgaattgagtctcagaacaaatgagaaaaacataaacattgtgaggaagaaagttttatttatatatataggctcatataagagaggagaattttgttataacagaagtagttacaagaaaacagaaaactaacagaattggagcctaaaccaactaatcttctaactaactacttattggttatcatcccctcaaacaaaaaaggggtgttaacaactttgagtttggtcatgttaacccgaaatttttttctggtgatgtggacatcaatgtttgacacatggcaagaaggatgacgtcatggaattgagtagacctgagtcatagcagtcaacctgggaggggaccctaactttgcgcccaggttgacttcgagagc

SEQ ID NO: 18195 - DNA, 5900 bp, Cannabis sativa
tattttcacatacttcatattagtgtgttttgtccacactctacaatagtcgtaatttaggaaaacaaatcctatatattctttcaaaattacacgtacaatttgcacccaattccacttataagtagaattaaagattaagatttttatgcaaaaaaaagaccactctatctccaagtttgctttggtcgatgttcaatagcagatttataaagaagaaaacaggggaaccaaatagaatggattataagagcacttgaaaaaaagaaaagatacacagggcaaccaactccttcacataaatttaaaaacggtaaaaaaaaaacaagactgcaaaactgaagtttaaatacttcaatataacaaattccatagacgagcctatgtgccatactaaaaatctggcccccgacaatgacgaattcaaatgagtaattcatcccggaaaaaagagcaataaaaataatttctttaacaaaaaaatcctgatcacacgcagggtagggtagagagcagcagctgtactatgtttacccaaatttgaagccaccagggggtagggtgggttggcttgctccaaaaggaaaaccttgttgagtaccgtctccattatcctgcccgttctgctcctcatcttcttcttctgcccaatatctctccaagatcttcacagccttctcgtaaatctcgtggttgtcgtggttctgaagattctcgattttatccaatccttcacattcatcaattgcctgcccataaatattgactccaccgttcagtcccatttctttgtctgcctcgcccaccttcagaatgttctccagaccctcgaggcatactgttacaatccttgcgtctggacagcttaggagatcacagagtgggccaatgcaaccttgggtgaccagaaatctgcaggtgaatgtccatgttagtgaaatatcatgcctaatgcattacagctacaatagctacgtatcagatgaatctttcgaaaaggggttgatgactgttgcataatgaaatgatcaacatcaatcgactaaaacagaaatctcagtttcaggtctatactggatttgttcatgagagccaccagaagtggcattggagatggcccatgcagcctcctttttaatatcaaactctgcattttggagaagatgtacaagtggtagaatgatattggcctcaattacagcctgcaaaacagaatttaaaagtaaaaaaaagttataagccaatcatccactggtatcctcccggatctaattagaccaaaacaaatcaccatgattccaacttggactctctcaaggtgtaaaaacccgtgtgtagtaatagagaaaataaaacataaatctaagaaagataagaccgcaaataaaagaatttaaagggaaggggttactcagaaaaatcatcaaataagggattagttagtggtttacaatcacttaggcaccctcctctcataggctagttaagtctttttgagtgggttctacctaagtggtcttaactaatggtatcatagtcagaaccctcaaataggacaaacactgagggagagggttgatctgtggacaggatgtattgataggattccacatcgaataagtagggcattggttggtgatttataactacttgagcatcctcctcaatactcatataggctagtctttggaagtaagttcaactaagtggttataatggaaaccagttgatttaagtttggaaattatctctcatcattcttatacaaatacataagtttgacaaaataaatatacgtaaaacatcaagatagtacttaaatgatacctgtatttgtgctttattgccagcagtaatatttgagatcgtccaacaagcttccttctttatactctttttatggttttgtgtaaggagttgaaagaggcaagggagcacttgattgtcaattacaaactgaaaaaaatgcaaatcaggttatgatattggtatgtttaagcagggaagcagaaagcattccttttacaatcaccaaaagaagcaagatgccaaggccctagaaatataatgtttactttacacaatctaaagattataacaaggtaatcaattcagcggtaaaaggtaataatttactgcattaacttgacccaaatgagcacagaaagttaccatttccataataatttgcaataagtaaacttttgtgaaactccttttcttttctgatacaataaataactcttccccctcccacactcacatacccaaacacttgagctaagccccaagaggagtaaacttttgcaaaactttaatataagtttataaataaagatataaaagcatataagccgacacatcatctaggaaacaaattgactaaaagtgtacaagttcattaaacaaaaaataaaacaattacccagcagagcagactactgaaagaaactggacagtgcatggcttatgtatggttaatacctgagtctgagaatcatcaccagtgacaatattacccacagtccgaagagcaggtacaagaactgtaggtgacggatgccttaagaataaattattaaaaaaaaagttagatagagaaagcgagaaacctaaccagtaacaagtactaaaactaccacaaatgaagacaacaggcatttacagagaaattacatacaataatatatgttctcacaattactatattttgtacaccccactttgtcaaaaaaagaaacaaatggttaacaagtttacaagtaaaaagagcttacatcagaagttccacaagccgtggacagacacctgattcaattacagcctgtattttatcattgggaccatctgagagataagaaagagcccagcaggcatccgtcaagacttcttcatcattcaggaaaataagttgccgaagaactggtaatgcaggcttaacctgagaggtaccaagataagttttatcgataatagttacattaacatgacaagatattgctgcacagtgcacagatatgatcctaccaaacatctccaaatggtattaaaaaaaagttaaaaatagatgagaaatgcaaccacctgttcaaatggtgtaggaggcttgccacgacagaagttagataaagtccatgtggcattccttagcatggatagctttgagtgctcatttaattgagctaacaaaggaactagagccccatgactaagaacaagatctctacaacttggtgagtcaccagcaacattacctaaagcccatacagcctgttcaacacgagaatttgattataggagaacagaaacattaagcaacaagaaaattttagattataacaaacaataattatcatttgaaaatttaaaaataaattagccagaaaacctgaaaatgtattgaatgtttcacaaaataaaataaaaaagcaactaagtttgaccatatctgaaaaaacattatttatatccacttaaaatgactgaaaaatatttgttgcaattcgcaataggtaggtaatgtgaatagaaaggtacctgctctctgacatcgtcactgccagaactaagaagttgcacaaacatggggacagcaccatgatcaataacaacccgtgtatgctctgatgttccagatgcgacattggtcaaagcccatgcagcctcaaactgcaattaaaatagtgttaagtcatgcatccatctatctccttttattattaatctgactgaacaagtaatattaaaactaaacaaaaacaaataggcgctcctacttgcaactgaggcacttcattccttccaagaaactcaacaaaccgaggcaccacgcctgctttaataacttcatcaattggagggcaacgctctgcataaaatacaaacctaagtaagaactaaatggatatgctcctgatggttcaagcatagagattatgaccagaacccctaccaattgataatagctttctaaactgagtagttgcctctaattgtacagcagaatcatcagaccatactccttgaaccatcccaggaatactttccaactgctcagaaaacacacattaaaaacattgaatataatgatccaataaaaaactaaagattcaactttctgaaagaaaacttcccataaatggatgttattagccaattgtttgccaaaccatttatttctcaatcaaacaaaacacgaatgcttaacatatagatggaataaaccttggcaatggtcgacacaccatatctccaaattattactcatacctatcatctcaaagcctaatttcaaagagaaatttcaacttctcagcttgacactaacttgagcaagacatttagcctctccaaaaaccaaaacatgttattttacaataacgaaatcatgaattaaaaaaaaaacccttccctaacaacaaaaagctaaacccatatactaacgcagaaagagacaaccccacaacaacggtgtccccatttcaatgttatattggaaattgaattcaagcttcatatatcaataaaggaaatcagaaacccttccctaacattcatactgaatattttgctttaacacaaacaacaatctaaggttcgtactttcatttcggatttcaaccacaaaaccaaataaaaagacctaaatcgaacaaaataaaaaaaggtacgaaacagaaactgaaatcaatcaacatcaagaatcgaaaaacaatcaaaaaccattaatcaaaacgcaaatctgaatcgaaattctgcaaaatggggaacgaccgaacgtaccctcttctccaaaacggctgcattttgtggaccatcggaaacctgagactgagaaacaaggccgaggccaagtccatccctcctcttcttcaagagattatcttcacgcttgttcttcctgatctcaaccaaattatcctctctcctcctcctggcctcgtcggcatcaacaccggtcttgtaggacttcttacgcgcctcggttcgggaactgggtcgcagagacattgttggttggtttagtgaaggagttgcttggaatttgcagaccaactgttcgaggaaattcgaaggcggagattggattggattggattggaagaagcaagaaagaaagaaagaaagaaacagtgagaaatgaataaaggagggatcgttaatccaagtgggagtgccaaagatatattattctaattgtaaaaacctcattcataaaatatatttatttatttaaggcataaataattaaacttaagggtttttttatttttatattttaaaataattttttttaatataattttaaagaattctaaacagaaatttttatagcaattaattgagcaatttaaattgtaaccaaaatatttataacggctcatataaaaattactcgagcaatcctaaattaatctccctaaatttaattatcgttcaaatttatatttgtatagtaataatataatttatgtataattatttttggtgtattaaattattttaaaattttcaaatatttacaaggttaagtaattatgatgttcatgtaaaaatattgattaaaactatatgaaatgtcaataacataaaaatggtgcatgaatacattcttttttagggtgcagtagaattttccaaaatttaataccttcagaaataataaacaatgaattaacttttatatagaaattgtaggtttttatttttatttcaaaatcttataataatatttattttattatttttattttgtattaaatatatataacttaaaattataatcattttaaaaaagatacagtgatgcactatttatttgtttcggcatttagaaaaaaatttagtttattttttttatattcgtgtacattatagttatttaagatattctacaaaat

SEQ ID NO: 18196 - DNA, 3646 bp, Cannabis sativa
tggaaatgctggacagaacaatggttattgaagagtttgttacataagtagttaagttagttgttgctgttagttaaagttgttaaaagagttagttactctgtctttctttcctgtagctaagtcggttgttttgatcagcatgtatataaatacttatatctagctttgtattcaatcaagaagtgaaataataatttagattcattttcttctctctttatattttcttctgcaactttctcaagttggtatcagtagactgttggttcgtccatggcgacctcctctggcgaaggtgcctcgtccaacaactatggcgtttccacaaccatgtttctccctcctctttgccttgacaataacaactatttcttctggcgttcccaagttctcccagcaattcgtgctcatgatcttaagggcattcttctcaatcgcaaccatcctcaaccacggattcgtcaacctcttgaatccaccaccatggttaataatcctgaattcattcgttggcatcgacttgatcaatttcttttatcatggctcttatcttctatttctgaatccatgttgggtcatgttgtcaattgtgagtctgctcatgacatatggagaactcttgagcttctttttggcacagcctctcgagctcgtatgattcatttgatgaatcaactacagaacaccaagaaaggctctctagtcattcatgagtatctcttaaaaatgaagaaccttgcagatggtcttcgagcagctggaaatcaaatcactgaggagcaattgattctatatgttcttgcgggtcttggcactaattatgaagatgttgttgttaatcttacatccagagaccacctcacttttcaagaagttcagttcttgcttcaaaatcatgaaatgcgaattgaagccaacaatgcaacactcatggcagatttctatggagcctcaaccaatttcgcccaatctaagaaatcggctactcttaatattactggtaatcgtggtgcttcgaatggatacagaggcaggggaaggaatacaaatggtggctgtggtcacactggtggcagaggatcctacactcagaaccgtgtcatatgtcaattatgtgggaggcctggacagacagtccaaaagtgctacaggagatttgagatcagtttcaatggaccagatgactcccaaatcagtgcctcatcttccaattccaaccaacccccttagcccctatctttgctcaacttggcatagtctttagacatccatgtccccacactcaccaaaaacaaggaagagccgagagaaaagatagagatgtcactgaaataaggattacacttcttgctcaagccaaaatgccccttcatcattggtgggatgcctttgtctctaccacttttctcataaatcgaatgcatgttcaaagaataaatatatctctccatttgaaagtttgctaaatcaaaaaccagattacacttttttaaaagtttttggctgtgcttgttttccatttctcagaccatataacaaacataagttcaattttaagacttctatgtgtatttctcttagctacaacacctctcacaaaggctatagatgtcttcatcctttaggaagaatatacatagctaggagtgtaacatttgatgaaaatatttttccttacaactctctgtttcctagtgcagcaccagcccccaaacaaaactctcagcatgttgctattccctttccaccatttcctgccactatcacaactacagctccctgttcccctccttcttcctcatcatctcaccacatcaggtccacagacccctctccatttccaccacagacacaaattccttcccccataccacaaccccccatcctcgactgacaataatcaaacacaaccactgcctctttccaacagaaaccaacctttaccccctgctcttacctctctccatccaatgaaaacaaggtccaaatcaggaatttataaactaaaagctctagctgctaatattactagtactaactaatttttatttgagccaaaatctataaagaagactcttgcagatccacaatggaacaatgctatgacaactgaatacaaagaattaatcaagaaaaagacttggattcttgttccctacaatgatgatatgaatgtccttgacaacaagtgggttttgagaaagaaatacaaagcagatggcactttggagagattaaaagctcgtttttggcaaaggggttccaacaaacacatggagtagactatttcgacagatttagtcctgtggtaaaaccctctacactaagaattaatgtttactcatgctgtcacttacaattgggacattcaacaagttggtattaataatgcttttcttaatggagagcttcatgagacaatctatatgcagcaaccaaagggctttgtggatcctcaataccctacatttgcaaactacaaaaagccttgtatggcctaaagcaggcccctagagcctggtatgaaaagctaaaatcttcattggtgtcttggggattcaaaaattcagtatctgacaactctctcttttcctcaaataagaatggaaaattcttactgatcttaatatatgttgatgatatgttaatcacaggtgaagatactgctgctgtctcacatctcatctcctctctcaactctcaatttgcattaaaaatcatgggatcagtaagatttttcttaggttttcaagcaatccaagatcagtcaccactctaccttaatcaagctcaatatgctaaagacattctaagaaaaaaaaacatggaagatgccaagacttgcaccacccccatgacacctggtcataagctatccaccatgggcagtgatccttttcttgatcccatactgtatagaagcacaatcgggtcactccaatacctcacattaaccagaccagatctcagctatgaaatcaacaaactcagccaacatacgcaaactccaacgaatgctcattggcttgcttgaagatgggtcctgcgatatataaaagacaccataaaccttggcctagtcttcaaaccaacaaaaatccttgctctggaaggatattctgatgccgattgggcatgtaatttggatgatcgaaaatccactactggttactgtgttatgcttggttcgaatcttatcacgtaggggtcaaagaaacaaacggctgttgcccgttcaagcacagaatctgagtaccgatccttgtcatctatagccactgaggttgtatggatctcctctgttcttaaggaacttggcattacacagccatcgaaatgttggacagaacaatggtgagctcggggtcaatcacccctgactgtttctgcttcagcagcggccagttggtgagcgtttaaatctcgtatgacgcacttttcttcttttgtgtagcctcctctgcggcaacagccatgcaccgaaaatgtctcgctgatctcttgccatgattgctcaagttaagcgatttggaggaggtgctgctactgcctggaactacgtcgcatagttgtagaggagagagtgtaacgccctaaaaattaggcacgctacaccaatcgattaagaaaccctaatccccta

SEQ ID NO: 18197 - DNA, 1888 bp, Cannabis sativa
  modified_base (1830)..(1837): a, c, t, g, unknown or other
acattccgtgaaagtacaatcacgaaataaaatcatatatagttgggcggcagggcatgaagtgaactagagaagcatgcaagtttgaattgagtttttgcctctaaatatacaaatatatgagattgagttcatgcaacaaaagtttttgtgtttcactttattcttttgtgtgtgtgtacaaattattaaatagcacacaatttaatatatggttgtcgacccaagctgtctgttctaaagatttatttgtttattttcgtttgataatggaaagagtcgtgtggagctctaataggtatgtgggaacattacgatgtcaattttaggtgaatgaaaataaagttgaaaataaacaaaattctttgatgaatttatgatttttgatgacccttttccaattttaagatgaagtgctactactactagtgtcacttaaccctttaaaacggggagcttaacttaaattgacattttcgttgttgtaataagtaaagtgataactattatttttcaaaataataattttatgttttttgagccaatagctagttgcatattaattatcctttttcaattttgagattaagtactactacttctagtcctactcatcccattttaataaggattaacctattaactgacttttgtggatgtaaattaatgtattttaattagttttataattgttgaagccaatagttgcatattgcttgtaagtaacggcaagattataatgacacaaaactgaaaaagatgaagaaataaatcaaaggagttggtttggtttatcaaatgatcaatctcatcatcactttatctttgcctaatttgcgtctcaaagtgtcattagtcataactacaatccacactaaagtcaattacttagtgatatataaagttgaatatatgggccatatatgtttgtttggtctatcatcaaatgacccaaaaatcttaatttaattataaccacacactaatcgccattattaatgatgagtaccattccgattatgttttccagatattattttctcttttctaaaagattagattcttgatcaaatagtatcataatatgcattgacgccaaagtatagccaagaaactaaggcttaatcaattagtcaatatcggcagttattatcaaagttaattataatgtaatatattagacttttgtctttaattagctctatggtttgattaatggccattagtctaggctcatgttttatttttttcataaagaatagtgtataaaattaagtacattttattagctaggaaccttccttgtacgttcttatgaaaatcaaacatgtatacacgccttccttttggaaatgtatgtacttgtctttattttatgtataatttcatatttattgtattttgactttattatttttcaacaactttaattttatttaattggattttatcaatcgataaataattatccgattgaatttattttttctatacaactatctcatttaattattttttttgaaacaatgactatctcatttaattttttttaacaggtttattgctaaaaaaaagactaataaaacatttgtgggtggaatataatatgtatagtaacgttatattaaatatgtaatcataataatacattagatttaataattaaatcattattataagattgtgatgtatatattataatacaagttaataaaattatttctatggtaactataataggttaaatatgataatacaatttaaaattacaaaaaaaaaataataaataaatgaattcaagtttatttaaaataggctaattaggatttnnnnnnnntgaactttgacatgtactaaatattgccccctaaacttttaaggtcgttaa

SEQ ID NO: 18198 - DNA, 4002 bp, Cannabis sativa
gttaaattggagctttttttttttgggtatgtgaccatttataggggtttgtagtaaatttttgtttttggggagtttattaatttaattgatttttatttttattttagggtttttatttaatgactgaaaaatctgagcctgaggatcttgacctcaattccgttgtcgttttaagtgagctcacaaatgagattaatggagctaataaccaagcaggagctgtaataatggaggttgacactttgaatggcgaaacaaacgaggtcagggatggtggtgtgtccaagaagagtttggagagtgaggtgaatgatgctgagaatgagaaaatggaagatctttcttcaaagaaagatgaaggtacagattgtggtggaaatgtcggggtttcattggatgaagccattggtgcaagtgaagctgaaaaagagaaagaaaaggaaaaagcttttgatgatgaggaagaaagaaatgaggatgtgaagaaaggggcttctgttgtggaccttcctagttctaatgttgatgaaaattcgagtgtttatgaatgtcttgaggctgctgattctgtttctgatgttgttaagcctcaatctcctggaactactgaatctgcagggcatttaatagatgatactgtggttgggttggagaagaaagctgagcttttgccccaaattcaaaaggaggagctgaatttggaagttcatttagaggcacagagcaaggaagacatgacaaaggcttccaagagtagtgagaatgaatctaaatcttctaatatcgtcaatgatttaagcccactggtgtattctagaggaaatgttaagtcagaagctgcctttaaaccggaatttgctgttggtgatttggtatgggggaaagtgaggagtcatccatggtggcctggccagatttgtgacccttcagctgcatcacgaaaggcgaagaagtattcgaaaagagatggttatttgatagcctattatggagattatacatttgcgtggaatgatgtttctaggatgaaaccgtttcttacacatttctcacaaatggagaagctaagcagtactgaagatttccatgatgccctcgattgtattttggaggaggtttcaagacgggttgagtttggactggcttgttcttgcatacctgaagaagtatatgccaaccttaaaactcaaataattatcaatgctggtttagaagaagataaatgtaggatagatggtggagataggcttttaactgtagattcatttgaacctattaagcttgttgagtatgttaaagaattggcccaagttccttgtggtgtaactgagaagctagaactcactattgctcggtcacggttattggccttcaatcgcagtaagggctattcccagctgccggaattcaatatgcttggtgggctcttggagaatgatgctgacattttgttatctggagggacacaacattgcagtgaagtgattggggctgttgatttgcaacaaaagggtgataatgttgatgcatcaatatctgataaagaaaaaccaaaaagtcaaggcgaatcttcccttaaaagaaagcaagtgtatggcaatagcgcatttccaagtaaaaaggagaaaatagtgaaggattttgctgatgagaagcatttgacaactcctgtcaaaataagtggtttggaaagcaagcttggtagtaagaaacgtaaagtgggcgaagtgatgtctgaagatttggctgtaaataaaaagaaaaccatggctagtgtggatgataacaatgctccacagctcccaaaaccaactttcagggtaggagagagcatccgcagggttgccagccaactgaacgggtccagtccaattcttaagaatggagatggaatctttaaaagtaaagcgaacattttgcctgaagaatcaaaacccgaaaagctagaaaccgaggagtgtcctgatgataagctgtctcagctctttttggctgccagggatcccaagagggtaaacaactcttccatgatcactttcttttcagagtttaggagtactgtttccttaggattgcccagttcagaaattgaggccttaggattgcccagttcagaaattgaggagtctctggagaaagtgtttggtagtaagactgtgaaaaaattaaccaagcgtggaagaaaatctaacatgcctggattcactgaactaccttcaccagagatgatgaaagagtcctactggtctgatagaatagttcgaagcattcctgagcctgaagatcgaaatgaaattgaggaccttctagctgcaaaatgtagagagaaaaagattgacaactctgccataaaaccgccacaaaatccccttgaacagcaaactggtgatgagaataccgaaatggaagtggagaagagtgatagtattatcgatgataactatccaacagcgctgattttgaactttacaaacttggattcggtccctacagaaaccaacttgaacaagatatttagccaatatgattctttgaaagaatcagagacccaaatcttcaagaagagcagccgtgccaaggtggtttttggtaaacgttctgatgctgaaacagctttcagtagtgctggaaaatacagtacatttggaccctcacttgtgagctaccgcctcaagtatttaaaatcaacacaacaaagtaaagcttctccaagtccgaagaagaggagcaaaaaagggactgaatctgttgaggagggcgcaaatttgatccaacaaactcagaaagttgatgaagattgaacaataataagtcatgctacttatggtttcatgggtttatagaaccgaagagtgtcttagagagtggagatgaattctttcctaggacagttccccctgttagtttagttcagccactcaagtctacaacatgtttatttctttagttgtatggcttactgcttttatttttattttatttcactttgttactacggttttcctccgccataagtgaggctccctaattaatttggtaggagatcaagcaccttcttgacctttgtctctttttcaaaaaaagaaaaatgctacttatgatttcatattgaaattatttgtttcttaaaaaagattacttaataggaaggattaatgattggttagatgatgatttgcagagttcttggggatggatgttaagccatgctgaacctgtctacaaggtaatttgtaagttacatgttttcaatgcaaaatcataaaaactcatgcatgtaccttattttgagtcttattgctgacattttaatacgaccctgtttgtagagaactaaagaatatcaatatcattggtacaattccatcaaatgttagtgaactcagaaagttgcaatgactgtaagttcattgaagtacttaaaactagccaattttcaatggcttatacctgtatgggctatatgaagttatactcatttccttttaacagggatctgagcttcaacaagttaaatggacaaattccagactctcttttcaacatgacttaactttttgatttgtaatatatatattttttttctagctccttgattgaattatatcatgttcttcatgacacggctactatattataatatcagagcaaagtataatattgttatttctaaccaggttgcttggaaacaatagcctaaatggtacattgcctctgcaaaagagtgaatctcttctcaatatgtaagctaatcacaagagttatggcaatgattttgaaattgacactcttcttaattgtgatatatatgttttatgcttgcagagatgtatcgtacaataatcaggtaaccaaagcttgaatttgaattggtcaatatggtttgacatttgcttaggcatagcaagaggtttagcttaccgtcataaggagtcaagaattcgaattgtacaccgagatgtcaagtccagcaacattcttcttgactctgatctcgtc

SEQ ID NO: 18199 - DNA, 2669 bp, Cannabis sativa
aataataataaaataaaaaaattacttgtctgtaaaaccctaaatcagagaagaagaagaagggaacgaaaatggcggacgaaaccatatcagagcgagaaagacgacaaattgatcagattatggagctcgataacgaagaattactcgtcgaagaggtcgacgaagacgacgaagacgaagaagaagacgaagatcatcgtcgcaatattggtagcagtagtaatagtaacaacaacagtggattcaccttcaatacagatttagcttcattacatacatacctcggcaatgtagaagacacacaccacagagttaaggttggatttttggaaggcggcgatatcttcaaccttccgattttctatctcgaaggtgttgttttgtttcccgaggcaacacttcctctaagagtaatcgaacctaattacataattgcaatcgagagagttttaacacgagctgctgataatgatgtatcgtcttccacaatcggtgttgttcgagcttatcgtgatgatgatgatcgaagaagaagaacaagaacaacagcaagcttttcgagtgttggaacaactgctgagattcgacagtatcggagattggaagatggttcgttgaatattgttactcgtggaaagaacagatttcgtttgaaacgtcggtatattgattcggaaggagttccttgtggtgaaattcaaatcattgaagaagatttgccactgaagacgccgattgatgctttgggagatcggttgttgcctttgaataaggatgatttagtttcagatgaaagctttgaaagttcattgtcgttggaagaaaggagagttcaccgatctgcaattgcttcttgttcggaattaacagagaatgattctgattttggattgggaaagagttcaagaagagattcagagcataatattaatcagttgaggagaattccaagaacattttggccattctgggtttatcgaatgtatgattcttattgtcttgctcaaaaggcttcaggtatttctgatttctgagtttaaattttgttatatgaattatattcaaaactgattgtttgtaaactaacaacaccaaaatcttaacaaagaaacaattttgaactaaggttagatcagtttaaacaatcaaaccagaaaagtaaggttgttggatcagtactcttactctgcttttagtttaattatgtgataatatcatttgagtcataataccttgatttacaagaaatcaactgcaactatagagtaataaattgtatactttgtattagaatttatgtaggaaagaaagtgaatttacaattttggaggaaaaaatgagtggaatgattttagatcttaaaatccttttgacttttaatggataaagttcagtttttttagatgacattctgaagattccagttagtcttttagtgagtttatggtatcaatggaaaattagttttttgtactttgtttaaaattaaccccagaagaatagctctcaaatgatgttttgcttccacaagatctaatcttcaagtctctcctagggcaattacataataactttgatagttttctgataaagttatgttaggccccatgagattagttgaagagggtatggtgtctttgtattggggttggattgagtgggaacatatggtatatatagaagggtagggagagagagatagggttatgccgagattagtgaaatgattcatagcatcatggagagtctcaagctctcgaattcctgtggaacttgtgactcttgacattttctgccattcaataatatctcagctcttcttctacaacaaatttcaatacttctgttactgctctatagctattattctataattctgttactgttctattgggtttacttagctaccaggttcgggtcttatcaaattaggcggggagcttagtttcaataatatactttttatgagtttatgggcattttagttttcatctctgaataatactatctgctctttacgacagatatgtggaaacagatagttggagcaccgagtatggaaggtctggtgaagaagcctgatcttttgtcattctacattgcgagtaaaattcctgtttccgaatctacaagacaagagcttctggagatcgacggcatatcctataggttgcgtcgggaaattgagctactcgagagtcttaatctccttaaatgtagaaactgcgaggctgtaattgcaaggcgaagtgatatgctggtaatgtcaagcgatggtcctctcggtgcttatgtgaactcgtacggttttgtacatgaggtcattactctgtacagagcacatgacttaactctcatcgggacaccagagagtgaatacagttggtttccggggtatgtgattgattcttgaataagctccaacatatgaggagtgacttgaaaaatgatttctaatttattcgatccattttcttcgttcttcttccaggtatgcatggacaatagcagactgtgctgcttgtggaacccaaatgggatggctctttacagccacaaagaagaatttgaagcctcggctgttttggggtattcggagttctcaagtttccatctgattacttcgatctctgttgtgagtgttatttttttttttgaaaatggcg

SEQ ID NO: 18200 - DNA, 5111 bp, Cannabis sativa
  modified_base (3170)..(3173): a, c, t, g, unknown or other
cagccacgacgccgagccggtacgagaaccagaagaggagagactggaacaccttctgccagtacctgaggaaccaccggccaccactgtctctcccgatgtgtagcggggcccacgtgctcgagttcctccgttacctcgaccagttcgggaagactaaggttcacaaccaaacctgcccctttttcggtctccctaatcctccggctccctgcccctgcccgctccgccaggcctggggcagcctcgatgccctgatcggtcgcctccgcgcagcctacgaagaacacggtggtcgacccgaagctaacccgttcggtgcacgcgccgtcaggctttacttgcgtgaggttagggattttcaggccaaagcccgcggtgttagctatgagaagaagaggaagaggcctaagcccaaaatcacatccaccaccgctgctgcctccgccaacgccgctgctgcttccgccaccggtactagttagatcatcatcaacaacaactctactatcggatatctctttcatatgggtatgcatgtattatatattatatattattattaataataaacgattgatattattcgattcatgataactattaattagtttagtattttttttttctttgagagagaaaaaaaaatactatcttttcttctttatagtctttgaatatttgtgggtgtgttttagatttagtaatttaattataattattgagtaattttgtgtgtttttttatcagaaaaatataatacgtttgaatttgggggcaacgtcgtccttatatttgctgtttaagggtgaaaattggcagtgaagaacagcaagggtggtatagtgggattagactattcaccgcaaaaaaaaaaaaaatgataatggttgtactctgaaactactgcatacaattaattaaacattagatcgatatcaatatctctgtaaaaaaaaataacatatgtatttcttgctttctcttgttattaatcatcttttcttttaatttgttatcatcatctttattattctatgcatttgcatatatgtgtgtcttactatatatataatttaaatgtggatatagagtatatatatattcctcattattgcatttcatattgaataatggttatgtgttttctcaacacaccacatataataattatataaaaacattacactacttaattaaattaattaacttgtaatgtttttatcacatttataatatatatataaatatatatttgatcaataattttagatagacttaatttctaatttatacaaatgtataagatcatgagacagatattctatgtgcatgtctctagcttattacttttatgttattttttctctctgtgtactgatctggagcaatttaataataagaataagtaattaatgatgaataattaattaatagagagatttaatcaatattatatattcatctcccttagctgtgacctagctatatggttatatatatatatggaaatggaaagctcacgagagtactactattagcttagagtcaaggttaggtattagtattaaaggcaatctaattatgagatctctattaaggacaaagtttattagattatcttttttctaatttatttatatatatatattatatgtagttgccagctaaactcacaacactactatacttagtcatgaattcaacaatatttttgtttttaaaaatcatagatcttaatccgtgcatgtgtgtatgtatgtatatttaaatatgttaattgaatatataaattgttctctatatctatggattctagcactgctgctcgtgtaattaattggcttaatttagtacttcttaatgtatataaatatcaattagattggatatagttttgagttattattatttaatcatctgaaatcaaggacattaattgttaagtaatctatatatatttatagtttggtgtcatgtcttcttgtgattgtgaatgtagaaactcgtaaatataattggtgcaatatattttgagatcatagtattaattatttatgtattttatatgtgtgtgtgtgtgtgtttgtgtgtggagagagaatatattgatataagagatatgaaattctatcatatgtatagattctaaaactcatttctgggaaaaagatctgctatatactacactcttgatgaaatgttagttgtgttgctatttaagtatatgattgcattattatgtagacctattaattggctactcatataagttattagggtgtaagaaaaggtcatttagttataagctatatagttttctaatcatctttcgaagtttatgtgtatatatatatgagcatttgtttttttcttttctcagtccatgtcgtaaactttaacataagtatatatagatcagcataattagcttcttatatttgaggaaattgtttgtttctacggccgattgatcgtgcaaactctcataattagctcattagtattacattatatcaactatcatttacttacatatgtactctaccttaataactacagaattatataaacaggtgatgaacatgatgctttcttaattggtagaaaaattttgtatattatatgtaattaatatattcgtatagctacaggctccgtttttagttatttgctgatattgaaattaaagtaattataacgccaacagaaaaaaaaaactctaaagttttaaaaatgtttgctacttatatgattttactaataaattgtaaggtagatcttataattaataacgcatatatatattagtctatttttattgttgtaagtattttttaatattggtactgttatttatttatctaaagttaattaaatattgggtttctagtaatgagcttatagcttatacaaatatgtgtgtatatatatttttctgataaaaaaatgtttatataattgcttttattatataataaacatacccatatgttgaattgttgatttaattacttgtttcttttaggagaattacctactgtttgggtttctaaagtagttgcagtaggagattctgtgcgattttttgttgcaatttaagttgcagcgttgcaataggggtttctatgtctaattctgtaaaaatacaaaaaaaaaaaaactatttnnnngtgtaaaaataaaaaagcccctttcttttactgtatttctgggagataatactggacactattttatgttaattataataattttgagttcctcacatttagggtgttcacggattggtttggtcgtgatttttaattttttcaaaccaaatcactattacgatttttttaaaaattcaaaattaaactagaccaataaaatgatcaaaccactcaaaaacaaattagtttggttcgaaccattgtatttcatagttgttctaatttttttttacaataattatttattttttcgctatttttttttagttttaataagtttataatacataaataacaataaaaaactattatggtaacaatataaactcaatatcaatattctacttataaaagttattcccaaatatcaaccttttatcaaaaaagaaatatatatatatatatatatgagtatatatataataataattattatatggattggtttagtttgaatcgctactgagattttaaaaattgtgactgaactagagaatttaaaacagtccaaattgatcaaatcatttacaccggattcatttgatttgatctcaaataatttggttcgggattagttagaattagggattatatgaacaccctagtacatctatatacaattacaataattttcgattccttacatctctatatgcgtttttaatgatctcataattatgaaaattaaagattaatacaacaaaaatatataattatatatatatatatattaagttaatattacacgtatatatacttaattatattaattttattgtagctgtgtatattaattcttagttgtataattttttttttttttttgacatgtgaattggataaaaaattaataatagaatcattcttcttagggatttttacaccacataaatttttcaattttttttactgtggcgcataatttattttaaaaatacggtgtattttgtataccatgtgttaagttttcactgttcttctataattattgtttagttattctattattattttaattgttctgatttgtcgttttagttttacggttgttttataaaaatattgtaaatttttgtttaaaattcaatatttttgtaaaacttattttttttttatgtgtaatgtgtttaaatttaaaatataatgtgaaaaagataccattaatataaaagataaaagagatattataatatgcacgtgtgtcctacaaatatatgacgataatatgaaagtaccatatatatcttttgaatgagaaaataatgtttgaaattaagcaaatcatatagctaattaagtaactaattgataaattaaggaaacaaattgaatatataaattcatatgtgtgtatgtccatatgtattgcagaccaggcattttcttctctcccatatatatataaagatatttggcaaaaagtagactggttataatgcgaaaaaatggcgatattgtcatctcaatcgactagctacactcgttttcagaatataatttctataattaattacgaaaaatatattaataaatttagggctatagcgtgtagacacaaataaagtaatataattaatttaataggacatgagaattaatacaaaaatgttagcaatgtgtatctctctccctcaaatattttaataatcatcttttcaatcgaacaggatttaagattgtaatggaataaaagtcacattacaatatttagtttgtatttctaacctttgtaatgaatttctattattacaccaattatataaattctcattatactcttacacctacctgaataaggattacaatgacaattttacactcttacactcttacaattttacctcttccctttctcactttgaaaatataagcttaattaggatttttttccctaaa

SEQ ID NO: 18201 - DNA, 4101 bp, Cannabis sativa
aaaaaagtatatgctttttctttttggttttgtttaataactagttaatgccataaatcaggctgggaagtaaaccaattgatattggaaaaagtgcaagaaagaagaaattaaggaggagacaaagagacgatcgatccatttgtcgatgccaaatctcataaaagtatcatcactccactctactttgactccactctactacactctcaccacactccacatcgttttctatttttagaacaacatacacactaaatattgctacaatcacgctcagctatggtaactaaatacatataaatatttattgtttttatttataaccaaaaaagcacatacaaacacactgccatgtgaatctcacatgcataaaagagtcccatggagtcatcaatactacaatagacaaagttttcattttttctcctcttctttttttcaaactcaaacaagagttttctttcactttcacttttccttttcctttcccattctctgtttttttttccctttgggggaaaaataatagacatggtgaaggaggaagagaagaagaagaagaaccagtaccttcacaattctaccaaagtttcaaaattttcatcaaatcccattttcttatcacaatgtagtcttgtactaattctttttcaagccttcattttggccaaagtggaagccttcaactatggtgatgccctcacaaaaagcctcctctacttcgagtcacaaaggtccggtcgcttaccgtacaatcaaagggtcacttggcgagaccattcgggcctaaccgacggtctggaacaaggagtacgtgcccaaatctcagccctccattctctccatttgtccaaaattgccaaaagaaaaaaaaaaacaaaaaactattttttttatacgcatttaataaaaaaaaattgtaccaaaaccagttgtacacataattatatttagtattaacaatgtgggcactttttgattttctgtttaggtagatttggtaggaggatattatgatgccggagaccacgtaaagtttggtcttccgatggcttttacggttacaatgctctcttggagtgtcatcgaattccggcaagagatcgccgccggtggcgagctccggcacgccatggaagccatcaagtggggtactgattacttcatcaaagctcacactagcccaaatgtgttgtgggcagaggtatgtatattatgctataatatatataattaaaattttgtatgcgtgacaatttaattaatttttaatttttttattattatataggtaggagacggagacactgaccactactgttggcaacgcccggaggacatgacaacatctcggcaagcttacaagatcgacgagaagaatcccgggtcggatctcgccggagaaacggctgcagccatggctgctgcttccatagtttttaagtccacaaacccacattactctcacctacttttacagcatgcccaacaggtaattttataattatggtggaccattttatgttaatgaggtattaaatgggttggttcaaattaaagctagctagtagtagttttaattttgattattaattggtaatttttgtgggcagttatttgaatttggagacaagtacaggggaaagtatgatggtagtgtgggagtagtgaagaattactatgcgtcggtgagtggatatatggatgaattgttatgggcagctctgtggctatacaaggccaccgacaatgaagtgtacttgaattatgttattgacaaggctcatttctttgggggtactggttgggccatatctgagttcagctgggatgttaagtatgctggccttcaattactagccaccaaggtaatctttttaaatttttaaaattttttcaaaattccaattcataacaaatagttaaaagtaaaaaacccttctactttgaggacaaggggacctactagtctactactactactactattactatatttatttatttttggttcactctcactcgctactctcgataggtgtcttcttagttttggtctataaaaatcttattgagattttgcttttttcctatattcaaagaagaaataattacacaactttaggaataaagttcaaacaacaagtatgccccacttaataatagggttacattacatcgcgcatagacttaccatttcaacagagaaatgagaaggttctgttttgtacttttttttaatggtagaagtaatattttccagtttggagaaaaatacgtaccaaatttatttataataacatatatatacagggcataattgggattgtataaatggtcatatcgaacatctgtaattgcttcagcaatggctgagtttgtatcaataatgtttgatgattattgtctcacccattttagtggagcccgatgtttcattttaattaagtccaactccaatgaatgtaatatttaattacaaatttaaagattttcatatttgacacataccctttctttgtgtgcagttattaatggaagaaaaacacagagatcatcagagtcgaacaattctagagcaatatcgatcaaaagcagaatactacatttgctcaagcctaaacaagaacaatgcgagcaacaacgtagaacgaaccccgggtggcttactctatatccgccaatggaacaatatgcagtacgtctcaacggcgtcgtttcttctcacaatctactctgaccttctcaagacctcaggtggtggtcaacagctcagctgccacgctggaatggtgggccccgatgaaatctttagcttcgctaaatcacaagtggactacattttgggctcaaacccaatgaacatgagctatctagtgggctttggcccaaactacccacaaagggttcaccatagaggggcttcgattgtgtcgtttagggagagcaaagggttcattgggtgtacccaaggctatgactactggtacggacgagaggagcccaacccgaatgtgctggtcggggccttagtcggaggacccgattcacaggacaattttggtgatgaaaggaaaaattatatgcaaactgaggcttgcacttacaatacggcaccattagtaggaatttttgccaagttgtcacaattagaggaccaaaaattggctactcatcaaagtttggatttgattgcttcttattaagaatagttttgggcttgggttcttttctaattgtgggtgaaccaaggttctcccctccttttttgtatcttaaattgtttttcgtaaagtgttcataatactataaagtttttttttttcttttttgaaaaaaagttaaagccaaaaaaaaaaagttgaaataaagatgcaaaatttgtccattgttatgatgaaatatacttatctatacgtcttatcataccaggctgcaaatgtaatggagaatattttttttttatgatttagataattcgatatttgatgcaattgggattttgttaaatttataatgtacatacatcaaagtagagcccgttccttatgaatttgtcactaatttaactaatgggtttttataaaaatatatatatattttttaagtaatttgttacataaatacttaaatttagctttcaattgtaaataaatacctatcttatatttctgaaacactgtaagtacctaatcgttaatacattaaatccatgtatcattttcttatttgtatatttgaactattttttttaaataataaaaatttaatgacttggattaatcaggaattgctacgtcacaatttaattagtcaggtacctacaaaagttccaaaattataacttaggtattattactctcaaaaattaaacttaggtattatttacaactgcaagttaaacttaagtatttatatcgtaaattactctttttttttttgttatttttacgtttggaaaatttgaatttctatccatgcattacgggataattttttccctaaactaatactttctacattgaaaacacatgaccactttttcaaaacccaaaaaatacccctttcaaaaattcaccctttctctctccttccctc

SEQ ID NO: 18202 - DNA, 6514 bp, Cannabis sativa
acattttagcatatataaaaccttttattttaaatattaactactaaaaaatattattttactgtgtaattactaattattttattaaaaatttatataattactgtatcatattcaaatacattttttttaaaaaaaaatatagtgtaattacacagttagttttaaaggtactttaaatgtgacaatttggacgtgtagaataattaattaatttttctcccaataaaaataaatttaattattttaaaataactcctaaaagtggagtttttccattattatgtcctctcccaattttgcaagatagtcaagtaattttttctggggctgtacttctgttaatgctaaagttttagttttcttttttgcttaatattttaattagatacaatctctcttatatagtttccaattttagaaagtattttatgctgttttcacacgccacattgaaaacgcaatatgagattctgtttcttgcctaattaatatatttgtctaaatgaagaaaacagcaatataaattaattttttttgagataatatatataaattaggtttaactaactagattaattcattttagaatttagtagtgataaacataggttagtagttttagatttctttacaacgtgaaagtttcaaattcgaatctctctctaaagttaaaaaaaaaaatcattttagaattttttcgaaattatttttgtactgtgagcaaccaccgactactggggatcgaggcaatgttattgtatggaaattgtgttaaaacaatggccaaatcacataattactacctaagtattttatgtaaaggaaaaacgaacagaaaaaacaaaaaagtgaaaacattttataaaatgaaactgttacgggggttttaatgaaatcatattaacttataaaatgaagttttattctatgacatgggggatggatggagcacatccagttactatttagctaaatacttcatgatcagaaagtagatttattttttgtctttaatgtgtgtcaaaaaaataaaaaacaaacccaataaacttgtgtaacaacaatcaattctaatttctaaaaacacttaatagatttttttaaaaaaagtttggaccacttgtttataataatacctatgagtttttgacctaatagtgtatagttgtcttgtgcaatggttacccatttgatacggagacaaacgaaaaacaccaagagagaatccccatttgactgcacaactatttgtcccatcttactcatatattttactccaacaaagaaaacagaagccagtgccttagaaaatttcaattagggtaatattatgtatattatattacaattttttattttttttgaaaaaaactttgatagtaatggacacagtgaatatggtggtgggggcaaaataaaaagggagatttacatttaaagcgcaaaaacacaacaatcaaagattactctaaacggaaagttagaaaaattagggagtgatgatggtgaaaactgaaaagataaagccacgagctgtgggggaagtttttgggctaaattgggttacttttcttgtgcagaaacaccaattaaataaataaatataaaatcgaaagaaatataacggtcccatttgatgtggcagtgatcaattaagggttacagctttttgagttaacacaataaattaaaggctattttcttggtgcctatcattttcaaacctttaattcatacttataaccactttgtacttactccttttttattatatttttcttgagctagctagggagtgcttctatagtcaataacaaaattaaactcacataaatgtaatatatataattttaaaattgttttgggctgtaaggttaagaattgaattcctggagagtacatgcatgcatgtccatgataagagaatagtatatatcttatgtttttcctggagagagagatcccactaattaattaaattttaacgcaaagggatattaataatcagttacaactatcactccaattggtgaaataacacctttaattacattaattgatttagtgttagttcacaactaacttttaccttttttattactgatagttgagataattgtaatttatatatagataaattattatgtatatatattttccattttatgattactggcaaagcaaaacacactttttttttaatatatattactttgtttgttcaaaagaaaaaaaaaaaaatctttctactgttgatttacgccagtacaaaataaacacaccaaaaaaaatgaattttaattaattttaatcagaaaacatcggcaaaagtctcatcaatcttaataatattcacacatgcatgtatatttttaagtccaaacatgataaatctaaataatctccaacataagtttcactataagaaggtaaacttctaagttatatatatgataatgtcatgagatcagtgaattatttggaaactcttatgatttatcatgatatttttttccttcttatgtatattgggttttcattcaaacactttactaattaatatataaatagtatatatatattttttctcaaagttttctatttttatttgttatcaaccactctcccattaattatgacaagctatatgtatatataagtaaaaatgacaaatatatatttgtataaatagtaacatgtctacaatcacactatcagcatgatgaaaaattgaaaatgggcctgcaaggaaaaataaactaaatgtgccaatatgtactgtatcatatatatatatatagtttctaaaaattaatttttgaggcatttggaaataataataattgcaatagaaaagatacatataaattaatatacataccatgttccaaggaagataggggaccataaatgatggtgacaatttagcaaacaaagagtaaaacgtattagtttaatgtacgtacaaaaaagtaaagcatagcggcagcccagtttagaatttgtaaaatatatacatgtggtcctaaacataaataaattcatagaatttgtccaataaacgagtgccacgttgaatcatgaattgcatctatatgtacatacccattttggtcacacaacttttgagtttcaagatttagtgctctcccatttgcaactaaaaatattaatgatgtgcatatatgatcgatatatactttgaataatttaatttatttgtacttgtttggaccctaaaactttaatttatatggtcttggccgtaatcctttttttaaaagaaaaacaagtagaggagattccacgacacatatgtatttatttatataaatatatatgatctctgagtaatgttacatatcatacacttactgtggatcagaaaaattaaataattctttagaggctaataactacattaattaaaaaagaatttgtcagggagtatttttattgttaaatttgtgatacattgacatattttaacatatttgtaaaaaaaatgtttatgtgatgatgtgctaaaaaatatgttaaatttgttgcacgctacaaattgtatcaaattagattgcgtaaataatttaagtcaaagtttaaatctcaccactaacttatttaactttttctcgtatctttcctttttttttttagaaaaaaaaaaaaaaattaggcccctcactatatataccatagtattctctaacattaataaataggtgatgatgatcataatgaaaagacagtaacgatttcgtttattcggtagagaagtacatatacatacaccaatattatatttatttatatataatacatcaagaaccgacatatgaacagagcgatgtgattgataccaaattggtgaacagctaacaggagaagagacatgtcatattaatatatatttcacacactctcttcatgcatttgaagtagtaaaatatattactatggaaaatttgataatttatctctgatttactttctatatttcattgtggtatgattaaagtatctacaatacttgtaatattattaatttggcatcaaatttattaatattggtgtaacatcaaatataatattacaataataaagcattgctattattaagtattagggtgtagcactaatttaaattttgaggtgacatattgtaaatagttagtgttatctcataattcattaaattaaattatgtaacaagactttatatttaattgcagtatgacatattaggtcattagcctaatattgtctaatattttacttacagatcttatatttatgtatactattaataaataagttacaattatagtttttagaattatttaaaaccaaaaaattatgtaccaataattagtgtaaatttataatccaacattctaagttatgtgcactaatttagtatgatttattgtatgtttaaagtataatagtgtgaagattatacaaatgggcatcttgcaattattatatgtaaacgtattatatatatatatatatatatatcaaaaagttgttttacaagttaccactagcaagccttttcacttaattttattgtttttctttatttaatttttctactattgcttattcaagcattaatctacagggtatatgaaattaaatttctcttaattaataatttattaaataaaaatttaatttaatcccttaaaaagcataaaaccttttctaccttttatcaacccgaccttctttaactttatatatagtctcttttggagtaaatagatactttatatttttcttatatttaatcatattattcatccaaaaatattattatgatgattcaagtagagtataataatcgtaattaataatttaatacttagattaattaatagcattaattaaattatggtttgcttaatatatcaattattacccaattaagtaatcttgtttaagcatatatatatatttttaaattttccttatattttcattaaaatttaaaaaagtcgatttaaattttacttgaaaaataacatgatgtacgtatgtgatttttaattttttttaaattgaaacgtttgataaatatatttttaaactatacaagttaggattcgattccaaatctatacatgcaccctaatattaagtggtgatgatcacttgagttaatcttaagtaattatatcatctttagcaagctagaaaggtttaaatttaagtaacaattgtgataaggtttaaatttaacaaacaattgtgatttatcatatataatcttacattacaccaaattaattagttagtggattttctagagaatctctctatataattaataaaaagaaaatatatttatgttatgagcagtcatttcgaacctccgaaaagaaaagtgactgaggatcaattgcattatatgatcccaattccatgcatttgtcattcaaatgaaagcaagcttcactcgatcatttttgctttatatataaaagtacttggaaattaaattaatcttagtgccatattacagtttcgttgacaaaatatatatagaaggccacacgttcccataatatacaaaattgtctatatataaatataatttatatatagtacgctaacatataaacatatcccaccccgacatgtgggaggccattctcattatttcattacattactgccccttgatgagacctctcctcccatactctatcatcatatataataatgctatatataattatataatatatcctcagactactacaactaccttttaagatcgaataaatatattccgacatgctcatcgaagtataaatatttacatatgtacactcatagtcacacaactatatatataagattttttttaaggtggggaataatttactttaatctctatgttaagaaattatttttaaggatttttctatttttatacttcaaaatatatatattttttttatacttttacgaaattttacacaaaattttttatagtaatttacgaggcaatttaaatcgtaaccaaaattcacattgcaatccacataaaaattaccggagcaactaaaaccataaactaaaaaaaaaaattaaaaaataatatatgaaataattctctttatttttatatattttattagatagatgtagaataattttatagtattgaacttattgaattatttttattttttcacatttaaatttctctacttggctttttaggatcaatcaatgatttgttaaaaaatctgcttctaatatagaatgatttctcaagtaatctgatttgtagctatatatatagcttcaaggttgttattgattggccaatcattttaaaaaaaaattgatattgaagctatggtaacttttgtgataattttttattattgacgatcactataaaaaaatttatttttagtcacaacaaaacttgtgattaaaattgaaaaagttgtgactaataattataaattatcatttttatgttgtgatt

SEQ ID NO: 18203 - DNA, 6154 bp, Cannabis sativa
ctatgtttgtcaatttgtctatttattgtcagattgtctttttctctgtttgtcattttattcggttatccatttgttgtcagtttatcattttctatgtttgtatgtttgtaggaaatttttaggaagttttctattttgtatcttaccctatgtaaatggctatatatagagctatcattttcattgtaagaggcatcaaagaagcatttgactaataaaatttctagtatctttctctcaaaatgttcttctaaattttctttaagagatttctgaagtagtaatagtgtgcattataggtcataccgaagatattactgttatgagttaagtatcacttaagtgtaaaggtaactaaacaatctatctttcataatagtaagttacaatacagagtcataagtcatgtaaattcttgtgagaatattactgtagttatctttatctttgataatgattaatttatagcagaaactcttaggtgtatattataattatttaaaataaaatttaacatgttgcttgtttaatataattataattttaagaggggcatcgtagaaattccaattacctttttgctcaaaaacgatatttttttttgtaaggttctgaaaccaaatttaaaaccactaacattttaatcaagaataataggaagagaaggaatatcctaaatataaaattaaaaaaaaataaaaattagaaactgaattgctcagctgttatctttctcacttgaccctgaaaaattattaataaaatactgtatatagccgtaaatccctaatttgtggaaccctaaaagcctaaaagactagtcaaaaccaaaatccaatttttatccttcaactcttcaattcttgttttcaactctgcaattcctaatcctttgttggtacacaaattctcgtcccctttgttagcttttcattcatggtggaaagcctaacttgtttctctctaacaccaaaaccataaacccccaataagaaaactccaaattttcacatatattcgtcaaatccctaaataggaggattttcattctccgtatctgtctatggctacagacgcttcgcccaagttccaaaacccagacttccggacagtccctcagccaccagactttcacccggaaattgtggtcagggcccatgacggtcttcacttctggcagttcatgattgcaggctccatcgctggctctgtcgagcacatggctatgttcccagtcgacacggtcaagacccatatgcaggctctcgggtcctgcccgattaagtcagtcggagtcagacaggcccttaaatccatcttgaagaccgagggtccaattggcctttaccgcggcattggggcaatgggtctcggtgccgggccagcccacgccgtgtatttttcggtttatgagatttgtaaggagttcttctccggtgggaatccaaataactcacttgcacacgcaacctcaggggtgttcgccaccgtagctagcgacgcagtttttaccccaatggacatggtgaagcagagattgcagttgagtaacagtccgtacaagggggtttgggattgtatgaagagggtgttgagggaagatgggtttagagcattctacgcttcgtacaggactacggtgcttatgaatgcgccatttacagccgtgcactttgcgacttatgaggctgcaaagaaaggtttgatggagatttcgccagagagtgtcagcgacgagcgtttggttgttcatgccactgctggggctgtcgccggggctttggcttctgctgttactacacctctcgatgtggtcaaaactcagttgcagtgtcaggtagatccaactataaatatatttatgtttggtttgaagactttgaagactcaaacttgtgatataattctgatgccgctggcttataagtatttgaaacttaattctacagaaaaagcttggaaatatagttcaaattgttagtaattctttatgtgattaaagtagagtactttaaacataaggcttctcctttagctagtaatggggcaaaaaagttcactttacaagtgttaaatttgatgatagaactgattgactgactctgttatgtattgtttgtgagtacaatttttgtgtagatcttcttgaaccgttgctttcatttatatgatatacagaattattgctagggtgaagatttattgaaagaagatgaagccttattattgtcattctggcttttaagaaatatatcttagaatgctggatcattttcagctaatgatgatcaaccaaatcataagaaataatgaactatcattgtaacattaaatgtttaatgtatcctaaatagtctaaagtggggagattctcctagagaattcttatatgactttttaaccttgttagcaacttgtaaaagcttttaatctcgcgtctgaaatattaatgttcatttacgttcatttgttgttcagggtatatgcggatgcgatagattcaaaagtggctcaattggagatgttgtcaaaacaatattgaaaaaagatggttatagagggttgttaaggggatggtgtcctaggattcttttccatgctcctgctgctgcaatatgctggtctacttatgaagcctcaaaaaacttcttttatgaattaaacgatggctccagcagcggcaatgtaacttgaattatttaacctatgaagacgaaggacattcttgcatttcattgcagatatcataattgagagatacatgtaccgtctcatgggcgtggaggaagcagaggataatcaattttttcaaagattttcttacataatcgctgtctaatttaatcggcggtgctagtcaaattagatcttgaggcttaaattttgtttgtaccgtagacattttgttatccttttttgccttactgtatgctcaaataagcaccaacgaggtttcatttactggcctattacaaattacaacacccccttctctttttgtcatttttgatgatttgttactattattattattgttggcagtaaattaaaattgatacacaatgtatcatattatagttcttatctgcatttgcacagtttcgtttcttttcatagccatgaatgtaatatgccccagtataaacagtagttctgttatcgtttcccagcttaaaaatgaatcatataaaatccacttaaggatgcgaaatatgaatacttaaggcaaagtacttttgttgtgactacttgagtttatagaaacacaatttacctatgataaacatgtattaattggtacaacgctagagacagtatggaaaaggatggtcaaataggtgatgtatattgtaatttctttacagaatctttaggagtttatatagggcagtttgaaaaagaattcattgttgagctttttggcgtactgatcctgtagattaacaacttttgaggtttatcaagtactcgtgttattagtcacttgtttccatataccatttttcaacttttgaagtttcaagagctcacgacttgcccaacaatcacagtaatgtcatcaagctttccacctgtacaaaaagaaaatttcaggtcagtcataggccatggcatccacaaacactgtttcattacaatgatagacatcacaaatccatacctgtaagtttcctcccaagaattttcttccaccagggaatatcaaatccctgaaaattaacaacaaccatattgcaaaagccatatttttgattccaaatcaaaagtagatatgttttgccaaaacaaattaacaacgaccatatatttagtaattttaccctggatctggcctccaatgcgtatggagaatcaaagtcagagtcctttgcatgaatgcttgccagattagctaatgcctttgctagcattaaaatcgtgtatcggttaagattgtgaatgagttgcttaatctaaatcttccaccatatgaagttaacacaggaaaaacataccagcctcgacgacatctttgaattgggccaatgttgaaatcatttcatgatcaaagacattatcgaaaagtccatcggaacccattactatcgtgtctccttctattaactccatgctactaacctgttgttgagaagagttataaacttccaaatataaatcaaaactcaaaaagacaattatggttttctccaaaattttcacataggaatcgtttatatgcacatctcatccaagcattactagcaatcaaacttcttagtacatgttgaacgcagaccagaatggtcatcttggttgtgagccatatattgaccttattattacagcttagttctatcacatcttcaaattacaagcactaaaagggtgcctcatcataccttggcgtcaaggtatgtttgactaatgacctctgagctcagttgatagggacagtcaaaataatgttcttgtggaatggaagaaaaaactactcgacctgaagaatagaagaaaaaatatgcaggatgaaaggagaagaaaacactaagggaacaatggaaagctaagaatttgaacaatgacaattgaagggtgtgtacctgcacggataacccttagcccacaatccccaacattggcaatcttcaaaattccattcctctccaatatggcgacaatgctgctcagataagtggaaagctgaatcaattaggcgaactaggacggaagcagaaatctcagaaaatgaaaatgcatattgaaggttacttacactgttgcagaacctatagaggaggtagcagcatgtgctttcctaatgagaatttgtggatcactgttaacctgtaaagacaggtaaaatacttgggtttgtcaggcaacatcaatgtatgcagtaaacaaatactatgtccatcttaaccattgctctgtgagtaataatatataaaagactattagctaatcagatatggttggattaaaacacagtttgaagaacatctcgtaggctatcaattatttgaaaatactacctcttcatcctccactaaatcggaaaaattagtcattagttcctgcgggaacattgatggatctacattctgttctgcccaactggaaaaagaaatgaataaatacatattaaaacttcaagagtcataattctagctcattaatgcatgataacttaacttcaactccttaaacaaattctacatgtttatgctttctattccagaaagcttagctatagatatagtcatacataaacacttagccttgtccaattccatacccagaaacaccatcagcaacagcaagagctcctcctttgtagctactcacaaagaaagcatcttccccacctcggtcaacctatttagattaacaacaattgaacacattatcatgtaaaagcaacataaacatggaaaataagaaatcacatacgttttcagagtaataccttgctggggtgtggaataaggtgtacaccaacacaaaatgacaaagtaggcctacaacaacggcaaaatggataaacaaacaagtttaataataccttcattatacaagaagaattttttattagaaaaatatttttacttataccaaaatgcagaactattcatgatcattctaaccgaaaatgccacaacaaatacaacgaacctaaactactaaactggatactttaaaagcaactaaattatgattttgagcaaaacccagatatccacaagctctatctgttatactttgagcaattattgaaacaaaaaatccgtagtaatagttgaccatttggttgctcactcaccggactggattatgttccgaaggagcgcaaaagagcaaacttctgttctttgaagtttcatgtaaggtggggagagaaggaccaagggaatggatagtgatagctggacgagagtgaggtacagaagctctgaatatgggaactgccatattcccgcttcaactcctcctaaccttaaccagcctattggttcgtacaaatatttgcagaggaagagtgtgtggccacaagtttcagatttcttggagttttattttaggctttttcagtctcaatatccgaggctacccaacccaagtgatttttcttcttaaaaaattatataaatggttatttaaaaaaaaaaaa

SEQ ID NO: 18204 - DNA, 4605 bp, Cannabis sativa
  modified_base (102)..(117): a, c, t, g, unknown or other
acaagaaaaaaaatttaattatttttttatcaatttttttatccattttaaattttattccatttcattcctattctcattcccattctcattcctattccnnnnnnnnnnnnnnnnccaaccaaacgcctcctaagtactaagtccaaccccaaaatccaatccaatagtaacataagatagctagataaattagcatttcatttcacaaaaaggctacaaagacaaaccatcctcccgactctcactcatacactcattacattctaatggaaaaggtcacaacaagataaataaagctctactctactctacctaaaacccttcaaaagcatattacaaactcaatttctcacctagactctagagtatagtaataattaactatactataactcattacacacatataacacatcacttcccttttttcacaataaagggaattaataattaatcacttttaatgatacttgccatctttggtcatcattctcccagtggcaccacaagcaagagcctcactaggtatgcccctaacaaaacgaccttcaatatcaaaaatcactcccatacccatatgcaaatgaggctcaatatggcaatggaaagcccaaactccacgattgtccgccacaaatcgaagggcagtccatccgtaagggaaaatcacagccgtgtttcttaaaggcgggttctttaggttaagctttttctcatcattcttcgaaaacttaccttctccgtaacccaaaacccaaaagtcatggccgtgcaagtgccacgggtgaatttcgctaacattggcttttatagcattcgtgttttggagtataacatccactgttgatttgaacttgagcctgtagaccccactgctagttgttgtgttggtgttgacaggtggcttcatgatgtcataattggccgggtagctttctggtgggctcctctgatcaaatgtatggttcagtaaaaatttgactgagcccaaatatggggtggctggtagtactaaagagacattatttatggcccacttcgtgtgaccgttgatcatgttttgtgtgttgaggaggatcatcctacggttgtaaaatcttggaggttttggggatcccattcgggccaacacgctttttgaaaaggttttactgtggttataatcatcccatcttggtgttactggtggtggtgaaacggggagttttgatgctgaatttgggaggtaatttaagagggttagaccttgtggggtctttggttctctccctctaactccaactgagacccagtaattgtttttagggttttgatttgtggttattaggactgagtaactttcccctgaataaatgtccaaatcatccactaagaatggttgcacatagtttccatctgcttccactaccaacattttgtgattctgaaaaagtatatataaagaaaatgaaataattatttcgtatatatactataaataataagacatcactagctacaatattgccaagccatttcaattttcatagcattattattaattagctctatatttacgtggatatcactactatataaagttcattttttaatatacatgaggtgcataactatataaggaagaataataatcaatacctacctcacacaaaagtcatgggtatatacataaggaaacatgtcctcttataattgttagactaataaattcaataattatattttgtttttatatatattaattcaaaatataatcgataagacaactcactaaaagttgatgagcatgtgaaacgaaccaaatgaatagtactagagcgtgcagtacgtgcttggaagaatgcatagtgtatggaccccatgaagtactatgaaactttaatgaaagcagaaaaaaaaaaaaaaaggcataaacttatcccattattattgtttttttctaaaataaagaatatctcattaataatgcactgtaattttgtaagtattccctagtctctttcaaatgacaattacgtatattaatattttcaaaaaatttcctcatttatcttgacctatgtttcctctcttataataatgtggttaaagtactattattatatatatttcttaagctaaatacaatgaaaacaactttataacatctaaatcatgatcatagttaaacttatacattatatagtattaaaaaagaaataagaaagttgttaataataaaatacgtagagcgtgagggaaggtaattagttttaatctttctataaatcttgagcgaaaatttaaataaatatatgatataagaaatgaaaaataaaatgtttgcattacatttttgcttgaagacaaagtgtttgtcctcaaataactttgtcaaccttatagaccttttctaacgtaagaactggaaaacataatgcaaaacaaaaaagtttggtctgacatagccaacctaatgtttccagatctgatttcgagaaaaaatcaaaaatatatacaagacaagatattgttatatatcctcatattttacaaaatatatatatacaatatttatttataaaatatatatgtgtggtgtacgtgtgaaaaaatcacataggaatcagactgattcgcctcatgacactagtgatgagatatatatatatatataatagcgacttgatgatataacattgatattataatattattccagcaataatggaagcattatatatattttttcaaatcgaaaatgagaaaatatagtaataagtaagaaattaattaccccaattgccaagttgagggaagctagtgcagtggtactagcgattcttagcctgtatgtctgttttggttgcacgttcataatcatgggtgcgcacttttctccaccccttaacttgcactgcttagaggaggagttgctatattgcgctgccaatgagcagttatattgtcctctaccattcagtaacaagctctgtaaaagtgaaccaaacatatccaaataagattgaatcgtcttttaataaattatggaaaaaagaaaaagaaaaaacgactgtatatgaaagaatcatatctaaatctcttcaattttcacattcacgtgacaagttgaaatgtcatataatttttatttttatttttttaacttttttaccggtaaaatgttgaatatttaactaaataatattatatatatatatattgatcgtccaaatttaaaatatttgttagagaatagagatgtggcttctatttttcttttttgctttcaaatagaataattatgtatgcaagtgttttatttattttttattttttgtgatgatcatgggttgagatggtcaaaaagatatatggttgatggttccaacccttacctaacaaatcttattagtttacgacttaaaattaaaatgaagaaactcactatattagcttcttcacactctttaacaattaaatataaattggaattttctttgtcggaataataaattggaaattaattatattatgcaaagagaaaaataaaactttttaattatttttatttttagaccaatcattcagcaatacatgaaattattgatcattctgataaaagcttgcacgatcttagccatttatttaataatgaaattatagctggttatatatcttgctttaatcaataaataatttttttttggaaagatatatatcaataatatattatatgtattatgtatacgaatttatatatttaccattaatactgtacatgtattattgtttattttttattgaaagtcaaattttcattgaaagaaagcagagggcagcagagtacagaaaccattcctttgaatgatcagtctttttctcttctcttttatttttttttttgtaattatttttcctattgcgtaggtacaattattccctttcaatttattttgtttttttttttcacataaaaaaatatacattttttttttctttttaccgaataatggtcactagctagtcactaattgaaattgaaccactacatatacagatcaccgaatgtagcatcttttaagtaccactcgtataatgtctttcctttttatcttcaactaaatcttaaaaataattctttcacacttttaatattccttatatgtacattattttgtaaaaaaagaaattaatataatatatatagtattgaccacacttctagttactaaacaatattaaatattgtaggggatggaccacagtaaatgactatacattccctatttgtatagttagctttttgatttatcgtataaatttgcagatctcaaataatatatataaaatgattaagtaatatagtcaattctagaaaaacgagcataacagcgggttatactgattagatctgtaataattgaatatgttaaaattacctgtggttcaccgatccaacgcattggcgccgaagagagaccaacctcttgctcgtgaacactttggtgccaccaatcgctgagtaaaaggttgagctcgccatcgtagtggaagggctccctctctccttctgccacgtcaacaattaatgacccgtatagccctgctgatctttgcatt

SEQ ID NO: 18205 - DNA, 6345 bp, Cannabis sativa
taaaaaataaatattttttaaaataaatatattattaaaatattattataatatgtataaagttttaattgtatacaagcagtcctatagtaagagtatatatattttacatcataataactacaagatctaaaatcaacgctaaaaaaaaaaagttctctaccagtagggaacttttgctaggtcctaccatagtattacccgatatatatcaagtttgttaacatatttccatttgaaagcttctgtacaatttcagaaaccacaatacgaaaaggtattcttctcaagatcaccaagctcagcctgctgaatttccaaaatatgctttgttgtgtagtttttctgttaattgtatacttaataaaaagtgactgttgttcaaaaaaataaaaagttactttgactctatatattactaaaataaaaaaaaaaaaaaaaaaaattgaatcataattatataacattgacatttatttttttattttttgtaactttgacatttaagaagcttggcagaaaatataataataataaaaataatattaataaaatgatcaattggcacataacatgataaaataacaataagtgaatagtcagctcattctttaagacttcatgaacaagaatcatgtgaagattacttgcactaaaaaaagtactcaaattacttcaaagcatttgacttacacctcttcactattacaattttcgctgtatcagggattctttacaaagaaagaagaatttcgtatttgaataatattgactcggtacttactatttaattcaagtattgttgacttctaagaaaaaacttagaaaaaactaccatggcatgtaatttgacagagtataataatttgcaaaacccagaaatagtggatcaaaaactttgttcttagcctattattaacaaacaacaatcacatgtttaacaacttgtaatgttacaagtcttcgaagttcgaaccatataaaatataatgtcattcagttttcattgtgcagaaagtcctaaccattacatttcagttacataaagcagtctacagaggaataacaaaattttttttggcgggcctgaaaaatgatggtatgattaaactaacttcattttttaaaaaactatatatattaaatttcttcattcagtttgatgctcatcttcttctgtctatcatattcaaaaataatttggagtcaaagattcctcaaatgtatttatcaatgaatgtttgcagcaaaaagtaatcattgaggtgaagatgaaatgcaagaaatgtcggtccaaggccttggcgatagcagttgggaagaaaggtccctatcatctcttgagaaacatatttaatttaaaagaaattcaaattagattcatccattcttatcaatggagagaaagaaagacatgattggcctgtttttgttcttatctttgtgtttctttgtattgtttttaggtgttacctcagtagctttcaagggggaaagcaaaaatcaaatagaagtaattggagagggaattgttgatgcagctggcttggcagaaatgttgaggaaaaaggttggctatgcaaacttagtgagtgtggaagaagtcagagaaaggtgaatgtttgaacaaaagaaaaaataaagtagaggtgacacctcttgagtcttgagcctgcaaagtgtacaatgctgaaaattattctctccccaaagtagcttgagtttaatcttttttcttatccatatgtgcctttgtactgtgtacatttaaaattgtgaaatgtttatttgttaagagagctatcgtcaagaaaatgcatttggtgggcaagtaagactttcaaatttcaattaaaataaaattaaaaaagttaaagaaaaaaatggggaatgagaaaactttttgatctattagtatactacaaatatggtgcagttattatactttattggaaacaataattagttcctttcaacaaaataaaaaataaaagaaacaattattagtttaacattcatattgccacccccagaaaaactaataacttttaagcaaaagggaaaaagtcaaaagaacaagtcagtggtgggaatgcaatatgttcattgtttaaagttaaaatgtttttcaagtaagaaaacagtgttcctttattgtgaacagtaaattaagctgcttaattagttttggtatgttcacagccatctccttgcacatttacaaatatttctaacatattgggtgatggaaacattgctgtactgaaaacagagtttttcaggctctcgaaataagaatgtacaaaagcaagtagatttgtacactattttacaactcgtttctccacattgtgcttcacaatcttggggtcaagtattaataaggaatgtttttgtgtttggctgccttgagatagttgcaaattcaggttttactaataactattagcaataactgtgccacatacctatatcatgtaaagggggctatccgtataggtgggcctcctagctagtatggccttcaaagttttgatacttgaaaataaataaataaataaataaaattaaaatcaaaatcaaaatcgggtgtggtgtggtgtaggtcaaacaagaacttccaagatagtaattaaaaatcaatatctttgttttccctccattgtcatttctgtccaacaacttaatgacaaaacaaaaagttgaaacgaagaaaagaatgaatgaaagaaagaaagaatatgaggttgagtttttctctctatatataaatggactttttggttgccatataagaaatggtaaataattctcatttctcttctgtctatgaaaaaccacaaccagaaaacattttcaatgaaatcccacttatgctttttatcaacatccactaaaaatggaagagaagagagaatatctaaaggtaaaaataataacaagatatatcccaccaaaaatcctcaacaaaagaggcaacatcttctccaaagccaaagcaactctttaaagacaaaacgacagaacatcacctatctatttattcctcttaaaaagctttccaaaagctaagttccacaccttcatttggactctcttccacaccattttccttcaactgagtcttttggcctctcccctgacatcccaccaaacccaactcccttatattagtcacaaaactctgccttcttggactttgtaccccagctgcggattctctattttcatttcatagtttgcatcatcagaatctatttgtagtcatttattattataattatttttattctaaaatgatttcttttcaaattatccacttcctatatatagcaatgcaatctaaatgtcctccttagaaatcaatcaaacttttttatacactagtcagtcctattatacattgaccaagtttcttagtactctcctttttaccattcttcaaatggccacaaagaattgtagtgatggcacttctcatcattcctccattgcgttgctacaagagaggtttaggcaattgcagagagcaaaggagatgagggaagagaaagagcttctaagattgttgtccgaatcggagagaagtaatccgactacaacgaaacgttacgaggcagcagcagcagcagcagcagggttttctttccattctgagtctcttcttcctcatagtcatagtcatagaccaccttctcatcatcaaagctctatctaccaccttcaaccaaacttgcaaagcaagcatggtggtaatcttcaaaccagtactgatcacaccacttcaatcattggaaacattacctccacaagtgcagccatcaacaataatagatcgtataatttggatggttcagatgtagacacctctcttcacctgtgaaattaaaaaaactatatatcaattttattaagatgtggtttgtgggcttgtatatttattctgtattagttatatatgtcattttgtttttaaaatgtattatctttcagggagagatatgagtaatgcagctaatatatattattataagtatatgtacttgtacttggagcatcatattgatactctaatgttcaccatagttcatatattctcacggactatgtgaaccactcaataaaatatatttgctacttttctaaaaaaaaagtaaaaattaattagaaaaatctattattttgagccaaaccattacaataaaagtaattagagatggttgagttttgtagaagcttcaaaaatattttaataatatgattagctagcattgtctagaatattatagttggtttctttttagtagtataaataggaaccttgggtactcaagttatatatccaataacagtatttcaaagcgtgcccaaaagagtttgagtgtaaacaaagtgtctaattgagttatatacaagtgtattgtaaaagggtctagtagttaataaaagtgtgagggcttggtgtgtttgttaagataaagtgtttagggcttggcgtaattactttttcaataataaagtaattacgttttttccgtgttgtgttatcctacaagtagtattagagttgagtcggtttataccaagagtcatttgttaagtatcttagagtggtcgtgtgcggcttagtactacagtgcttgcatgaaggatgaccttcaagtggtcggtagaattatgaaacttaacaatcaaaattacaacacgtggtcgatgcacatggaggcatatctccaaggtaaagagttgtgggagatcgttggtggcaatgaagtcacacaactactttgaaaaaatggaagattaaagcgagcaaagtcatgttcgcgattcaaactacaattgaagatgaaatattcgagcacattacgtcgacgaagacattgaatgaagcgtggaatactttggcatcattgttgtgatggattttctagttcacaagtatacacatcgtttacatgtaatatactcacaagagtgaggtcacgtttggcatcattgttgttatggattttctaatttacaagtatacgtatcgtatacatgtaatagactcacaagagtgaggtcgtgtagttatttatcaaacagtgtaatttttaattctatttggtgataaaaataagaaaaaatgtttaaaatttattgacaaacaaaacaaataaattaaagtacaatttaacaatgattaaagattacggtgattaattttaattgaatctaatttatatggtttactataattcaattcctaaaatttaaatttggggatttactaaaaaaaaacttatattctggctaggacatatatatatatatatctcaacttatatgtaaattttccactctcgtgataaatttaacaaataggaggcattaagcatgaaaatcttaaatgctacataaactatataggtttttctcatgctatatcaaaatctgtgtctatttcacattacataatcaatactcacttcttagattccgtattgatatcagaaacagtaaattgatggacatgtaattaaaaaaaaattaagaacgaatgaaatatatacacaaagaaaattagagaagaattcaatcacattaaacaaaaataaagtatcaaacaatctctattaaaaaccctaattcaaagtctagctactcctattcattgtaaataactaccaacaattgattaagaacataataaaacaaaggaaaagaaagaattcttcaaaaaataattgatgaaagtctccaaaaccgtttctttattccaattttcgtccttaataattgttactttgaaaagtgtaaaagtggttatttatataatttttcaatagagtttcaaccctaaaacttgtcaattaaagcagatgggccacgatattggatatacatgtcgcagcccgtatctttttacaagcctaagaaaattctagaaatattaggcgggtggcgacatgctcttgcagtgctgcagcccttgaagcttctttttcaacaaaggccaaccaaggattccatgtctctaacagtcatgacaccctttatggtcgacggtcatcccaacggtcatcattttacatattcttaattaatttagtccctgtattttttagccacgtgttgctaatcttgacacgtcatcgtcgttaaattttaaataaacatataccactattatacataacaaactaaaaaataaatatcatcaaagaataataatatactatacaacaaaataaaaatatattgtacaacaaaatctatataccaacaacccgcaataactcataaaaaaatttaaaaaaaatcgacaataacttcaaataaaaaaaaatttaacaaaac

SEQ ID NO: 18206 - DNA, 14461 bp, Cannabis sativa
  modified_base (5071)..(5076): a, c, t, g, unknown or other
aaaaaaattatttaataaatcaatcaaaaaataaattagtctctttactctctctcccacctcttctctctcgtttcttccattgaagcacttgtatgcttagcctcaatttttaaatatatcatccacatgtaaattattgtctgaatttctgatcggagctcccacaattttcccatccactgaccataaaatggcttgctagggatatactaggctaaagaaccatagatcagatgatgagggcttaagtaaaaagttgaaccttcactaacttctcttgcgtctatgaatataatcaaactaaattcaagtcaacctacatgtacagatttgctccaacaaaagtttattgtgtttcttttgtttcttacaaatatatatacccagctccactccactccactccactccactcctagtcttgagtttggggtgttatggctaaaagctcttagtttgattactctatttctgcttcgaattaatctaattcttaacctctaatctgtaacaccttttaacccattttcctcttccaatcattttcttacctaaaaaactcaatgacttgcagcgcaatagtattgcctacaaatgcgcttgttggatcagattaagtcccacaaaagtatcagggaaagaatgatgtcctcgaccctgtcttggccacaataaatttctccgcctttgaaccttgagatatacctcgtctgtgtgctagttcttcatttttaatgttgtttctttatctttacgtcaatacatatttatttttatgtgattttagtttctaggtttgttgggatttcaggtaaatcgatgatcgagtccaatgttcaagcgtagaagaaagagtaaccatgaagttgatacaatgggaaaggaaccataggtcataaaaacctgccaatcaattttttttctaaaaaaaatcagcctttgtcaatggagagaagacttttatagttccaagaattggctttaatataatgtaaacaataacataatagttaaaatataccttccaaagtcatcttcatcaacggtctaaaaacgtccttattctatacgtgcaaaacaatagtacatactatagaaattttctataaaaatatatacacacaaacatatattcacatatataaacatacaacatgactcaacttgatttacagatcaaacagctaaaaaggaaattgaatgatttgcaagctgtgagagtgggtactcgagattggagccatgaacagacccttcaaagctctcttaatgagtgcttaaggcataaatctatctattagaaataatggtctagagtttcgtgagttaaagagggggataaatgctttaaattcttttttgtatctaccaccattaggaaaagaagaaacgctattgaaagcattcttgatcaacatggtacttggatcaattcaagagaacttattggaagggggttttctaattttttgagtgatatcttttgtggaaatggtaatgctcctagtgttgatctttcaagtttgattcataatcagttaagtagggaggagcaggaggccaagttaatattactatattgggagtaaattaaaaaacacactatttagaattagtagcctaaaagtgccaggcctggatgaaatatatgttttgttcttcaaagactattgggatagtgtgggtgaggaattttatcaaggagttagtaattttttgtcttggggataatgcgtagaggttttaattctttcagtgttatgttgatcccgaaagtgcagaatcctcataaggtatctcaattcagacctatgttcttatgcaatgtgatatataaagtcatattcaagattattgccaacagaattacgccaatcctccctcttattatccaccttatacctagtcagcttttgcttcaggaaggagcatacaggatgatgtgcttcttcaagaagtcatccattcttttaaagagaaaaaagaaagggaaggtgtcttcgctataaagattgatctggtaaaggcttatgacaaaataagttgggaattcatgaatttggtcttgaaaacctttcaagtccgttataaatttttccaacttatctctaagtgcttgaccacgacctctttaaatgtgtgtctgaatggtgcacctattaataagatcaaaccaggatgtggcttaagataaggggatccactcttcccttacatatttatttgggttgcaaaagttttgtcaagattattgaatactgcctgtacagaaaggaaaattaggggtatcactcttagtagaggtggccctgaaatgtctcatctcttttttatggatgacattcactaaaagaaatatgaattttgtcgatgcatttagataaatgtgttagcaaaagtcgttggcctaaagtggctcaaccaaggccaacaattatcagcaaatgcttttgctggcgcactattgtaccggtaaaagttagctataccaacacaattcatgaattttaccagcaaaagtgttggaataaattgtgttatggcacaaaccatttccaatggttcatgaacttttttctggcacaattatgtaccagcaaatggtctaaaataatttggggagaattttaccaagtaagaaaatgtgtgaaagtatatctgggcaatagcaaataaggaagatagcttgtggctaagatggatacactttgtatacatcaaggaaggtgactggtggagctacaaggccccagatcaaggcagtttgtactggagaagtcttgtatctctaaaaggccagttcatagacttaatggcagggcagaaaccaatgttgtaggcatataatgtatccaagggatactctctactctgttcaaattaaagcaaagtgttctggtgtcagcatgtagaggggaggttgaacactccaaaatacagctttgtcacctggttggcaatacagcagaagctcaagacaaaagatagaatgtgtcctctattcctagcataaagagacaaattctcatctattttttgaatgtcctgttgcagcatcatgtctacaggatgttaagacctggttacaatggtatgcagcagctattacattgccaagtctcacaaggtggattgtcaagtccaagctgtgtaaattcaaaaaacaggtgtatttaactgctctctcatgtctagtatatgctttatggagagctcgaaataccataatttgggaagatttaaagctcgtttgaggggttttcattagtgaactaaaacaggatgtcacataaagagttagtatatgttggcctaagaaagtcaaggcagctaacagtaggtggttttaaagtttataattaagcatttactttgtatgtaaggagtttgggtgggtattatatatacctgtatagattcactattattttattttatatgcccaaattgggtactatttgtttgtaaaaattatctttgagcaatacaaaatttccccgattcataaaaaaaaaaatgtgtcgaggaaaaacttttaccgacgcgtatttgcgtcggcaaaagtttatttgtttttttttttttttgagtttttaatgggggtgccggtgcagatatgtattagcaaaaattttcaagaaaaagtggaattttttttgcatgataatgtgtaggtggaaatacttttgccgacgcaaatgtaggccggtaaaagtcttctcaaaacgttgcattttaatttagggtaagttttatacctttttctggcacaatatagattttttctgatgcaacaaaatgcgttgataaaagactatatattagggtcaaagccctcccccttcgccattttcttcttcttcctcctcttcttttggctgtccaaaaatcaccaccgcaccaccaccaccaccaccattgcatccttctctatctctctaaatttctctcgctcaccaaatctctttctgttttagtcctatcatgtcatcaccatccaccaccgcataaggtatttttattttttattttttataatatgaatatttgtatttttatataaatgtagatataattttgtacatgtgtataaatatgtaaatatataaattaaactttaatttttatcattttttattttaagtctgtttatgtatgtgtatataggtatatgtgtaaatatgtatatatatgtgtaaaaatatttatatatgtatataaacatgtgtaaatgtatatatgtgtaaatgtatatgtgtatgtgtaaaaatgtgtatatatatatatataaatatgtgtaaatatatatgtgtgtgaatgtatatgtatatgtatattaatgattgcatgttaatgtttttaatttgattttattttttataaaattagactttgttttactgcctcgagtaactgctacttgttagaggctttgtgttgtttttgcatttcaacggttagtattttttttccacattaaagtttttttaatttatgttattatttaatacgtttatgcatgttgtagtgaaatttgaatatcttaaatattcattcgtagtgaagtaggttctgtgattaaatgtagtgcggtcgaatgaaatgtttgttcgcgttcttttgtaggttttaaaaattttgaaattataatttttagtcgttatgctgccaaaattttggtaaaaataatacaataaagaaatttaaattaaaattttataacataaaagtatttattttaaaaataattagttaaatttgaatccaacaaatagaaaaaaattatattatttattaaataataatgaaacattaagtattaataaattattaagttatttaattaaatttaatagttaataagataaactagtttaatcttaaatatatattatattattttgaattataaaatttaatataagtgattgatagtttaaatgtaataaaataaattattttattataaatattaagtgaaattaaattataaattaatgggtaaataccattttggaccttgtgttttgtaatagttaccaaatggaccatctgttttgttaaatgnnnnnntagaccctatatttttcaaaatagtaaaaataggaccctaatttcaattttcaaaaattttgttttttaatataaccaactttaaaaaaatttctaatacgatacagaaaatgtaaccagttttgtcataacatctctaaatcagattttataactttagaaaatccagggtccattttgtcatttaacaaaatagagggtccaataggtaacttttgcaaaacacagggtccgaatgatatttaccctaaattaattataatatgtaatatgtaatttaaattttaataaagtgatattataatttttaaaaaataagtaattttcaatttaaataataaatgaaataaaattaaaaattaatatcaatatgtaatatgtaatttaaagtcatttaaaatagcataagatattataaatgagcataagatattgtaaagtaggataagatattgtaaaacaacctaaaataaattttttatcttaacttgatctttttggttataaaacaaagataagataaaataattgtatttgtattattacatgcatagtgatattttacaaaatttacaactattttacaaaatatttagtaaataaagacatcgtctaccgactaccaaaatacaacctgctaccatgaagatcgaacactccaggttgcaacctcaaaggtcttttttcgtctccctgatcacgctaggagaggccttgttcattcctttagaacagcggaggagatcttctttgtgagtgtcaatgaagtgttgtagcactcacaggaagccctttcgtcatcgaggaggcaaccaaagtcagttgctattgaaaacttgacaaataggtggtagatggatgagatggttgaaggtcatgcagggttggccttccaatcatcacattgtacggagacttggtgtcgaccactatgaaagtttccataatttgtatttcggcttaggacagtgtcgaaaactagtggtaatttgatcttgcaacagggagcaattccatccccactaaaaccatacatgagttagttccacaattctaggtctttaaaagacaaatgcattctctttagagttttcttgaaaaggatgtttgatgacgcttcatcatcgatcatcactctagccaccatcatgttggctagttgaaccttaacaatgagaacatcattgtgagggtagcaaacgtggtccgagtcaaattcctcgaatgtgattggaccacacttgaagcatagagatttgagaggtctctccacaacctttaacatttccaatctcagctcacgcagtagagatttgccatacctctctagtgcttaccttgagttaccgacaagatgtggacctccaactaccacgtcgagccatccggccactgttgtaggctaaagaggagaagttcctcttgaaggcgcctcagccctcacatatcgctggacgccgcatgcttttgacatatcaaaaattctatctcatcccgcaactaattacactaattaatgtcatgactgtaattattgtggtagtgacaaaacttttttatgacttttttccctgaccttttgaagggaagaggctttctgtatggcactgttgactgagttaccacaaagacttcttctcttagggccaatagaatagaataggtggtgaatctaggctcgtactacttgttagacccgtctctagttctagttttctttccgctagagaagttagcttgtttaccaccattattcaatctcttacccccattctttcctctttcccacttccccctacgcctcagtgttaggggtaggtgagtcttgcaatttcttcttcttattttttgactttttagcccgaaaaacaacttcttctagtttgataaagtcgtctatcctatcaaggaaattgttcatggtgtagactgccttgagatgaaggtctagccatataggactcatctccttaagctcggctttgagtaccataacctttgcatatttgctaagtatttttatcttagcggttgcctctaagaactattgaatgtattcattgagggattcatcttcttgtttctttatgtctactagatcattaggttcaatctggcattgtcggatggagccaactgactgccaaaggtatccacaagctctttccatgaatctatagatccaagagcaagcttgagataccatcattgagctaagcctgtcagcgtggtagggaagatttttcaccagacaatatctctcaccctttgaatatcagtctacacttcaaagtagtagatatgagtgaacatgtcttctttcccagtgcattgatgtcaagtgggattcttgaattttagaggaatctccaaagctttaattcgatttcggagtggtgagtgtcgttcttggcttagcacaaactttgatagctttagattagtgattcccttcaccaaagcgattagggaatcaaatttggccctattaatgccacgagtggtggcctacgtaccagttggacctttagttatcaaattaatggggtcaccgctagaagctcccacttccactaattgtctcttgttcaaggtatcacacaagtcttttttctttccatgtcgatcaaaaatatttttcgatttgggcttggctataccatcctaaacacgaggttgtgaatgcaatgtcggtgacttctctcgtatgatggcggaatcatccttggaatagtttttgtgagagtgatcatccaaagaactataacgactattcccctcaaaagagtcttctttagggtgacaagtgcagagagagttgaactgattttctcaggttcaactcttccccatgcacttgaagaaagtactcatattgttggccattaggactgggagcaaagtaccttcataaaacaccattttatcacagaaatacttccaagtgtggagtggtttgttgattctgaccctccgaatctcattaccccagtttcatggtagagccttcaggtccctcacctaaggttgactgtaggtccttacctgttgtaaggttgtggggcctagagtcattggacctatgaggagaataccatggagtgagatcagttacccacattgtttagatttctccaagcagaattgtggttggtcctatcagcgctaggtggtgggcctatgggtccattttcttgagtctggcacctttcaaacgcttactcgtagattgtttctctaacaggtaactgctccacatcaggtggaggacccattggtctatgctctggagaaaaagtccttttagatgctcgctcgtagtggcatggctatcgggaatgttagaagtacctcacgcattaaggctttccccttgagcgcttgttcctacgtggaaatttagcggacgttggttgtctccagctctactgtgagtggctctaggaggatccattccgttgttggagcgatagacttctcgaattttttgaacaagattagctcttgtgtgctctttttcataatgttaagcttcaaagttctctaagttttgaactattcacattgcttattgagagattctcgcagctgttgttgcaagttagcaactgattgactaagttgttcaactcaaggattgacttatataaaatatgatatatgtatttaataagcgatgagcacaagatttatattagttaactccccgtgtcgcgacggtaatggaattacgtctacttcgtgtttttatttcttaggataattacaagagaattggctaaggtaagagctcagatttctagagagagatgctcttaccttacagggacttttttgaatgtaaaaaattagctaatggagctctccttttatatgcaaggaggtccattaaaataataatacaataatacaaaaatatataaaaaaaattatgatggactaattttgaatgttgatcatgatctaatggctaaaattaaatttagatgaaaattatcaatttttatagcttgaatcatgtccactgaattgtttttgggtaatctacaaaaaaaattgtacttgacatgaggatgaaacttcaacttcaaatttttgaaattgtaatgtgagtgtggacatctctagaaagagcttcaaatgtgcttttaaaagcaactgaatttgcatcaatcagatcaatattgagtaatttatggtcgttttattgaagacagtttagcaataagcacctaagttgaatcccagagcctaggttgacatccagcggctaggtttacattctaacatcaacttgtatagtgtatgagtgggaaacgtgtcagacatgtattttttgatgccttaatgatattttgagattacctagtcaattttttggttttggtgaagttgttcatcagttctcgagatgtcacttttttgtaaaattgggtagacttaaaacttccttattggtggctaatttgtcgatattccacatttccaaaaaggtgaattatcaaagtgtaaatttaacttgtcataagttgtagctcttgtttattaagaaaaactagtcagatgctgaagacagaataagaatcgaataagcataacccagcgcactaggctatatgtcaacctgggcattgggtgctcctcggggagctttttgaggcttgttttgataattctatggccttcaagattgtgaaagagtcctcctaccccgattttgaccaaaataagaaaaatgcccagagcagaatttgtgtttgaggagcaaaaacatgtgaaccaacttgggcgtagggcctagcacccatgtcaacttgggcattggggccctgttttggcccctagatgatctcattagctcctcgagaacacttgcatctttgttatttctaaaaattaaaaagaagctcgaaaaactttttgaagaaaatacttaaaagtggctcaggttgacaaaacgtcaacctgggcgcttggaccaggcaccaagtaaacctaggcactggtacctagttttgaccaatagatgcttccatttgattcttggaaacactcgtatcataatttttggtgaaaatggagaatattcgagaaatacttctcaagaaaaatgtttgaaaatggcccagattgacgatatgtcaacctaaggtgctggggcctagcatcaggtcaacaagggcgatagatctcagttttgacttgcatatgactccatttatatctcgaaagcaccaatatcttacttgtttatgaaaatggaaaatattccctcaaaattgatgttggaaatggccgaggttaacggcatgtcaacctgggcactgggacctagcaccaggtctacttgggctttgggttccatttttggccccctgatcgatctgtttctttctcgaaagcacttgttttctcgatttggatgaagacaaagaaatatttgggatacatttttagtattgaggttggaaatgccccatgttgacaaaaggtcaacctgggcgctgagtgcatcgccatgtggcctaggcatcaggtttgtgggtgctccaaacggaaagtgttttgattttgatttttttttcctttatcatgtttgtaacaggtcttattcatgtctaagtacaaagtgtaagccattttcactaagacgaactagaaaattaaaaccctaacaaggatgtcaaccttggcgttaggcacctgggttgactttcgagaggtcgtattgacccttttcagttctcaagcttcgtacttggtttcttcgtgacttcttggttcagaatactgaaggatggtgagttagaaacaacttgagggtattcaaacacctattctggagttcctgaagtgagtcttggcgcaggactaaggacccctatgacttaggactactcaactctataaatatttttttttcttgccacatgtcaaatattgatgtccacattagcaggactagtttatgagtaaacaatatatatgttttactgtacattggatgctcaagattgttacgtcaaagaagattatatattttgaccctcttaatatggccaccaatgtcccaaagatattgatgatatgttaaattcaatcactttctataagaaaaaatttagctaagttatgttaattaatcaaactaataaataatttgcaaaacatggcatatgagaatattaaggagacgaatgaattacttggaccatattcagaaatggcggaagcactttgctaaaatcaattgaaaaatcaagaatatagtttttatgtcttgaaatacatcaatgacatcataaaatcttcaaatgctcaaagattcataaatagcaaaaaagtaagtttctattatcttacttgttatattaacaaaatatccaatacatatatactaataaatatttatatgttctttttacatattagaatagttatataagaatatttttatcatgtttaaataactcttaaacacttatagtaatttaacatttagtataatatatttacttagagtaatataaatgtatatatttttatctagcttgtcaatttaattcttacttatgattattatataaaatttatacttaatttagatatattaacaaaaataatatatgtgtgtttaaaaaaataaaaatcattaataacaagtcctattatgacataataacttagttatacataataactgaagccatataggtacttttttgcacttgagcgaagcccctatggcttcgattattacataaaaatcgaagccataggggactcctatgccttcctttgcttcaccaccctttagctatgcgtgcaatgcctacgattgcgaatttctctaaaactgttactaaagggctaaaagaactgtttctaaagcccctttttgtagtagtggacacacaaaaatatagtggttcatcaagagctcaacctgcctagtccacttttgagaaagtttgtaattaagtttattagttggtggatcgccccattatacagaaagcatacgccctttgattctcgtaatccgtctagtaggacaattttccataattaatatattaaattttataacaaacactaagaacataaatgattaagaataatttgtctgtttacattatagtatggaatgtctgcgactaccttagtcgcatattaaacgttcctatactgacatcttagaactcactggttcatatgggttgtcgcatataatagtatttggagtaatcgatgtgaagatgcgaccttcacacgtggtgcaagagagaaaatacttggtcatcgcgtatattctatgtatgctgtgattgtgcttctctcttcgtctcacttttatcttattgtcatgcagtatataacacgagtctagactttatatcagtcgctagcgttctcgcatgtttctattatgcaaggacaatttatttagtggagtttatactcttgacacgttatcattttctttcgtggaaatgaattcatatgtgcaatcatatatgagactatacttgttaaataatcatctaataacagtatatattagagtaaattatggcataatttccaatactcacttcgctagcaatcaactcttaaaatttaaattttgatggtaaaactctcaaaatttgcatttgttagtatttagcattttccatccatttttggcagtaaaatgccaagttagttgtccctgtgtacttagggtattgtccatatggacagagtgtacacatgacactatattattgactcacgtaaataaatatttcaacgtcgatgagccacctctccttagatctatctctctctctcattgctctcggctcaacgtcgatgagctacctctagtgactctcgaccaaaaaagagaccactgtgggcctttcagactatttaaaacccactccttagatctgtctctttctccatcgctgctctcagctcaacgtcgatgagccacctctaatgatgctcgaccaaaatagagaccattgcaggcctctctgactatttaaactccaagacctttaggtctccttcacccatcattgtttaaaaacttgctggagcttcacggcttcaatctggccacacttagtcttagctgaccaaataagtttcaaaagtgggtaccacttgtgaagatcttccaaatcctaatcttgcgttgggtcgtggcagtggtttaggggagatgaaatggttgtgtgatgagatgaaatcaggctcatgcgggttggaaaaagagaaacgacaaaagtgatggccgacttctaggcaatgaagagataaaggtgggatagttttcaagttcagatgagaatggaagaataagaagagggtcatggatagagggatggtgggttatggaggttttagggggagaagagagaggtaaggggaaaagggattagggattgtttaaaaacttggggtaatttatttttattatagaaaaaaaatatataaaaataaataaaatggagtttaaaatgtgtgagaaattaatatgatgagataattgttttctattataattaatttatttttatttttacatatttatttattggggctaataatatagtgttatgtgtacactttgtttatgtttacaaaactttatgtccatatatatcgactatacttaatttataattaactgctaaaaatagatgaaaatagttaaatgctgatataatgcgagttttgaaggtattacaatcaaaattaaaattttagaagttaattgttagtggggcgaagattgaaggtgatgatgcaatttactccatatattatgcaaagttgttatgttgtttaaataaaccatgtgttgtttagaacatatatgtagttgagagattgagaaaatgatatgaggggtggtccaattggcaagaggggtctgaggagacagaaaagcaatgacactacagattttaaattgtaattttggtcaaatgacttcgcaaagctagctatatataccgtatatatgtatgtaataataatattgtatatatatatatatgagttatgagagaagctagagagaactggcaaattatattgtaggatttggtctatctagctttcatttcctcaattattagtgcttatatctgatttttatgtgattagactgctatcccatcttccattttttattttcattgttttttgcactctgattttacacctaagaataacatgtatttccatatacaagtagacaacttactacacagtaattgtactttttattttcatcctaattgtgtaataaatttttcttcatagtatatttcataaataatttcgaataaggtgagtaattatattcgcacaagaacgacgt

SEQ ID NO: 18207 - DNA, 2106 bp, Cannabis sativa
tttatttatttatataattttatttaatcacttaaattttgagtcatcaccaatccaaagcccaagtgtccaacaacacgagagatgtcgggaaccaaaccgattcaaaaagcccaatcacatatatgcgcactgcgcaccccacccaccactccctatccccttctccctttgcgtgagtgtgcgcattacgcatcctcctcctagcttatcttctctttattaattaatataaatatttttttttgtatacttctccaaattgaaattcccaattaaaatctatttatttttgcttatgaaataattttttagtttatttttttttttaattggtttagttatttcaagtattttataaaattttaagagaattaaaaaagtttaacacgtaaaaagtaatattcaaacagttacacacaagatttattttatatgtataaaataaattatttgaactttatttttagatgagattttttcatttttacgcttttaaattattttttatattttttttatagaaatccatataaaaatacacaagacaactaacaaaataacttaaatcgcaactaaaatttacataccaacctatatagaaattatcaaaataatcaaaactataaatgtcaaaaaaaataaaaaaaaaaatacataaggtaaatcccataaagatatcataaataactacaatttaaaaaattttgaaaaaaaattctcaaatacaaaaacaaatagaagtaaattagtggatccttctaaaaaaatatattgtaaaatttttttatatttttttaaaataaaaagaattctgaaaagcgagttattattattaaaaaataaaaattaaattaaaacattactaaaacagtgaagactaaacagtgttagttgattacttaagttaagtaagtaaaataaagtagttgtattaatattaagcagcactttctctctttctctctctataaattgattttgtttttagagagagaaagaacagagtaagaagctcaccaccagtgtctgcttaacagcaaagctcttacttaatttaaattaaatatttaatataaatataaattaaataataataataataattcaagtcattactataaactattttcaaaactcactttctctctctataaccagagagaaaagaaaacaccagatttaaatcacaatctagagagagaaagagaaaccaaacaacaaacaaagcattctctctctgattagagtgtttgtttgtggattggattttggagttggaagatttttcgaaccctaactattttttggatcccgaggtgcatttggatgtgagagactgtgaatcgttcagatcggagatggcggagttttccggcgaagttggaggaggagatggagttgggggagagtttaatagcggcattgggacagtgccggtggcgaacagtactccgactcctccgccgccgcttgcggtttctggttcgtttaaggaagggaagagttcgtcttcgcggaggagaggttcaatgatgaggccgagtcttgactcggatgagtttatgaacttgttgcacggttcggatccggttaaggttgagcttaatcggcttgagaatgaagttagaggtacgaatgcggttcgatctagtggtttttgtggagattcggagcttgttttgcttggttttttttagtgtgattttttattttttattttttctggttgttttttttttctttacagataaggatcgtgagttggaaaaagctcatgcggagatcaagggtctcaggttttctgaaagacttagggaaaaggcagttgaagaggttatctgttactattcagtcttctttttcaataatgcattattactaaataaagctttctgggtattgacatgttgattttttttttttttttaaaaaaaatatatgaatgagtatattgaacatagatgaaatgctattagcttttgggttttgtggttagggtaaatattgtgataagatttctttctttagtttccagctcaatattaaacagtagatcatggccaaagtaaaaggtctcccaaaccaagcgtgtgtgtaggacgg

SEQ ID NO: 18208 - DNA, 4342 bp, Cannabis sativa
agttgagtacacactgtaatacttaaagatcaaggtgtgaattcttcaacaaagttattggattaaatgttcgataattatacgaaaagaaacaaagataccctgaaaggcttcaagagatataatctttcttttagtagtttagatttttaatctatatatattatgttgagatccttgcgcttataattcatattatgtaaaaattatttttatcaaattacgcttctacttttataactctaatatggaatataaaaatcaatatttattcttctcggagtgatgctaactaaggtccaatgattaactcttgtttccaatcataggtgtatgttcatgtatatatattggtaaaaattggtggcaacactcttaataactcttttattaatctccatacagtaaaacaccaatcatgttaaaaactctaatattaatattgaatatcctaggactaaagaaacattaatttgaacattacttccaaaagaaaaatattatttgttaaagaaatattgtagacatgaaattagagagagcaacatgaaatgaaatcacatggtgacaccaccaatgttattagaagaattagtactattgtaagaagcaacacctggaggaagaggaatatcaaaagtgccttcaaacatggccaccactttcttcattgcaggtctaatagttggctcttcttcaatgcaccacaaccctattttgaccattctaaccaactcttcctcttccacatcttcatcaccatcatcatcattcaattgcacaagatttctcacttgattagccttgacacattcataagtaaaatccaccaaaatggcttccctctcatgaacatttacatcaacatgaggacgacatgaaatgataaccaacaacacaaccccaaagctataaacatcagctttagatgttataggcatgttcttgtgccattctggtgcaacaaatcctcttgttcctttaatcccagttgttgtccttgtttgatctggcattagtagttttgctaatccaaagtctgcgatcttaacaacgcgattttcgtcgataagtatgttgttgggatttatgtcacaatgaatgatttgattctcacattcttcatgaagatacaagattcctttagctatgccaaaagccatactaactctttctttccaatttggctttatttcagatttgaagagaaagtttgctagtgatccattgctcatgtaatcatatactagaagcctatttgatccttcatggcagtaaccaagcaacctaagtaagtttctgtggtgagttcttccaatggttttcatttcgttttgaaattcgatttctccttcggctgcaacaactttctctagtctcttcacagcaatggctctctcaccatttggcaagtttattgttcctttaaaaactgtcccaaaagaacctcttcccaatttgtggatgaaaccacttgtggaaatttcaagctctctcaaactaaatgatctgagagcaagtatgtcatgaactatcaatgtcttttcatttgggacatttttgtaagacttgaattgctttctgtagagaaaaaacagagaaaatagtaagattgttaaagcaattattatacaaacaagtacaaagactgttatgttctttcttttgtggcctttcttaagaggcatgttggaattggtaccatagtcaccaccaccattattaggcactttgactatggtttttattaaggcacttgtgtgaggcttggcgaatctcaatggaaccatttgtttgctgcaatgctgattttcgaacagagccaccatgcaattacagtctctcaaacagtcctcttgacactcagttttgttcatgtaatacacaactgagtatgagttgttttcccattcaagcacatcgaattcagcaacacgaaacgccttttcatgatcgcttttgcagctatctatgcctgaattcctttggcagccaaggcttttctggttatgatcaataaaatcaaaaccaggaagacaagaacaatcagtttcttgactgatgttattaacaatgcaatatgaattcaatccacacaagccaacaggatcacacttgtttcgagttgaaatccactcagcaacccaactgctgttttgaaccaaattatgagaatacaatctcagtattccatctacatcaattgtaaaacggtatgcaaaattgttaaattgttgactctggctttggccatcgaaaatcgtcttcataatagagccattcgagttgagaaggtaaagctgaccattctcatctaaattcagactcgaattcttggatttatcttgtgttccacttgaccagtaaccatagtaaggtgagattgtaatgcctaaagggtactgcttcaaattcccatccaactgcattattagctgaaatcttccactagagtgattcatacttgagacacctgagacaagtgagtgaccggacataacatgttgtccgggcaaaatggtatctgttggatgatcaaaactttgccatattatggtagaattcgagtgatagagggcgaaattgcccgagtcaagcattgaagctgaggcggccgcagcaggcaaagagacgccggtaattggcacttgcaggccttgtttttgttgcaaaacaaggccgtcgcgatttaaaattagtgtgacatcatttgagagaggctgatcatcccgattcgctgtccatatgactgttttctgctgtattttctcaaaccagattcccaatgcaaaaccattgccatattggtaaaaaccaaatgcaaattggccagaatttgataaccaaaatgatttattggtggagggagagagagatgagcctacactaatattaatactatttctgttttgttgagcatttgagatacaaatttgagtaattagaagaaagaataattgcagtgcagccataattgtttggactatttgttttgaagaccaccaaatggttcacctcatgcaagattttgatgaagaaattaaagtcctttaaagtaaattttaacggaaaaatgatcatggatcacagcaaccaatatactttggtcaataatatcagctagtaatattagtcaatcgagcactaatgtttaagtcaacttttaatgacattttccatggttttggaaattccataacaaatcacggttggaaaaataaaacaaatgaaataatgaaagaaaatcttgataattactataaatgatctgaaagtagaaaactttgttggttttttcctctgtgaattaataaaagacacgtatatttgtggattgattgagatttgagatacttaaaacaattatctcttggtaaaacccaaaggtaaactgggcagaatccgatagccaagaaaagttattaataaaccaaaacagttattcagcttcactagcccaatttgcccagtcctgatttactctactaaaaatctccaacttccattagtaagaggggttgttctaagagaaaaattgtctaagtaaactttgaaccaaaaaagctgaggtcaaaaaatcggctgccaaaatccactatccaccactatccatatttctctttttctaccgtatactccatccacatctctcaatttcttggaaacataaagaaataaaaacaaaaaaatttatctctctccaagatctcgatcctgattctgatcttggtcacatctcttcttttttctttttcttaattggttttctaggatagtgggatgggacgagaaaaaaagtagagatgaataaatggtactggtcggcaataagactccaccaccaagaagggtgagtgacaaatcatagaagtttgtaattttttttttttttttacatatataaaattttttgatctttaataaaagaaaattaaaaaaaaaaaaaaagttattaaatttttttataattttattatgatgtgtaccaataaaattttgacacataataactttaagaaatgtaaacgaaattgttcaattgggtaattatgaactaacgagaatcttgagcatggagacttttactgtaatttttcgagaatagggacttatatacatcaaagtgaactttttggagaatagggacttatatacatcaaagtgaactttttggagacttatactgtaatttaatatcaacacgtgatattttggagtaactaacatatctgttaaattgaggactaaataacttgttacgaaaattataaaacagtacgcaagtgtacgtaatcaagtagtaaacttaaacaggtgaggtcgaaccgtagggaattggatt

SEQ ID NO: 18209 - DNA, 3031 bp, Cannabis sativa
  modified_base (299)..(302): a, c, t, g, unknown or other
ccccaaactttaatgtatgtcaaacttttatttgtaaaattggacaaaagtacttaaatctaacaaggattataataatttggaccatgtattttgcaaaagttactgaccctctattttgttaaatgacaacatggacgttgtattttccaaaatggtaaaaataagacccagagcttaatttttgacaattgtttttttagtataaccaacttgaaaataattcctaacacgaacagatacaataaaaataaaaataattttatcataacacttttaaattagattattattaaatnnnnttttgacaaaaaatcagttcaaggtcctatttgtaccattttagaaaataccggattcattttgtcatttaacaaaatagaaagtccaattgataacttttgcaaaacacagggtccaaaatgatatttaccaatctaacaatctcaatagtttggaaagaattttcaacagtctaaaaagttcagaaaaacataatttagtacatgtcaaagttcagtaaacaaaaaatcatattcagcctatatataaatttcattttaaagtgtttttggatattaaaactgaagctaaggagtttcgaacttttgacatcttagatattaaaaagactttcaacactaaaatttactagagaagtattaatatagaggccccgaaatctaatttcgctttaggtctcaaatagcttaagaccggtctttaacttaacttacatagctccaaagagaatgctcatgacagcagctatgatatctccacctttagctttgttttgtgtgactaaaacagctccaatccatataataagagcccaagaacaaaaggaaactgtttgaaacagtcctgttccaactccctttattaaagcttctcctttgcttaccataacttgttgttctaacctctctgagaatgattttattgcagagttttctccaacaaatgcatacactgtttttatttgagaaattgtctgttgcccaaatataaaacatatcatattacataaactacttacatatgtatatacaaggccgactcaaggataggacagttatgacccaagaaatgattttatgaaaaatgtctctaatttgatttttaaaaatgtgtatttttttaatattatttattaaaattagggtaaatattattttgaactttgtgttttgaaaaaattacagattagactctctattttgttaaataataatttggaccttgtgtttgtcaaaatagtacaaaatagatactgaacttaattttcatcaattattttcttaatataactaacttaaaaacaatttttagtacgaatagttgcaaaaactataattattcttgtcataacactttcaggtcaggttattataaattttttatttgataaaaattaaactcaaggtttattttgtaccattttaaaaatgcaggattcgaattggtatttaacaaaacagagaatccaatcggtaactttcgcaaaatataaggtccaaaatagtatttacccaaatataattatttataaataaaagaccaattttttttaaaatactatatttaattttttttttagaaaataatgtttttttaaaatactatattttagatttttactactaaatttaaaaaggcacaattaaattttagtccaaggctgacaagtagcttgagacaaggcgagggctggccttgaaatttaatgggtcataagaaaaaaattatttttgggttatatgatattttttaaaattagtaaaaaaaatagtataattttaaaaaggaaagatttttttgggtctctgaattaagtgggctctaaacacaagtctaactcgtctatgctaagaacaggactctatatataatagatacatgttaaaaaattattattgttacctgttctaccaatgaagttgcttgagattggaatatgattttggcaatggaaatagtgttcattttgtttgtataagtagctccaatggcaagaatcattggaacaaccaaaagagataggattgccacttcccaacagcatatgccagcaatcaaaattccacacaagaaagttgcaacacatgatagaaaatgacccaactgtatatttatatacatatttatatatatatatatatatatgagtaaaattgtatacaaatcatactattatataatttatctataaatagagcctaactcaataaatatatatcgaaaacaaacgcatgcaatacactatttgaattttaattttgtcattttaaattattcaaaaaaaaaatattaaaaactcataatatagttgcattgcattttatgcaaatactaaaaattctaaaattatgcataaatatagtgattaaaaccaataatttttcatatatatatatatatatgtaccttctctccaattgcatcttgaatgatattgatgtggttacttattccattaatgatttttgcagttgttaaatctgtgtcaaaagctccaatctcttgattaaggactgattttagataagctaatcttattcgtcctacttgtctttcacttgcatacatccaacatccaatctctatcaaccaataaaaatatattcaactactatatacaaatattatatatactataaaaagaaaaaaaaattgtgataattttttagtcataatataatttttcttgtagttaaatatgactttagttacaagaaaaaattatttataactaaaacataatattttgatacaagttaatgctaatataattttagtcacaataaatattgtcactaaaaatatatatatttaattacaataaattataatttttatgaataataccattaattattatagtctttttaattataacatataattaataatttataattataagtaaaaaaattttacttttaatcacaaattattttatttttagtaaaattaaatatacaaatattaattatttaactctaaaattaatgcaaaagtataaatg

SEQ ID NO: 18210 - DNA, 3569 bp, Cannabis sativa
ttataacgaactgaaaagtttaataggcacactaatgtgtcataatttatgtggtttaaatcctagagaatattacactttatacttattttttatttttttttgtttaatttttacaattcttcttttattattctttaatttataggttatatttttattatgtgtcttaaaactctaattttaataagttatgtgagattatatatgatattttaattataaaaaaagtatttatcaaattaaaattattttacagttatatttgattatgtttattttttaatttgttttttaaattataaactatttatttttatatctatttttattttattttattaatttaattttaccggtattggcgcgggagtttaaaactgtcacgtcatcgaattccgttaagaacccaaagccatttccccagctactgcaactaactcccatacccaaagcttcaatctttcatcaattaacaaaccctaaccctaatccccaattcctcaaatcaatttcaaaatcaacaacaatggcttcccaaaaccctacatacagaagaaattcaatgtatccggaggtcaacacctccaatcccgatcatccaattactccaaaccctaacccttcttcttcttcttcaaatctctaccccaccattgacatgacagacctagtcgagaatctattccccgaaccctccgcacccacggctccacccgaagccattgaagaaaccatcgtcagaattcccggcgccattcttcatctcatcgataagcattacagtgttgagcttgcttcaggcgatttcacagtggttcagcttcgtcagggtggtaacatcgttgctgttctcgcacgaatcggggatgagatccaatggccattggctaaggatgaagcagccgtgaagcttgatgattcgcattacttcttttcgatgaggacaccgagggaacacggttcggaatcggattctgattcgggggatgagaaggggaaaaatgctgcaaatgatgctgagagtttgttgaattacgggttgactattgcttccaaggggcaagagcggttggttaaggaattggatggaattttgcagcattacagttgtttttcggtgcaagaggtttcggaaaaggcgaaaaaggggtctgaggttttggatgggtctgtggcaagggagacttctccggcagatttgaagaaggagaagaagacaaaggagttgatggaggataggagtgcggcctactggactactcttgctcccaatgtggaagagtatagtggcaccgcggcgaagctcattgctgctggttcggggcaagtgatcaggggaattttgtggtgtggtgatgtgactgtggataggcttaaatgggggaatgaagttatgaaaagaagaatgagtttgagtgaagagagggagattagtcctgaaactatgaggaggattaaaaggtaaagatattgtcttttcaattgggttttgagtatttttatcctttgttatattgggtttgtgtgtcttgttctgactatttctataatttaaatggaaaaaaaggaaaatttgtcaaactaacaacttagaaaatgaaaaatttgcaaaataaccgtattgaatttacacaatatggtccccatagtgtaaattctaccatttatagtcgttttatagttgcgcagtgtaatttttggttgctcgtgtgaccaaacatagttattttgctaataaatttttagaaagttattttactaataaagttgttcataaaagactatttttacaaaacgttctgaagaaaaatggatttttttactgtttttgtatagaagatttcgtacattctatagtcattttctaggattggtacaataaatggtacacttttcagattatatttttccctttatattctaaaaacagagtatgctagtttcagcagtcggattaaagtttggagcttgatccctccttttcccatgctacattttccaaaaattggactttgtatttgctttccatgctagcttattgtagcttcagttttaatttagtttcattagattgaacttcaaatataatgaaatatagttgtcacagacactatactttcgtttctcactgtttcattttaagttgttttttttttttttctgtttgtgtttgaatacattacaattcctcagcttgactgtccgtgcagggtcaagaggatgaccaaaatgacagagaaagtagcaaatggagtcctctcaggagttgtgaaagtatctggattctttacgagttcagtggcaaactcaaaagtggggaagaaattttttggccttcttcctggggaaattgtacttgcgtcactcgatggctttagtaagtagattatctgattttctactcatgaaataagatattgttttcactctctttttggttctttgtatagtgtatattgatatgaagtatgattctgcattttatgttgatgtctctcatgtctatcgtctacctatcaattttcctcctgtatttgacaattaaaatttaccatcttcattcatatgatttgaaacgagtttatctgattttttcttcttcttttttataagtttatggaggaccttgtacccccgtaccacacacacacacatactcactctcccaaccgattgagaacttcagttaggattagtcaaatgttttttgcaatctcatttagaacaaatcaaattccaattttccctatgacgatttccaattggagtttcgagagttctgatatcagctgtagcctaattcttgtcaatgttgttgagttggatactagctgtaattttccctagatgttgtaagaggatattataaccatttgacaattttgttagaagaggaatattatatccactggacagctttgcagttttcctatgtgccatattcatagtttcaatttaatgttacaggcaaggtctgtgatgctgtggaagtatccggaaaaaatgtcatgtcaacatcttcaactgtaacgaccgaactggtctcccaaaggtacaattcatcttgatcccgaaaagcagtatacaaaatgatttcacaaagtgatatagagatgtggaaaacaattaagttagaaggcaatagaaatagtgacatgttccattttttattttatttttcgtcacaggtatgggaaagaagcagcaaaggcaacgaacgaaggacttgatgcagctggacatgccatagggaccgcatggactgcgtttaaaatccgaaaggcattcaatccgaaaagtgttcttaaacctacttctttagcaaaagctgcagcttctgaagtgaaaaaagctaagaaaaaggattcaaagtaatcaattgatggaatcacagtgacaaaggcaaagatttaagcctagtttgtgttattcattgtaatttataagaaatcttcttttttattgatggagtaacaatatgaacatgatgctgatctgtatctctgtcttgtttattgtactgatgtgtatagtttcttcctttttttgaaacaggaaagtttgtt

SEQ ID NO: 18211 - DNA, 4668 bp, Cannabis sativa
aaataacttactttttttaagatagggaaacacatgtgtttcttaatagacattcctaaagtcaaaggaagaatatgcaaaagatgttcaatatcaacatcttttccttcttgcaatctcaattggacatatttcataacctttggctctatacccacaggaattccatttcttgatatccataactctgccttttgttcacttgtgttcttctcatgctttttcacatctaatattttggtaacccaagctgcaaatgactatacacataattcaacattattattattattattatcataaactataagtgtaataacactcatttagtgtaatatatatgtcttaattaattttacctcactcttgtgttgattgttgtcatgatcagcatgctcttcaagtaatgaaaagagatgttttacatcaaaatctttgccttctctaattgtttgagttagatatcttttgatgactttctttttatgtggtggaagatcatggtttgatagatatgaatctatttcaggttgtttgatgcttaattttctccttgcttcttctgattttgtagtttccaattgcatgtatgtctgcaatttaattacattaccatgaataacttagatgagaaataaacggaaatttttacacaaagtacttaaaattactcttatatattatgtatttgcagattttattttttataagttttttacttgtatctttttggagaaattttatctttttagtgacaagtaacctttcttccagtgactaaaagtaatatttaatcacaaattatatgtatgtatatatatattgtgatcgagagattgtcactaaagagtaattctgtttttagtagtgagaacaaaaaacacaaatttgttgtgagtgtgcatattacctgtaaattgccaatgaggtacaaaaataaaagtaggccaaggatagaaatgagaactgcaaagaaattttctccaacattgctacttgtatcaaggttttgaccaaaagaactacaaaatagaagaaaaagaaataagagagattgcataagtttaagtattttttttttcaatttataaactataaatataagttgaaattacctcaaatttctcaaaccccaccaaaaactacgagagaattttcttagaaaatctgttttgcaaactatacgagactcaatcgcttgagaaaatattccgaaattgaagataactggatttggtggattaactgggcaatactgatccacaattgttagattcttgatgggatgatgatggctttgacaatcaaaaggacctggaatacattcttctattcctacacttttacatgctatgtgccaacaagctgtctctcgaaaaatcgaatgaaagtaccaaaatgccccaaacacctatacacacgcgtacattaattaaatattacaaaattatatggctgtgtacattatagttatactcgtttaaaaaaaatgaataatttttgcttgctataaatgttcgagcttgtttctaacactgtaaataattctaaatttttcgaaaaacatgtgaattgtcatgtaactagatcatgactatcatataagaacttcgagttataatttttctagatgctaaaaataaaaacataccacaataagaacatgtgatgttaatatatatacacttacgtggccgaaaataatgtagaggaagaagaagaaggtgcctctaacccatacacgacaggtgagtgaatcataagtccttcctaactctttcgctgataagtacacacgaagaagacgaggcacatattgaagaaaaagtagtagacttagaaactttcttgctgttaaagatcttgatccagtaatcttggagaagtacattaaaactaccacctatgtacacaaaaatactacattaatttttgttttatgtatgcaagcaacaaattaataggctccaagtatttgtaaattatttaatattatatattatttgttactctactaataatcaattaattttaagatgaaacctcaaattatatatcctacattctaaaaaccatattttccacattctaacattttatttttataataattaagaaaaaataatgaaaacataccacatgccatttagtcaatatagctatagctcaaattttatatatataaaaaaaaaagtactatttttatacacaaacttgaaatataccatttctttaataaaagattgcattgaacctctcaaagttcagaattgacttgtgaataatgaaatagtaaatattattaaagcttggaatcttatacatatggttattagaaaagtaattaacacttaaaccaagattaataaataataataaatagcttatataaaaattattaattagtgtaattacctgagggaggggaagaatggataagacatcaattaagagataagaccaaggaaagcctgtgaaaatggatagaccaaattccttggacatggctagggcaatttgaagtctaaaaatgatgtgtaagacatatgagaaatcagttaaagatctcaaaacaagagatatggccataacattgtaatctttatcaagacacttgttctcatcattcacaattggaatgtaaagaaacaaaggatctatcataactccaattacacatgaagctaagaaaatcttattccattgctctctaggtgatgctgcccatggatttagtattttctctacttttattctatctttgttttttgatggtgagtagtaatcacttcctcttccatctttcatcatggggcttgaattgatttgctttgcataataatccctaaaaaatgtaaaaagttacattaatatcaaatataatttcggaaaattctacatatgtatcccatatgtgtttttaacgtctaaatagttgtaatttcaatttattgtacttatttaagatgtcctgcaaattttttaaaaattcaaaataaaatttaaacagtttgaactacacgtctaatatttttcaaaattatgaaaaaaaaaaatacatgagtgtaacatagaagaaacctgtaatttgtcagtaaatatatataaaaagaacggtataagagagaattattactaaccgcaaggaaactgtatccttattatccttatcttcgtagtagttattcataatcttaacgacttcaagtacaaggaggagtattagaaaatgctggtaagcatttgttttcaagttcaaatctctacagacttaaagtctttttcacagatgatcgaactcatgccatgagaaaaaatttaaccaaaagaagaaagaaagaaagaaagaaaagaaaggtttgaaagagaaactacataccaatatagcaatatggttccaaaatgaagtggacaaaaacataacaaggaacacaaggctcacaacaaagatatataacaatgcatataatatgattatagtacttatgctacttctttctcttacatatataatattcacatatatataatatatgtacatatttaattggatggtttgtgaagaacttggcaataattatttccaacgcggcaaatgtaattaatatttgactagttcaaagcaattaatgaaggaatcttattatttgatgcttaaattttttgtccatagagttgactgtcgagtatgatggacttttttaaccaattagataataataatagaataatattattaaagtttatatgtaattatttagaatatataagaagaagaagaaaaaaatgaatgattattataataattaactagttcatgatggtatatattataatttaatctagtcttttagccttaaaattcctaccaaaaagaattatttattgaagatttttttttatataaaatagaggattaaaaaagtgcgttattaacaagagctataggcaaagaatattacaactgtttaatttgttacaataattaattaataaaaaaaaacaaaagaccaagttgattattttgtaatctctcagttcaataaaagccaaaagattaatatatagttatatataaatcatagaatactatagctacttataatataatacatgtttaattaatttaaaagtgtcatatttcttcactttggaaaataaagaattaattaatatatactatatagctaactactacagcatatgtaactgcatattatttattgatatttttttattgtcaggaatttaatcgatcggtatatttatcagtctagaatttttcagaggccattttgtattcatggatctaatctcaagagcgtaattaggggtgcacatttttttcatggagatggaccctgcagggatccgtccttaatggggtggtgattttccgtctaaataagaaacagggtaggagcaggaattgtttttcgtctccgaatgttaaatgggacggggatagagatcacactccctgccccgatggagacccgattaactcatcaaatttctcgccccgtgtccaaggccagccctggaaagaaatgtgcccatactttaataaattttttaaaaaaattggcccttttatatgtattttttttagtgtaatttttttgagataagttgagaaatattttttttttttttgtattcattaat

SEQ ID NO: 18212 - DNA, 14183 bp, Cannabis sativa
  modified_base (813)..(817): a, c, t, g, unknown or other
tttttctaactttgttatgaaatcccatatttcatgtaattttcactaaaaaaaaaagatagataacaatttcattttaaataaacaaaacaatattgatgaaatttataattttgtcatttttcttgaactatgattttttatgtatttacattgctaagttatcaaaattatttttagttcttggttggattttttttttgattgaaacttttttatgtatatctggtaaaatcacaaggaaagataaaacccatccagttagaaaataaaataagatttacaagaaaggaaaattagaaacaaaataaaagagaagagattattctattctcaatatatatatttttgttaagcacataaatttaatattaaacattaaaaattgttctccattgtttttagatatgatcgatattacccatttttaaaatattacttactttttaatggttattttcaataactttaaaacaattcctccttagtagtcaagttggtctagaaccttgtcaatgaaatgctttttggggcaaagaagtaatataaaactagtcttaacattataaaatccaaaaataattttgatatcttttgaatgctagattttttttaatagaaaaaaaagaaaacaaaaattgaatcaaagcgtaacaagttggagttagggatgcatattcttcttatagggatagaccccgtggggacccgttcttaatgaagcagggattctctgtttaaatgaagaatagagtgcaacgggaatattattcccgtttaatttattaattattttttattaatattttatannnnntaatatgtgtttgtatttttttagtatattttctataattttgaagttgtgttttttttttataatagttagtatattgaataataaataatgtgtaatattttaattttgatataatttaaaaatttatatatttaaatttttaaaataaacttcattttacattaggaaattttctgtcccgttcccaatgaagaataaacgggaatataattaaaatccttaatgaaaatagagataaaggagcacgcttcgcaaattctctgcctcgtatagcataataagttggagtagcaagcaaaaaaaaaaaaggaaaaagaataatacttttgattcaaacttgttgggcatatcaaaattaagataaatattaaaaaaataaataaaaaactaagcgtacaagagagggagaaatagcaaaatatgatgttcttaaattaaggtgctttctctgtcctactaactattttagtacgcattatctatacttatttaacatataataaattcgttgataaaaactaaattatatgtaaaacaggtatatatgatgtgtcctgaaacaattagtaagaatagaaagagcgcaccaatttaagaacagtaaattttttttcgagaaatagtaaatgtaatatgcgggctcccatgtttatacatgttgaacaacactatttctatggtatttctaaagtttttcttacccttgattattaatgaaatgaaggatccgaaaaatgtccctaccatacgtacaaaaaagtgtacttataataaacatgtcctatatatataaattaaaattaagattaaaatttatgttttctaaaaatattagatctaaaacattaaataaatcctaactaatcccacatatatatgcatgaaatatatcaaatgaataaaacttatccaatccaatattctattagatttgattgattcagatgattaaaattaataaacctataaatattagatgtagttccataaatacctctacataactattaaatattatttggctttggtcatactagtagtcataccatccatctgaacatggaaagagtcatcatatcttcaaaaagatgagtttgtattgtcatgaaaagaattaccatatcttcaaaaagatgagcatatagagtactataaatgtggtgtatatacttttttttttagcttatgttcattcattggtagtgtataagaacatcttcaatagaatgatatttagtatgtattttttccaatgatagtgtattaaagtcaaaaatgattacaataaactgatagaaccagatagactcatgttgctattgctgtccatgtaaacgttttgtattgatcaaacattacaattacacctttcttaacaatcacaggaacaagccagaaaatgtttcagtaaccatttaggctaagatgaagataaaaaaaaagaaacagttttacaaaacataaggttaaaaaaaaaaagccatacattttatcataactacaacatatctgttgaacaaatttttatccacaaaaggctgcacagatttaacaagtggtatgttctgtttttacttcatgaactagtttctatacaccagaaaggactccactcaagggaatataaaattgaaattacatatggtgtgatgctgttttagtttgaaatataacatctgggtttcgggtatgtggacttactgatttatcattaacatttgatgagatgctccataagatatccctaggctggacatttgctgctatcccaagtggggatgattttgtaatcgacttggacctggatttatatccgccatttcttcccataccactagttagaagccaacgggacccagattgtcgttgtgttgtggtgccccagagttgcttattgaagggaacagtatctacaccagcaaggtggataccggtgatttgaaagcggggactatattccccgtctttaactgtctggtttttcttcgtccctaacacctcatctactactggctgaacttcttctgccctctgcacttgaatcaatagaagcattgggacccccacaggctcataattcctaagggaatcccgaagttgtaccaagtgagctatcgtgatattgtttcccaacaatccacactttctcccacgtactttgtgccaattgaagtcttgtttcaagctcccactttctaaatctatgcactcagcatgatgggctgcaaagattttaaatatttcgtcactagcattctcaattacaccaccaacgtttccagcatctattctcaaccactcatccaatgaaatagacaagtcaactaagtcatcgatgttgttaccatcatctgtttcatcccgaagttgtaatgctccaacattagaatcaaaaaacctgttcctacctccagagaaagatatcttcctggtaatctttgggtacgtacaagaaggtggttcctcatctgacatttgagactgcgcttttaagccgtctagtatgagggcatcaatcttactcacaaccaacagagaaacatcttcaagagatgcaaattccgtaggtatctcatcactaataaagtctgatttagtatcattattacagaaacttgattgaaattcataacctccctcccttccacaatgatcatgctgcgagtgaaatttcctgagacacaaaaaaggaaaataaaggcatcaaatgaggaaactaaaagaataattttctagctaatttaataaaataaaatgtactccatgagctcacacacctttcaaattccattgagattggagtgtcatcctgtgctacttgctttattgtcttcccagtaatatcctccaaaggcattaaattactgatctgatcatacagcttgtgggcttcacgaaaagccaaacattgtattatctccataacatcttggccaatttgtacaggtagaacaactgaattggaaacttgaatgattaagctcccaccactcttagcattcctgaaaagtaatggattcatagagcataaaaagcctccatttttaatctgaacatgaggaccaaagccttcttcaagtggaggtagctggtgtcgctcttgaggggaaagctcaattggactaccaaagccacccaaatagctacgtggagaattttgaaagtccttttcattaattccccactctcgcatcaaaacttcagtttctatgtcttcaagaagttttgccttccttctgtttaacaactcacttctcttgtgctcctcttcagcatcttgaattattaaagacaatttagattcctcagagtaatcttgacagctatttctgggtgtaatactgaagccgaattctgactcctcttgttttgcatcaaaatcgtgaaagaagttgcctgaatccaaagcctctttttcgaactgtctccaaagaagctctcttggagaatcgggctcactatcaaaattttttatacatgattcatcactcacttctaacatattcaagaaatccattgccacagactcagcaacatcatccaagctaaatgatcgtttcactgatctatttgctttgtagtttgatttaatttccatcaggatttcttgctcaatgtaatctccaaaatctatggaatccaaatttgatgactctggaatcaacttactacgaaaagaagactccaactcttctttggtcaatctattggtaaagttgcttcctgtttcatcatctttcttgtcatccaccagaatcttgtctacataattcatatagttgccatccttagaataaaaatctgtatcactacccttaatgatctcattcacatcgattatctcaatcgtctcaattgtaggttcaatggacagatcagcaccttgatcccatgtcataaactcttctttttcagacatttcagtccccatttcagtaatgttaaattcagtaatttcacagtcatcctcttccatttcttcagaagacacaaagtcaatatcaaacttaggtttgaattgttccatctgttgagaagctgaatcagtagaaatgctcaagttcccctcatcaagtttctgatacagacaatttatagacttagagagctccaatcctgttctgagcaatacttcatgacaaactttcatatccaaagactggcataagaagtcaggctcataactgacagagctagtaatgctgcgaactcgtgaaagcgtcctgttataattgctaggaaccaagtcgacaccaccgtctattgtactcaacctattacgcgatacattcaaaagttcaggataatttgaaccagtactcaattgaactagtttgtctctcattaccaagaatccaaaactgacatttaaactagcacctttagctttccctgaaagattaaagcttgttgtccatttaccactacttttctccccttccaactcctccatagtacgcggtaagaagctagtgagatcgacccattgctttccaatatccaaactaggactctcaaccagagaagcataaaggagtaaaagcttagaatcatatttcatcggatggttggctccaccactactaccatacacagtacatctgtgcatcaaagtttcatcgaattcagccagaccttgagagactctcgacggtgaagtctgaatcgcatcgttcttcttcttccaatgcacacaaagactaagattttcaagagaggagggcagcccttcaatcgaatggacatgaagataaaaacaacaatagaattttctgtcgccaatgtgagtaagagctttcaaaggtctcttccaattccataaagacgatttcttatccttatatgacacattttctctaggatttttcagttttaagtccgattttgattgggataaatgtattcttccacctactttggattgaatttcattaggagagggttttggcaagtaaagggctttgctaatttcctcaatgtctcgcaacaacttgccattacttgaatcccctggaccattatcactataacttctactatctagcttattcaacattttatctcaaaatccaagtccaatctagcataatgaaccaaaaagctcagattgttccactcttagaaagaattttagaaacttcaattccatgcaatcgtttggatcaccaaaacttggattcaactaagaaaataaaaaaggtatgacttacaattaaaaaaaaaccactccagaacaagatttcaatgataaaaacacaaaaaaagaaacaattatcaattaatcaagatccaaaattcatcacttcaaacattgaactgagaagtttgtgatactaacctgacagaagctaaaatctcttccgtcaacgaaattggataagtcgagacaatgaagaagaagaacaaaaaaggtagtacagtggtgaacccaaatggaaaagaaagcactaataatattattacccggaggaaaattaggtcgggaatctctgaaaagtttccgggaaaatgtggaggacgccaagtgcgaatgatataaatatatccgggaaaaacgtgaaagcgaatatatgtatctaaggaagagaaatgctaaagtgcttacgacttgtcgtatgactactaataataatgattatactttatgttagactctaaatgaataaattgtaaaggctgtgaaagttgataaatatgtaattgtataattattgtataatatggaatgagataatagaatttttgtttaggagattgacattgtttcgaagagtgtattatttagagtttgacactcacttgaagagtgtctcgatgtaattgatattgtatcaattgatgctttcattgaaagaatctcaatgagagatttcatcgagagctctacaaaatgaatgacgaagagcttcacgaattcgtgagatctgtcttgatatcaatagacagtaccaaattttaaatacattcttcgagacagtatcaatctcttaattgaacaaaagttctattatctcatttcatattgcacaatagctatacaattacatatttataagcttttacaccctttgcaatttactaataagctcttctagtatttttatagtctaacacttgaattatacttctcctatagtactttaatattgggttctacttattttactttaataatgattataaaaaatcgttgatcatttataagaggacacatcataaggtagtaggcactataactataaattcatgccagcccgacccaacacgacacattttcaaaaagctcgaaaaaaaataggtcaggtcgagtcgtgccaacccatttaatatagactgtatcatagtgacccatattttgaaaagccaatccagcacaaaattttcgtggcaagtgctggtcatttaacgggccagtctatttcctttaaacatgttgtcacattttattacacgagtcaaaattggacctgaattataaaaaaattattttaatatatttttttattttattttacttcattttcacaactttttaaatagaattcaggtgagctcataaaattcattattttaattttaaaagaacaaaataaattaaattgatttaaattcttaattgaggtattgaacctctttttatttttttttctgtttcctcttgagagaatgcatgcataggaactccattcgtttacatcaaaaaaataaaataaaattatatatgtatatagggagcctatatgatgattccattagttttattttagatttaaatcatcaacaaaaatgttattattcagcatgtgccttgccctctccttctcatgttaaaaattcaaaaacaaaattaatatcaaacatgcttacatcaatgttaaaatgaatactttatcaatttgagcataacataactgttgtcaaagaaaattaggctataattatttctctaacatactaaactatctctaatgagaaatataaaaattgtgatatattctacacaaaaagttacctcaatttttagtattgtgtttcaatgcacaattacaaaatttgatgcaaaatttaatattttcattaaaaatgtaaacaaagagcttgtatagccttatatacatttattgaaacaactgtactgtgcatattatggatttacatgaagcaaagctctcccttttctgaaacatgatgtgttacacaaacattctaacacaaatctacaactttttcagctgatggattgtttgaattcgcaacgtctgctattttctctattacgagtactcctgcagtcagagcaagaaaaagtgtttcagtgaaagcttaggctgcgcagttaacagaaatttaacctttttttaatgtttatactaactaatttagagtgtcaagcaaacaactcgggtttaaagcgttaatagctaacatgcatgcttcaattcaacagctctttggaatgaaactttacatgttgagcataaagaagttgcggtttgtaatccacagaaaattagtcttagatcactctttcctttcttggaagagttagttaggaagttagttaaggttgttagttagttgagtgcgttttaagtgttagttagctcgggttgtgacctttactaaccagtatatatagtaccttgtaatctcattttaagagagattgtgtgagaaagagagtaaaagaagaagacttatatgaagatgaagaaccatggcattcatggtgtctcgagcagctcaaccttggtggtttgagagtcaatttctcattgggggagagctggagtaggactcacattgagatccgaaccaagataaattctttgtcttgtctctttatttttccatttgattatgttctcaacttgcttgatttcatttctggtttaatctctttgtttgtgtgcatggttgtgtatgttgagtttgtgttgtagaatttaaaacagaagttaaagcaattttgaatattacaaaacctcaataactatgaacatttccaacgtacttataaagttagtgttgaaaaatagacctgagatgtgtttgagcattagaccggtaaaggagtctgttctaggatttcttttcctgtgattccatccttcaagttcttaaaataaacatcatagtccttctccggtggtggattctcgggatccactgtaaatggctcgctgaatggtatgacactctttacctgtaaaggagatagaaaatttccatagtgtaactaactgttaggtaatcaaaaataccagcaatttatcttatcaagtggagcaaagaaaaaatgtcttgaggagctaagagtagaacctcaaacgtcttgtcacacgcgtatgggctatccaaagcggcaatgcaaatacgagctatctcttcccttgataccttaccctgataacatttagcatagcaaatgtgaccaattaccataaccaaatgcttgtttaacagtgttactcattcagagaagaaaaagaacagtaaatatgatcgttattaatgtaccgttatgttgtctccttgatcaaatatgagatctgctccagcaggctcctcagttaaggcacatggtctcacaattgcatatggtataccactttcccttatcaaatcttccccctattgcaaactcaacaattagaaagaaatgaacaacagagaaagaaaggagatgaagattttattaactgcccccaaagaattacagtagccaatcccagctttacaagacagcaagttatctcttctgaacatccccatttttattttgttttttgattttatatcacaaggaaaaggatgaaattcaaacaatgaaagcatacattgagttcagactacagaccttcaacttaaatgtcaagataaaatccaattccttgttcaagcggaccgcaggtggttgtttacttagatcaagacctggtctgtcaggtcgagtaactcctgcagagctcacatgtacaaacctacagtaaacataaaatcaatattcaatgttatgagcaattttgaacagaaaagttataaaagataaatttcactcaggcattttgttaacctcaacatgagacattattgtacctgggagttaaaggctcttttatataagttcgaatgctcgatattggaagctgaaaggcgccttctacaaatgtaggatttagttttccatcatattcgaacttgctgaacataagctgcaatgatttgaatgtcataacaaaaccatcttatagatcttgaagcaggaaagaaaggcataattagtaatgcaaagagacatgcctgaaatgacaaaacattagttgggtcgaatggaggggcatctgagacagttttagctcgaaaaataggcctcaaagaagaaaatggcaaccgcacctggaaaagaaaacataataacagatgagaaatcgatgttatctattgtatacctcactgatctgtattcaataggtcatgatgttactcactgattgccactggccctctacagtatcaaaggctgttgtataaccaagagcatcccaatcagtgctagttcgaataataaatttataacgacgaccatctcctttcaggcgcagctccaaaccgtcataagcagagagatcctcaggtactgaaaagttctaattagaaatagagatggattaatacaacaaaatggaataaataaatagtttaaaacttcaccattcgccactgcagaaacagaaacttaattcatggaaacttataaagcaaaatcttaaaaggaactaagaaaaagaaaattatatggcatcagcaaaaggattcacgtgcactttcaacctacgaatgtaccttgaatcaaacactttacacaatcagattgaaaaataatagattcaatgcagagaggttacttgttattgtaatcaaatttcgatatttggaaaatcatagattcatataagcatgttgttttcttttatttacatttttttcccatatataaatggagcaactgcaaaaactttaaatttgcatttgctttaaatacaaattattgggtcaagtccaattatgtacaagggaaaatctttgctgtacctttgttctaatacttgaaaagccaccattgtttgcagttgagactacacctgaatgagacatggcatataaatataaaagatttattaattaaaaaaagtaaaaagacagtactatagaaataagagaatttattaggtagtgagaaacctctaaatagtccagttggttcaccactttcaccaccatttgcatctacctgaaatgcaccttcactaacacctcccattacaacatcatccaaagctccccaggcaagttccttgtaaatattatctgcaaagtatgacatgacagggaaaaataatttgagtttaaacataatttatggaaaattaagttcagataataataccatgcataccttttatttcacaatttaatatattaaaagaaaaagtcttgctttgttttatggcttagttgtgcataagagctatagtaagggttatctagcagcatggaagaacataccttcaaatccaaatatcagtttaccatttctaacagcaacactccccttcacagcattgatcaaatttttcatcccaatgtactccaccttttctggtgaatcccccttgatctgcattccgcagtaaaaacaatgtcttaataagctcgatttgtacgaaaaaacagttttaacttttaagtcatgaagtttcttatttagtaataagctcaatccaaaatttacaaagtaggacatgagaacgccacctctggttcgaagaacttgattccctgttaccacaaaatattaagatgtcatacaactaaaataggggaaaaaaatgaaacaagaaaacacacagcaatgcaatttttattaaaccccaaatctacaaaaatctcaatccaaacttttccaaattttggaaacatacttggctgtattttgctctgtcaggagtatctccttcttttggtccaacaataacagaaacagcattgataaccttcctcacccctttgaaatattcaggtacaagagtactctccttagtaatgtctccaacaacctaccatttttttgagaaggataatgttaatttatgccaaaatggactcaaacaatgaacaaaatggacattgtgatgactaattttcatcaagattgttaaatcttgagaattggggttagctaaaaccaaccacaaagaggtttgaaattccccttgtcactaatatcaactacaactaagctaactaaacaatacctaacccaaaaacagtaactatcactcaccaagtcaatgtccgggcctaacattttccttgccttttcttcattcctcacctatacaaatataaacaccaatcaaagaaaacataagcagctctacttcaaatcaaagattatcaaaatcaccacatataaggtaacttgctaattatcaccaaaaggaagaaagagtttaccaagactcgaaccggcacacccttctttcgcaagttgtcaactactcttctaccaacaccaccagtagctccagctactaacacaatgccagaactttccatttgaattggagtagtaggtgatgggctggatagtttctcgattagaaattcaaagaactaaacacattaataaatgaatcgttgttagttgaagcattagagagatttcatggttacctaaaagaggatttgacagagaaactttttcccaccttagcaggagatggaggcccgttaaagaaatatattgttttgaagaatctaccaaaatcccaattttgcttttgtgcttctgaggtaattatcaaccctctataaaacctagaagagacacaacctgaattttgtttgtgaagatatgagtttgttctatgactaagttgaagaaatgaattaacaagtggcaaggacatggagtgatttctacaaacatgtgatgaagaaccctgcaatgacaattgattattcaaaacacataattagattcatttcataatacccacatcccaaagctgatgatcttctaacccaaaacaaaatatagccaattggcttatctttagcatcataaaagttatatactcaacacaatcatatgctactttattgttcttcattaactaatgtttcgaataataataacaattgaaaagtacataacataaattaagaaaacaaaagtaacaatgaaaagataaacaatttcttgttcacctgaagattgaggatggaagaagataaagaacaaggaagcttaactgaagagcaatccattattattattattattattattattattacatagggaatgataaaatgaaaatggtgagagaggttacgtaagtattagttacttttgttgtctaatctaatatctatattgctgaatactgatatttagtacaaagttaatttagaccacacaaataccaacccaactgtatgcacagtattctccctacaacactataaataaaccagtaaaattaatcttataaagccatctcatttaatttttttttttttgtcatattcttaaaatatatatattaaataaaaataaaatatattttaaatattaagataaaaaaatatatcatataaaaattaaaaatatatatatataaaaaaaaattaaaataattatcaaaattaacataaaaaggaattgttttttgatattaggatttgtaaatttgtgatgtacaacaaataaatttccgcatacacatgagtttgctaacccgtcagtaaaagcatatttacattgaggttattaatttatcaatgttattttgtattagtattgttgggacgttagacactatttgttaagtttgagataatttatttttaggtacttttccaacaaaatttcatacaataaatatattgtctatttttatatattcataattgttcttatttttaattaatgttaaacttagttgaacacccaacaataatttatatggtaaattaatggtggtggtgatgatttatatgtaagggtattcgcggtacgagtggtgtggtttttgactattttttcaaaccagcccatatatgcggtttttttttttaattttccaaactgcacccgcactgcaaaattataaacctcaccgcaaaaaatagtgcggtgtggtgtggtttttgcgatttctgcggtttggactattaccaaataaccaaattattacaaatacaataaaccttgagcaacacttgtcaaaaatactataagacttgacaataaatatgaaaaaaaaaataagtttcaacaatacaataatta

SEQ ID NO: 18213 - DNA, 5274 bp, Cannabis sativa
  modified_base (2735)..(2742): a, c, t, g, unknown or other
  modified_base (4695)..(4712): a, c, t, g, unknown or other
aaaaatgtaaagtttgccatgtcccagtatttttgaaaacatttggtaaaaaacagtatttttgtaagtttccctttaaatataccaataaaaaatggcatatgtataatgacttgaaacttaatggacatgtacctctagaagttctaaaaatatatcttaagtattattaccgttaaataaaatttttatctacaactaagagttaatttaaatatttacgtcgcaaattactcttttttttaaggcatgtagatatatgttttatggattgtagattaagtattgtgcttgatttttttttttttaggaaaaaggttgacaaagccaccctaaacaagataacattcaactaaaggtcaaaatacaagcagaaaaccgcaaacagaaagcaataaactgacaatccagtattacaaacccactccacatagtcatcaagaacactcggttcaatcctcaccagagacactaaaccaaaagtgttattacaaaaggctcaatttgcaacgttatgcgccatgaaattacaccgtctagatatatgaatcactccccactccctaacctgcctccacagagtgaggaatcgatccctagccacagtgagattgaagtcgactatcacttccttactggtgttgaaagcattagagaccccagaattatcacattggaaaagcactaattcatggtgagtttcaatagtaagctccgccgccagacaaacaacatgagcttccttattgtgcttgagttgacgttacataaaagtcttgattttccaatataaatacgggaatatgcttatttactaccttgtcttttctttgaaaacacatttggtacttattttcagtaatatttattaggtatcttatattttgaaattgtacatcctaaaatagaatttaatcaatataattttattagttttaccaaacgattctcaattatatgtaattaaataattaaatttgaatccaaaatttataaaattgaagacaatttgattatattaataaaattttatcaaaaaattttgagtttaggatactaaatatgtatgctttagataaaacataaggtactaaatatgtatacaccctataaatattatagttatttgctaacacagtagaaagagtcacaaacctcactgcatcccgaaaatcagaaaccttatatttatgccatttttatcgacaactatctaaacagattttctaatttgcagtatatttgggtttgatggcaactatatgtcacaaacctcactccaattactaatttctagttatactaaggtattgagaaaatattttacactagtactcaacttttgacacatcccaaccagccaaatgttttagctctttattttggtgtcaaaaagagatggacatataattacttcttcctataacgaagtgatgccaaatgccaattggatggaagtgtgtgcactagtttggtattcttgaggaatttcttttctacacaacaatcctttcagaaattgccatttgctcacataaactattattgaaacgaaaattcaataccatttgtttgaaattaaatttctttcaagtttgccaactggcttatctcattctacaaaatcatcatatatttttctttttacaaaaaattgtatgtggggtttactgtgtcatcttctaccaaggctttaagtccttaacaggccctgcagtccaattcaaaagcttctgatcaggcttcaagtaggcagtcttgggatgaggcagcttcctggcgagtccattcagaatctgatgaaatgcatcgccaggctgcgcgcgttgggggaagatcatagcccttttcatgaatggattggctaacaacctttgtttccttaaaatcacttctggtggaattgatgtgagcatggtatccagctttgacacatcttcttctgccacgaacactcctatttcttcccatggaattgcgtcggcaaagggcaatactatttcgtcggctataatcactgggatgcatccgaacaccactgcctccaccagcctcggactccatggtgcccatcctagtgggcacaaacagaacactgatcgttgcatgtcttcgtagtatgtggttgggtgatctgttgagatgtcgaacaaagggttattcttaaaattctcccacaccgctgctcttgctcccctgtcacaatcaacattgctttattaatttgaaaaacaaaaaacaaaaacatgataaatggaggtaaattttggtggatgtcacagcaaaaattgattaataattattttttttaattacaaaaacatgtaaagtgaactggttaaaggataaaagatttttattttctactactttctactaataaataattaaatatgctttaacaataattcacttgttattcattaataagacaaattattgaaaatcacatctcatatatttaatagattaacaaatagaatattttagttgaattgctctttttctttgagacatgacatataaaaatgtagcattaaattagactggttgataacgatataatgctgtgttggacaccactcttgctcttcaagctattctcataaaaatagtgataacaaattaaattactatgtaaaaaaaaaacattatgtggaatacactaataatatatgtcaagtcattacctcatttttttcatataataatatacatacataaatatatatatnnnnnnnnatatatatatatttatataaacacgagtaatgataaacttgacatatatatttatgtggtaaattttaacaagtgaggccctttatttttttattaaaatattttctcataaaaatacggataagaaattaaggacactcttagaagagtggagacatagaacatggggacatataagattttaattttgtagcctattagtcaagattgaaaagcaaggaaacaaaaaaaaaaaagttaggttgttgggtgcataaatatatgtatacatacgtacctagcatagtaacctccttcagggtcgttgttaacatcatagaacaaaccacggaaatagacaaagatggagcgtggagtgtctggtgggatcaaatgggcttgcatcttttgaggtggagcatatggaggaatggtaatggaaccttctttcaaacacacatggttcctttgcccgaatgtttgaaccaaagtagctcgcttcagtaatggaagtattcctcgttcaatcgctttctcttcctacaaattaattatataattggttttacaacattttagagtgtctatattaccgtaatctggctatgattttgttaattattattattacctgataatgaaagcaagctccaaaatcatggggaacgacaaagaagtgatcagctccttctgttcgattccaataaggccaatttgaagagatgagttgaactgcacttctcatcatccgtggagccttaaatggtaaaggtaagccagtaggtgtaaggtcacaagtggtgtaaataggagtatagaaccagtcagcttcgtttggattcattgtcctaactgggctagacagaagaaacctgtgcatgaaaatctcagcagcaaacatatggttcagacatctttggtccttttgaagaatcttcttgttgtatttgcttggtaattcatacacatatactttcaactttccaattggattatcttccaacacatcaccagcacttcctgcatgtatatatatatactacaatattattcttccattttgtactttataataaattacactactttataataaatagtaatatgtacttacctgaaattctctcggtacgaagaccctgatcatcattatcggcagagatggtccaaacaaagccagaaatcagtagaggaagtaaaacccttaggcaattcctcatagctaccgatcaatggaggctaaaatcaaagaaaaaaaaaataatggggtgtttgagagagtggagatatataaagatatataatattttgtaagaaaacggttggaacgtcgtgaggtggactggtggtagttaagattatttattttttcttaagtaagactaaatatatgtaaaaggtttgaaacttatacatgcaaattaatggaagagttgacgagggaggagtagttggggagccaaaatagataacttgaaagaaatgttgtgtcgtcgaatcgaagttgaaagcgttgtgttaatagctgggattggaagaagaaaaaacagtgtttaattggggagcctagctagtgagctcttgctatatggactagatgagaagtaatctagtaatatatattttttgttttattttatttaggtggctttcattttcgtcaccctatatttcttcatgagttaccaactttattttatatatacacagttttgaaagtttggtagcttttttgtattttattactttccttcccttacactatgaaatttctcaaggtatgaatcagtttatgttttctatacaaactcacctctcctgagtgggtgagctgtagacatatcattatcttcgagaaagacatataaccatatcattatttcatcacactttcatttattgctttcttacaaaattgaacctgttattatacatgttatcaatatttgatctcttattattattattattatnnnnnnnnnnnnnnnnnntattattattattatacatatatgaaatgaaacaattatataaatagaaaaagaaattgagtcattttgtttttgtttttcctttatcgatcgatgcccatttttggtagactagtgaatctggaaattactttgcttgcttagttaaataattacaacgttttaataataagtctaaattattacatttgtttgacatgtatatagacttaatatataattcttaaatagtagttggaatgaggtttgtgaaatggacatgttgtcaaactcagatatataattgctgcaaattagctttcatgggaatatataacgtttcttgaagtaactagtgtagtgtgttataattataatatataataaaaacttccattattttttccatttctatttcttagtttcactctacaaaaacttctcaactaccatatgaaaacttcaacttctatttcctattttcaatattttattaaggaaaaatgaaattaaagttgcatttagttgggaggaataaaaacataaaaataaaaatataaatgaaaatagaaatagaaataga

SEQ ID NO: 18214 - DNA, 2515 bp, Cannabis sativa
ataaccatatatatcaaaaaattaaaagtaatgctagagaaacacaaaatttttacaatgatatgtatttaatttgtacggtattgtgccacgttatttttaattgtgtgaataaacaattaattactaattacttgtgtaaatagtatgtaaatgcaacctacacaaattacatccctaagtatatttgaaaagattatagcaatagcacttcgtactattgtaacttgtcctaattaactggaaatataaatattatagagagagagaggtcttccaagttataaccttgaagttcccaagaggcttccaaggccactcggaaaggatcccaggattagaagccataatgcaagcactatataaagtaataagatatatagtcttctttaatactatcttttacgtttcttattctatttgatgaaaccaacatgtgacgttcttgctcccacgccagtgccttatatagagaatttcaagagtgccatttcattactttgacgcgcgtggcaacaaccaaccctctcacaatatcttttcacaccacttttttacagagtaatgttattctgttcattttagggccgttgagtaagtaactattttattgtactagttgaagagaagtttactagtgagatagtcacgtattttgtcgtatttagtaagtacttaattcaaattcagaaagagtcacgcgcatgtgatataaatttattgtatctctaaatttgggctggattttttgacaccgcacaaaatcggcacgagtttgggtggcacgagcacgactaggcacaaaaaaatataaatttaggtacgacacagcatgaaaaatatgggcttaagtacgatacgtcacgacatgcacgaatcacacggcaagtaagcacgaatagattagcccaaaagacatgatacttgacaagcccaaaaagcacaagacacaataaaaaatcctataataataattgttattcgcattttttagtgtgtgacatgtggcatatacaaggagagattaacctcatactctcgctaattaaaattttccattgcaatcctatcatggagaagtctcacggaactgggaacaagttaagactactcgatcagcgaaagtctgcccaaccttatccaggcttctcgaacttggaagacatattgtctctcccggacctggagtggtccaaatcactacaagaaatattacttttgccagcgcaattcactaatgcactggttaaaatttacttttaccagcgcatctcgtgaactgtgctggcaagtttaccagcacatatttgcgctggcataacatatttttactagcgcaacttatatttgcgttggcataacaagctgtgtaaaacccttccctttaatactttttaccagcacaaaattgcattggtaaaagttacttttgccagtgtaattacttttagcagcacaaaattgcattggtagtgttatgcgctggcaaaaattacttttaccaacgcatcgacaaactatgctggtaaaaatatcataattttatataaataatttttttttcaattttataataatttataattattagtattataagaataaataacattctaattttcacataatattaacaaaataaaataattttagaatatttattaaaatttattaaactaaatattataacttatattttaatgggaaactttaaaaatatattcatcaaaaaatataatttttaattattaaaaattttatcaatattataatgtgctggcaaataatttttttatcaactttcttgtaatttataccaacgcttttcaccaatattggtggtaaaagtatttttttagaaaaagctagcgctggcaaaatattgtcatcaaattatgtagttcactttcactctctattacagaaaatgtgtcactttccttctctagccctgacatccttctttctccggctccgacatcgtgcatccttccttctccggccccgacttccctccttctccagcaatgtctgtcttcagatttgtaagtatatttacattattttttgtttttgtttgtgcaatcttcagatttgtaatccctgaggttttttagtcttcatctctaacttcaagcaccttactagctgcccaccaccgacaccccaagtccagatctaacccctgagattttctttcttcctcctatctagagtccgatcaaatctagatgaagtaatactgtcaaagatattttttccttagagtcttcatacaaatgagctttaagtggtactcctcttcaaaaccgtgttggtgaactttactctttggtaagtttactttatgcttacaaatgttaataatgcttagtgacgttccttttttctcacttatatagttgtttatatgaacagttctgctttctacaaattgtttcataagtaactcaccctcaacttatgatttgaatgaatttaatcgaagtagattattaaaaaattacttgcaaca

SEQ ID NO: 18215 - DNA, 5816 bp, Cannabis sativa
ttcaacgcgtgagatatcccccgtttaagcattttgaggccccacgtttctcatctctctctttctctctccagcgagttaagtttgagttgagtttggcttagaaatcactcgaactctccgaaactcccacacacattcacaagaagaacccaccattaacccaaatattctctctcacaattttcgccaacaccaaggattatttccagtgagttcgattcatctcccgccttcctctctccctctctctctctcaaattaatatatatctttggtttgaggtctgtgaaacccttgcttttttttctctttacaaaaatggagattctttctctctggtaatcgccatttgggttcatttgatctctttgtaatactgtttggtttccgagaatttcaagggtaaaaaattcagaaaataaaaaataaggtttttttttttatcatttcgaatttattcccacacttttctctctctctattttaaatttttatttaattgcttatcatttcgaatttaggtatcgattaaagtgagttctcaagtttgctctttttttcgctggtgaaacttcctccatttctgaatttgaagctttttcaggatttactttatctctttctacccatctctcctttttttttttaataattaaaatttaatggatcattggttgcttaggatggccaaggccatgtgcgtagcctcacttgtaattataatattaaattaataactatctgtcttgttgcgtgattcctttcatttcccttttttatttttctttctcagattctatatatctctatgtgtttgtatatataagcaagtcttatcccatatccaattcttgtggatttcatttcagatgcactttgctttctccaactaacttatttctggatccagattcgctcaaattacgaggtacaggttaggaatttcggttctaattttcgaattctgaaattaggatctatcgcaattttcttaatttttccagaaatgtgttgtttatggatatgaattacgtgatttggtattggctgatttttccctgacttgtcaatgtttctcttttgacaatttctttagcaagtgcaaggacttctttgatttactgaattgggatttttagttctctgataattcagttgatgatctcataaaatcttaggaataaaggtcaaaccttttctatagtgcaattctaattgatttaggatataaaggaagaatttttttgtaaatttagggtcttcctgtaaactgtaaaaggaactggtttttgggtcaaagtgtaactgaaagaaggcatttacggatgattgtaaaaatggtggatgtagaagcaaagagggacaaagaaatgcttcagatgcctcatcctggtacttggatctttatacttaaaagtcaaagtatgtagcctatggacatgagtctttttttctattttttttttcttctccaagttgtagtcttttataaaaatatacggcgtgtttcaaaaaactgtaattttgtgagaatttcattagctttggtttatggatattatggatttaaagagatcaggatatgattgctgtgaatttttaaacagttgtggttgattacatagatggatctgctgttattcatggcagatttgtctgttttattttaaaattcagttttggataagactgttggttgtgcatactggaaacttatccttctccggacagttgatgctgattcagtctcattccttttcttcttcccttagaatcttttgagatagatatgtcacctttgtaagttaaattgaaaatttactcatttagcccattgtacttctgttcttttggtttgttggtcagaatattttttttaatgtgaggttcattgttaaaacacattcaaagtcttatacaatgtatttatttattgcatttctctttggactcatttcaattttttgccttttgtccaggtattagtttgtgagtaggttttttttactcccgttaatctttgctaattaagaagttctctagtagagttaagaagcctagcagaacagttgccacctaatttgagtcaataggccacaacccttgtatcatttttcttctattcgtcgaccaaggttgcttatatttttttatggtgatgggaacaacatacttatgggattgtttcaatgggcttaagttatttccatatctcttcagctatatgaaggcgtatgctctggagttattgtcaggtaaaagcatgggagggatgttttttctttttcctttcacttaggactaagaagttcgtctataagaattcaacttgttaatttaatggatttgtatccatatacatatttctattagatagaaatttttggaggtttatgtgcatttcatcttgtaatgttgcttcattgtgaatttctgaattgatttgataaaattttattgctttttcttctagaattgtgtattaatggtatgttttccttttaatgcattagtatatagcaaattaggaatgcagctcaaacttcacacaaataatttggaatattttcttacggtcttcttatgtgtctggtttggtttttgtagcagtggaaattggaggatattagaaactagatagttgcataagctctctaagttaaatatgtttaagccattagtgaggactctcaactaatttgggaggtcattcatggacatgtgaccgttgaaaatgttttaggcttctcatctattgtcttgagaggcagttttcttgacttaaacccttcattattatgcatttacaatttcacagtaacattctttccaaaaaaaaaatcacagcaacaatggtgatagaatgatagtcaactaacaatttttgaaatttgtctcttgtttccacaatttgaatacctttttcctttgtgtgtatgtgtacatgggtggtcactctcccccacttttcttaattttaaatgcctcctttttgtttgtatgtgtgcatggtggtggttattctacatgcttagtgcaatctctctctctctgctcttttgaaaatgtgtgttctatattttttttttttgaagaaagtatctgtattttatcttcctctattaaatttgatcaatttggtactcccaagtattttttttctcgtgtgtatatctgattgcttataatttgttgactttatgcctattcatgcaactttatcctgtgttactgatgcactccacattattgtttcaagtttaggttgtaaatggcaaaaggcagcaggggacgtcagaggatcagttcacggcaattcagatcagctccctaccatctgcgctttgatcaggatatcatggaggatttccccgccaagaattgttccaaaattgtagagaaaaaagattgggaagatgtaacatgctctgtatgcatggagtttcctcacaatgctgtccttctcctctgctcttctcatgacaagggttgccgaccttacatgtgtgggactagctgccgatattctaactgtcttgaccaatacaagaaagcttacactaaagttatatctagtggacgaagtattcatggctcagttgataatcctattgtaatacaggattctagcccgggtattgagaacagtgaaatcacagagctggcatgccccctttgcaggggccaagtgaagggatggactgtggttgaacctgcacgagaatatttaaatgccaaacagagaagctgtatgcaggatgattgctcattcctcgggaactacaaggagctgagaaggcatgtcagagcagagcacccttctgcacgaccacgtgaagtggatcctgctctggagcagaaatggagaagacttgagcgggagcgggaacggaatgatgtgatgagcaccataacatcaaccatgccaggggcaatgtttttcggggactatgtaattgaaggaaacaattatggatttgattcagatgaagagggtggtgtagatgcaggggctgcagaaaggaacgagggttatgagatgggttttgacagtaatcttgtgaatgtctttcttttactgcacgcattcgggccgtcaggcggagatgaattcaatagaaggatgcctcagcctcgattgcccttccacgagacagcaaatggtaatgctgttggcattcggcatacgacccctgtaggtggcgcagaatcctctgatcaagatgatgataatgatgacagtaacgatgaaggtggtggcggtggcggcggtgatatgtcgttggccaaccgccttcgacgacaaggtagggtgttattgggacgctctggtaggagacgtagacgaagatacataaatggtggcctaagatgataccaagaaaaaaaattggtaaaaggtgggaggaatggggaaaactttggtaggtacataattttagttgacacataaaagaagaataaactaaaaaggatttaatttctcacatcatgaggggttggttctcattggaattgctggggagaagagaaactaaggatatatgggctgattaattttccctctgtttatgtatgatacatttttttttctactgtttaatttttcctgttgaccttgcatcatcctcctgttaaaatgatttagcagatctgtgtattaaatttacctctgtaatcgtatattttatttactttcacctcacagtgaatgtgagaatcattggataatcatccatgtgcaattgtgttattcttactttattttcctgtattatgcacagggaattctatgtatcattcatgccttgtttgaatgaaagattcatagacttgcttttaacattttgtaattcaaataagattgatgccaattatcttacaaatttaacatttgtatgcatgccgtaaaagtaatttatatgtttttaaggcctaacattgcgttggcgaacgtgcatcatctttctgagattttgataacttaaaattgagctaaggattaaaaaagaaaatgtcaaatgtgtatgttgatagagtagttctcactcatatttttcatattttaaaagcactacccagattgtgctaaaattgctcaaaaaatatgcatgtcagggggtgtttttactcaaacttggttgagtgctgtgcaatatcataatttagtaacttgtaagttttttttcttttataattatttctttcttttaaaaggataagttttttttattattaatatgcaaaattgcattataagttactacaatgaaatgaatgaccatttaaaaaaatatatacagtacagaaaagaaaaagaactctgtcgagtactttgcttgataaattattgcgaaattttgtacttctaatttcaaacacgttaaaatctacaaatgaaaaagactaaagtccgttcatcgtgctaagtagcaacactggccattcctcaacaatgctccatttgtttacaattaaacagacgaacagaagctaagcaaaagacagaaaatataattcgatgtattatattatattatattatatattatagttgttttttacatttacatacaattagagaatgaatattccaacccttgagaaaaatgggtcaacattttcatgatggtatagagccaattaagggctctcagggctaacaatcgcaagccaatttctaccaaggtacaaagttagatggtgccaggtgtttcctatgctaattatagtcgagactctcctgaattttcaatttgcaatttaattttgataaactatatcggtgaggagcctagaaaataaaaatccta

SEQ ID NO: 18216 - DNA, 3501 bp, Cannabis sativa
ttcaataatttagtaaatgtcaaagtttaggcggtaaaaatcctaattagcctcttaaatatgtaagattaagtgaactcaaaaaaaaaagaaaacgatgtatctttttgtggaacattatgacttggcttagagaccagtttttcacaagcagagttcagaggatttaaattttaaggattgtgttgtgtttagggaaggttaaactcagatgtatattgcgccagtgatatttacatgcatttcaaaagccatagttagttgtaaggccccaggtttgggtaaataaggttcgtgcgaggttggtcattagtagtaatatgaaacaacaacagtcttttctaattctcaatggcaattggggtcagactttcttgctttgctttttcttccataattggttcacttcattatgtgatacattaaatgattctaaagttaatacaattattctttctttcttttttttttttttttaaaaaaaaaacaattagatggtgttatggaatggagaacttctcaataaagaatgacgtcttttacaatgatatatcataccattaccatacacatcatgtagtaaattctcaaggataacgtcgtcagttttcctaaaatgagtttagaatgactcgtaagctaatctcagatatgggaaacaaaacagaaatactcttatttttggtattttttttttccattaaaattgaagtgagtgaatctcttcctctctagttggctgccttgggaatgtcaaggttctcgaagatggggctgtccactccaactcccatcgcattcaaaccattgtcaacgtacacaactgcaccagtaatggccgaggccagtggcgatgcaaggaaagcagccgcattacccacctcctctgttccatttgtgtttcaagatcaatacaaacttggattgaaatgaaaaatatgcttgaatatgtcagctaatagcttagcttggcttagagtttatgtgactcaccagcagagagttctttctgtagtggtgcatttgcagatgagtagtcaatcatcatgtcaatgaaaccaattgcttttgcagcacgacttcttaacggacctgaaattattagagtaatttctaataacatatgctatacgagttccaagatcacaaaacagaaaaactagccttgtttttcagggatgaatttagaaaggaaaataataaattagtagatggcacatttttctaaaatgaaagaagctaactgcagtacctgcagatattgtgttgactctgattttatgtttccttccagcttcaaaagccagaacctgaaccgaaggcaaaagtgcagtaagtgagatgttacataatgggcaacatacgttggggaatgttttatcagaatttggaacattcaaatatggccaatcaggaacaaataaaacgaactactactcactcgagtatcgctctccaaggcagcttttgcagaactcattcctccaccatatctggcatatgcattataaagatttatatgtaatgtgcaaaacactggattggcatggtttataattgaacggaaacataccctggaatgatcttttctgaggcaatgtatgttagagaaattgaagcaccacctgcaaattcaacactagagcttagattacaggttttcttgcaacagttactgtctcataaactaagggtccttgagacaggaggccagaaaagtgaaggcataaagaattagaaatatgcctgggttcatgattggaacaaaatggctgagtagagaaataaatgagtaacttgatgcagagattgctgcaagatatccattccttgaggtctctagaaggggtttgctaacctggggatgatattttattattaagtgccatgaggaccattgaaacatcatcaacatgaaaagctttgtacctctggtccattggcaagtgaatggacaaggatgtcaatactgccgaagtcctgcttcacgcattcaacaacttcctggaaagaggaaaaacgagagttaatactactagaaccatgctgaatagtcctttacccgaacataaaaatatagaggatctaatgagtgaatttaaaaagctattttgacatattccatatcaaagtttctagatccacaaccattttacgaaagtatttaagatagtcgcttctttcaagttcagatatatatttcagaaaagatggatacctgaactgtccattttgaagatcctgaatagcgtttgtttgtctttatctgtacagagccgaaattacagatatcactagttgtttcaaattatatatacacaaaaagctttaacaatcactgtagttatgattttctatttagtatattagaaaagattgagcatacatacatcctcaggaacagactccatatcatcaaaaactgcatccaatggataaactttggtaatttccatcaatgaaccatctggcaacctgaaaaacccaaagatttagataagcagatgtggaggatttaaaacaagttggacaaatctctactgatcattatattttccttacttgcgagattcatcaaatttcccacgccttaaactggattcgaaaatgttcagcgcctaaacaggaattgatatatattaaaactacaattttttcacacaatcatacataatgagctcaggttaatttacttactggcacccatgtaccaacaagaatttcagcaccagcagcagcaagagattttgctatcgcccaaccatacccattatcatcagccacaccagcaataaacgctctcttacctataaagagcagtcccaaatttagtaacatgccaaataattgtaacaaaggctaagtccaagattcatggtttcaacaaatgagaaaacacacacccaaaataaaggtaaagagcaaccaagaacagaacaaaacaagctactgaatgaatacaagtatttgaatgctcaagtataaaagaagacacttgacctctcaaatcaattggtagtcctggcaagggagtgttctcaaccgctccagacattgctcttgtaacaacattttcgaaattcttagactgagtagaagttaagctagggaagagtgactgccttgatgagatgtgagaagagcttgttagccttttcaacattggagacttaagctcagtactgaaatttgcagtagtgggcataaattttctaggagaagaatttatgcagggtttcactgatacgatatgcataccatgagtcgcagttgaggccattttggatgaaactaaaccaccaaaaaccaaaacaattatttagaacattggtaacacacttgcaattgcataatcaataggccaaaacccaaattttaaaacgttaaagttcaatgatatatctgcaattcaaattcattactcaggagatggtaagtcaatttcaatgaaacaaaagtaaagtgtatcgataggcgttgaaaccaaagaatagagtcaaa

SEQ ID NO: 18217 - DNA, 3759 bp, Cannabis sativa
cggtttgagaaattagaaaaaccgcatgtgtgggttggtttaaaaaaatagtcaaaaaccgtaccacccgcaccgcgaacatccctatgttttatgtttttcttacatagtctatcgactcacagatatgtttttatgtgtaggtaaaagtaaggctaagactgagtaacagtgagtgatgaacttggtgaagattgtacatatcgagacaattaaatctagaggattatgatcttcggaataacatgcttagttttggttgtcgctaagtgatacttttgatttatgtatgttaagaatatttttgaaaaataacttttgtgaccctaggtttataatattttataattatgtcataaagttttgtaaaatttaatttattattaaaattttatttaaatacacttattttaaaattctttgattagtaaatgttagcatagtaatttaaattactatagtatgcttaaactagtaaagacttacactttacttatttcgctaataatttttcttttattcttcttttttttttaaaaaaaaaaaacataaaatatttgtctgacaaacatctatatttatttatttattcttttttttttttaaaaaaaaagaagcagctagaaaatctttatttatttattatttaggtgatatactattaattctctcaattatatatgcactagcctatatataatgaaattgatacgctggtccacaacatattttttgttcaattattacgtatataagatcatgtccaataaatataaataaatgatacaaaattaaaatatagtatacttaaaaaaatattatattttagtggtgtgtcaaaaggtaatataattataatacatatttactatgccaaatttaacataacattcattataatataaaatttgtatcaataaaaatacacaatttcattattaactttgatgtcacttttattattttactgatatatttagctataatattaataattaattgtttataatttatattattttacatagtataaaaataatattgttaatgataaatttattatttttttataatcttaataaaaatattattgcatcaagttttgtaatgtgataaattaaaaaatatctctttttatattaattaatcaagaatatttttatattatattttattaaattatactcatttttataagtagattgcataatatactcatactttttacttaaatttaccatataatttatattaatttaaagagtttaataaggacattatttataaaaaagtatatttaaaagaatacgaaaaataaaagttaaaacaaataaaataaagtggatatacaatataattttttttttataattatatatttgagcaatgtaaatatatataaaatatcttttttgtcagatataacatattttttacattttacatttacattagatatcatcttcttatatttatatatatatatatatatatatatatgattgagtagtgaatagtgaatactgatggaggactaccatttaattgggttcagctttcccaacctccccgtccacagtggcattttttttttggagagagttaggtgacctgccaactaaaatgcattggggaggattatattttaccacgatgtttggtacaatcaaagaaaagaaaagaaaaattatatgaaaaaaaaaaactgtaaaatttaaatacacataattaattactcaaaaatatgtacagtaaaatgtaaaattggagtggaaaatgatagcaggaatagaggtggactcccaagccaggcacgattattgatattagacactaataatatttagtattttttataattggagatttataattagttagtgatattctttaaaaattatttctgatacttaattataccaataacagtatgataccgagaaaagaattaggtaccaatgatatcttttagcaattcttaaaagaaatccatgtacctagcaatcttatgaagtgtaatattgttgttggtacaattaaatatcaaatcttaatcccataataaagttttagtaattgaataaatgttatgtgtgattttaataaaaagaatataaaaggccaccacttattctaatttaataaaatttataaaaagtcactaattaattatagagcttcatctcatagcagtagtggaactcagcattttagtttttcataaaaatagtagatagcgacaacaagtttttttaagagaaatactaaaggacaatatgattcctacacctttgtataatttaatatcaaatctcatttattttattttaataaaaattataaaaatttagcatattaggttgcgtcccataatgctgcccggtccattttggaatgggaagtagcaccctttattgctactacaaattgatattttcttctttctggttttgttttctatgatgttttggttttcatgaaaagagaaaaagaatcccaagtggggttggaaaaattaggggtgagaacatgaatctcaaattaattatagatatagataaggaagataaagataatttatgattataaataccgaagctctctctattagttctctctttgtgtataccgggactttttatttgtttgattttgttttttgttattttttgggtaagaagagagcaaaataaatttcgatacaatacacagacacaatacaaattttatgggttagaatcagaaaaatttactgcaggtcgaaaacaaatcgacataacttgacacgaaataaaaattgatcaaacacgacacgattcgtttaacacgaatatgacacatttgacgcaattttttaaataaaatataattatgtaaattatatgtttagtgattcaatattaaattaaaaaatttaaatttattatttttaaaaaaagaaattaaaaatattttttattatatctacacaaatgtctataaattttttaatggaacttaaatttatcatttttctaccacttcagtttagtaatagcaaaacacgttatagtgggtcaacaagaatatgatacgattttttacaggttggattaggattgagaaaattaaacacgattcaaaaatgggtcaacatgcctaacacgaatgtagaagatcagatcacataaattatgacaaaaatacgacacgatgatacgttttgccacccctaagtaaaaggatttctttgtttgtatttttgtcagactcttttaatacactgatatgagattatatttcttatttttttcctctttattttttagtacattttctctgtttattttgataccctaagatttatttttttattatttttctctatcttgttggattattaattcctttaatatggacttttaatataggctcatatatatatatatacacacatatatatataaaagtgtgtattgctatctaaagtttgatctaaataaagtgatcattttagtaattgtggatcatcggttattaaagtattatgagctaaatgtgtagataccataagtgacatattagatatgaaattatctataatttttgcacgagggattaaaaaaatttaaagaaattgagttattatcactatggtttgttttataaatagtttaatttattataggctaattaggatttttattcccacgaactttgacatgtaccaaatcatgcctcctggatttttttggccgttgaaaattccccatgaactat

SEQ ID NO: 18218 - DNA, 5222 bp, Cannabis sativa
  modified_base (1991)..(1996): a, c, t, g, unknown or other
ttttgtctttccttttttgtttattttttcatactaagataaaaatgtaaattttggatctaaaaagcctattaaggaaaatatccctttttttttgcatagaattccatttggccaaatgagagaaaatcgtaagggcacacaccacacaaacccattgtccccccaatcaattctcccaacttactcttcaagcttcctcaacaacataaagacaaagtatcattatttatataaaaacacttccacttaccactttctaaaaagacctttttgtccccaccaaaactccgcctccattaaatgacctgcacaagggccatttcgtaatttcaggggtcgagtgtcggttcccagtccccagctccaaaaggggaccggaggagctttaagaactattcccatatcacacgaaacaaaaccctttacacgtgcgacacatttggcgggtacggaaacgcagtcccgaataaaataagaattaaaattaaaaaataaataaaaaaaaagaaaagagtgtgagtgagcgagtgagcaagccaaaaagcccaataccagaccgtacggtcttggtgagtgagggagagagagagagagagagagagagcttaagctccattactactgtaagattattatctcttctgtctctctagttcgcttagctgaaaatctcactcgatcgagctctttaatcctttttcgaagactccacaacatattagagtactgtaggaagttccttctttgttttctgttcgtacagtttcgtttagtgtacagagaagaaaaagaaaaagaaaaacccaaaaaataaagctcatttccatggagttgtacggccggagccccgcgaggaatgggtcgaatcccggacatcagccggagtggactccggatggcggcgaaactgggctggaaggtattattttggttgctctgtgtctgatttttattttccattgttctgtttatgaggtgggttttctagggttatttttttttttttatatttttcttttcaccattattggttttgaaaatgtggggggttttgattagggtttttgatgtgacttgggtttcgttgtttgggggcgaaatttgtagaatcgatgtggcaattggggctgactggcgccggcgatggtggcggcgaatcttacccggagcgtcccggcgtgccgaactgtgtgtattatatgcgaactggttattgtggatatggtaaccggtgtcgctacaaccatccccgtgatcgtgctgcggtaaatccttattgttttattaagtattcaataatgagggtttctttgtttttttgttcgacattactctgctcaatcatttagtaccacaagattgtacctttaaataacttgttttgagtttagtgttcatttacattaagcttgtttttcacgttcttttagttataagtaaacggaaatgaaagtagaatgaatatggggctcaatgttctttgttgtttactgtttttctgtattaagctcagtatgtgtgtttttggctctgtagagtatgggttttattcttatcgacattgaagaatgtacaacttactttgtttgtaatcttatcagttcaaataatgttttgattaatttggtttgctttaatatgtatcttaaggtggcagcagctgtgagagctactggggagtacccagagcgagtgggagaacctatatgtcaggtaaagttggttacatatttttattggtgtcgtgatctttataatgtagattataatttatgtataaataaattatatatttttcttagctttcctctgattttgcatggtcttgttgcataatgttcagtattacttaaaaactgggacctgtaaatttggtgcgtcctgcaagttccaccatccaaaacatggaggtggatctttgagccaagctccactaaatgtttatggatacccattacgaccggtttgatttctctctctctctctcnnnnnntctctctctctctctctcaatcatgaggaatatatatatatatttctttttgatgtacaattttgtataaatttatacttcatcttaacagggtgaggcagagtgctcctactatttgaaaacggggcagtgcaaatttgggttaacttgtaaattccatcatcctcaacctgccggcacctcagtgacggcttctgcacctcaattttatccaccggtgcaatctccttcagttcccatgcctgatcaatttggggggccgtccaccagcttgagggtggctaggcctccgttagtacctggttcatatgttcaagggacttatggtcctgttttatttcctcatggagttgttcctttacctgggtggaatccttactcggtatgaagagacttatctgtcctgcaagaaaaataacagtttcttttttgatagatcacaccaaacatagcatttatcatttgccaaaaccctatcatagaattaatcctatccaattactaatagcattcattgacatatttggtgcaggcacctgtaagcccagtgctatctcctggtgctcagcctactgtaggaggagcttctgtgtatggagtaacacatttaccttcttctacagcttctgttgcaagaccttactcctctttaccttcttctattggcgcctcaagcagtagtccaaaggaacaagcatttccagagaggcctggagaacccgagtgccaatattatttaaaaacaggggactgcaaatttggatcatcatgccgttaccatcatccacgtgatcgagcagtgccaaggacaaattgtctcctcagtccagtcggcctccccttgcgtccggtaggcataatctactcatctgcttatgcaattataagtgttagaacttgtttatttctatcttctgtcttctgtctcgtgtctgtttatttatttgttattgacatttttatattctaataggccttatatcttatgtaaaatataaaacacaggtagggtgcaatatgtctgactgctaaggttatgttacagaactgaaaaaaaatagtagatgaggcatctgcacttctgatgctatgtttgtgttatatattttaaaacacctgctctctccttgaggcatcatatttgcaagcttctatgctgatgatttaatttgtagacggatgttaaagttgatggctacgagcttgacgttgtctcattaatgaacaccgtgttattagtttgttttttccttttttttctccttgcatgtatttaatgtaaaatcttgatatgtagttggcacgttcagttgttagtctactatccgttatttttggagtctctgtctttgtgtttatgtgcctttaatattctgtgctttcatttggggccttattgtattttatttatgttcctaaacaacagggtatgcaaccttgcactttctatttgcaaaatgggcattgcaaattcggtgccacttgtaaatttgatcatccattgggtactatgagatatagtccatcagcttcatctttaattgatatgccagttactccatatccagttgggtcattgctagctactctggctccctcatccacatcatcagagcttcgacctgaactaataccaggatccaagatggaatctttttcagctagaatgccttcttctgggaacacctcaactagttcagttggtttaatattctcacagactgggcctgtttcactttctgatgtgcaactttcaagtcagagttccgtcgctttaagcagtagcagaagcactagacaaggcggtgaggttcgtcgttcaagctaattaaacacaagccattctccattatgctgtaggtggggggatttcacctgcctcgtattatgtatgctgtttatatatgtcggtaaatgtgtagtggtcaactgtgcaaaggtttttacatctcacattcaaggtcaaggtcttattattattattattatctctatcaagctactctgttgtttagtctatataataggatgatgtggattatttatgctcatttcatctatatgcagccaccaatgctatcccaaataagctgcaaaggcagatctctaatgtactgcttctcacttccaagtatttatgataggattcatttatatcaggtaatgcaatgtcttatatagaactcattgtgtaatccaaagaatctctagttagtttgttcatgccttgcctttttctcctattttaagagtggatgttttgttttcttctcgtttgccattctccctgattttattaatatagatttgatagttcattcttactctctttggacttcactttgttactgctcagagtaattgagcagttgagctctttactgtcaagtctgtgatattcaacttatataatctcactttcataattgatggatgatggaaaatattttttttttttgaaaaataaaaggttcaatagttaaaacacacgtgttatttttttttaatattttaattgaaaattacttttcatagttgcaaagagggtaaacaaaaaaagtgttggtggcacacttcacagtagaaatagaaatacatgtgttttgtacttttttttttctaagaacttcgaaagctgtaaataaaaaatatattattaaattgtacagttaccatataagtggaaatgaaatgacagtttttgctaaattctaaaaatgttataaggtaagtttatagtacactttcttttttggtagacttcttatttgttttattatttaggagagattttcagttttttttttttaacgatggcctatattacaattgtgtaccatcacttttaattttttttttttttaatttttgaataatttacagtgttaaaaataaaatttatatatttttgctatatttgcgattattttttattatactcgtggtaagttttacactttatttttagtaatataatctatttagagtattttaaaaatttatacgggtcttagataagtataatgtccgtgaaaaaaaattaattaattttttttaagaaaccaataggaggtcaacgaggaggggtgtacagtgtactgcataaattttgaatgttataatgagaaagtagttggtaagttatgaatatgcaaattattcttaagttaaagtaataccattgagcatgcttatttatttttattatataaatatgatgagaaga

SEQ ID NO: 18219 - DNA, 2260 bp, Cannabis sativa
  modified_base (26)..(40): a, c, t, g, unknown or other
  modified_base (864)..(870): a, c, t, g, unknown or other
  modified_base (2222)..(2231): a, c, t, g, unknown or other
cctgggaaaacttcccaagaggtcannnnnnnnnnnnnnnccccaggccaagcacgcttaactgtggagttcattcgtgatgggctaccgaaaaacaagatatcttcaactatgtagtttcaactatgtagtttcatacctacacagtctcagaatcatcacacttgaccttctccaggcgatgtggtattgcacagcttacccggtgtttttccttaaagatcacagactactgactgtcacaattttaaattattaaactgatgtggaccaacgaaaatttgatatgggtacacaagtatacttattaggctatcagccatccatccatgtaacaaaaaaaaaaagaataacaaaatagtaaatattaaaacattgttaagtgtcacaaattgtataattcaaatagttttgcagcttatatttttaataaaattttattttatactattttttgcaagaaaaaaatatattttatactaatttttaaattataaaagtacttgataattactataatttatgtatataaatttaaagaaaaatagtaagaagtaacatttggttttggagacaattctagataatatttattggttttgcctatgtatacagtataattaattaaaataaatattatttaacagaattttacatatcaaacatgaaaaattaatttatctttttgttctccacttttcttttaaaaaagttttttttactttctttcttcttatactaaaatctaacttccaaacataatcatactgaatagtatattttagtaaaatataaagtatcaaataagtacattctattattagtatttatttatttagggagttattattattattattattnnnnnnnttattattattatttaaaaaaacatggtgccagtcactaacgcactaaaatgagcataatcttccacttttaagtgttttactaattacaattaacaataattttaatgtgaaccaccaacaaaacaaaaaatgatttcatctaaagtggtttttcttttaatttaatttagtggtataattaaagataaatattattaatatttaggctatgggccgcataactacacataaaattattagttattttttatgtttaaagagagaagaatgttaagaataaaaatacaaaattacatgattaaatgtgttgtgttgtgggtcattcttgtttttagtttctaatgaagtttttatttcatccaccgactatttaaataataataaaaaagtagtaaatgacttcaaacaaatgacttttgtaaaattatattaataattcactttttaatgataattaattaacaaaaagttttcacaagtgggaggatagatgcttaattagatttgttgagagtaatgataaaaatggttggctggattttaaaatctgcttttggatttctgaatctttaaaagtatttttgttgtttgtttggataattaataaatttcgagttttagctctaaaaagttcttgtaacataagtaaaagaaggtaaaaatatatgcaaaatttcagccaaacaaagccttaaattatgcaaaattttcacaaataatgatatgcatttaattctagtcatatatattattttaagtaagaacatcacttttaattaaacaattaagattatttttaatatattatgcaattttattgatagaaattagctaaaataataattaacaactcaatcaggacatcttctccattggaagcacaatcatgattcaaattagaaaaacgaaccaaccaattggcctcttgattcctaaatcgtttgacaaaagaaattaaaattaaatcagatgaaaaaaattgtagcatcacaattaaccttaagaacacatatattcaatttcctttaatgctcagaaaacacaacaatataaattgttatagcaggctcattcaacctattaacttaagtactcaactattgtgaaaggtacataactgcaccattaacgactcctttaactgctaaaaacttgttattcttaactactaacagaattttttgatggtgagaaattgaagaacaaagacattcaaaataaaacatgttacatagtcaagactaatcgcactaatctaaacaaaaaaacattcaaaattaggctaattaggatttttctctctcgaactttgacatgtaccaaaattatgctccttgaacttttaaggtnnnnnnnnnnaccccctaactattgagattgttggattt

SEQ ID NO: 18220 - DNA, 5441 bp, Cannabis sativa
  modified_base (895)..(912): a, c, t, g, unknown or other
tttacggtgtgatttttgcggtttgaagatctcatggtgtagttgcggtttgagaaactacaaaaaatatgcggtttggtttgaaaaaagaccacaacccacaccctccaccgcgaacacccctactcccaactgttaaggggatctattgatgtattcgtccacccactgtagagataaacaactttaaatcaagctcgccataattcagattgttcaaaatggtgtttaatttggggggatgcctaatgaaggtccaaacatgcacataactaattttctagagttgtgtgctacattaaaaatgaatgaagtaagttatgatgagtgaagagttagtttatctcactacaaactaactcaatatctactaaggagaacttgctcaaaagtttcttgccaaattctttcctccatccaagggtgctcgtttaagaggagagatcaataatttctatcaattgaatggagaatcactatatgatgcttggaaaatattcaaagacctacacaggaagtgtcctcatcatgacatcaaaaagtgaatgtttgtgcacaattttatataacagtctatgtgataatacaaaaaataaaataattgaggcaataatagctggaggtacatttatgagtaaaagtgggaataaagcccataaattgttagacgagatgaccaggaataagtataattggacatttgaacgagaaaataagaaagtggttggagttctagatgttgatcctattgctatgcttacttcccaaattactttgtaaaactcaatgtccgggcaagcaatgtaattacaagctacacccacttgtaaaatgtttggagaggagctcatccttatacacaatatactgttgccaataataataataataatannnnnnnnnnnnnnnnnnataataataataataatattgatgatactcctttaaagcaaatccaagttattggcaattatccaagacagctgaataataatccttactcaaacacttatactcctatttagagaaatcaccctaatctatcacggaataataatcaagggcaataatcaaaatatctacaatatccacatctttatccaccacatcgaccaacctatgggctttatcctagacaatattatagccctcaaagaccacaaataccacagcagccatcagcacctcttcaagtgaccaaatttaaaccatctcccaacacaatcaactgattcataattgaaacaagatcatctattcgtaagttagaaattcaaatgagtcaaattacaaaaattttgttagaccgaaatcaaaggactttacctagttcaatagtggtaaaccccaaagagaaatatcaagccattactttgaggagtggaaccagttatgaaaggccaacaatgaaagacaaggaaaagaagactaaagatcaacatgtcactagtccagcaaaagaaaatgttgctgaagaccttcctaagaaggagaagcctaagtatgaagagcctacaccaaagcttccatatcctcaaaggcttcataaaaataaacttgataagaaattttccaagctcttagaagtattcaagaagctgcatattaatatttcctttgttgaggtacttgagaaaattcccttttctaattttttttatggagattctatcgaagaaaataaagtgggaggaatatgagacaataataattcttgaggagtgtaacaaaattttgcaaaagaaactacctatcaagctcaaagatctgggtagtttcaatactccatgttctattagagactcggttaaaaacaaaggccttatgtgatttaggggatagtgtgaatataatacccctctctatcttctgaacactaaaattgagagaaactcacccttctactgtttcattacagatggcagatagtttagttaagcatcctcatggagtgattgatgatatcctagtaaaggttggtaaaattaactttcctgttgattttcttattctcaatatggaggatgatgcaaatattctgatcatactagcaagactatttttagctatcggaagagcactaattgatgtacaaaagggagaattgaagtcgcatgtgcaagatgaagaggtaacatttaatgtcttttaagcaatagatattcctacttgttgtagagttgaggtggtgaatgaccatcaaagaataaatttttaaaagaagaagaaaaccaaagaacaattttgtgctgctcgacatcggatgaaaatattgttttgttgggataattaaaataatattctcaacaataaaataatatttatcacatatcatattttagaactcaaggacgcaccaggtggacttgactcgagttgagtttgaagagaagtgagcgtcaagctgaagacgttaaatgaaattctcttgggaagcaacccaattttacttttagcattttttttcaaatttaatttttgttgaacacattttaatttattgtgttttagaaggtgtagttttattttatttacttatataagatgaatcgtgcaatatgtaaaaaaaacacaacgttcgaaatcatggctcttagaggcagagccttggctccgtaaaattaatgaaaaagagaaaaaaatttgtccaaggagcctcaaccccactatggagccatggcacctggaagggatgctaaaaaaaacccattcttttgaggagacaaggttcctcaccttggacccataaactttggccccgtatgaaatctacgagcaacttaaaatatggtccacttcgaatttcttttcaaattttcacatcaaagtgttgccacaaccaaagttttgatatgcttgtcaagagtttcagatatgttttctttcttttatgtttaattaagtcctgttacccaattctgctcaccttggagctataaatttagctccgtataaaatctacaatgtgtttaataagtttgggagagcattcttatttattattatatgtttagttatataatttgtcatatgtattgtgtttttgtgtctagtaattagtaggtggtttggttattgtgagttaagttgtcaattcatgagccgataatacactaatactaagaatgaatatgtagcatgacttgaagaaaattttgattattgttggacctaactattggtaaaattgcattgtgatctaacaaaagtcagtgaagggtgatcgctatcaaattatttctcgttatttgatacgatcttttgtggaaggtcaaaatgacatactatatttttgatgataaagtctagggccttcttggaggtgactgtgttcatcaattctgcttccacccacttggtgaagtaatcaacaacgactatggcgtatttgactcctcctttcccagtcggaagataacctaccaggtcaattcccaaaacatcaaaagcccatggactgttcatgagggtaatttctgttggtggagctcgcgaaaccttggcatagcgccgccattttttacacttttggacatacttgatgcaatatcttttcatatttggacaaaagtatccttgtcaaagaattttcttggacaggcttggtcaacttcatgaatgacaacgccaatctctgttccggctatgcatctcaaatatggattaaacaaccccctgcgataaagtcttccatctagaatgacgtatctggaagcttgatactgaatcttccgggtagcaaacctgtcggccagaagctctccagaactcaaaaactagaagattaggcctatccagaagttctaatgatcaatgacatttacccactgtgtttcaatgcttggggctttcagatgatcaattggcactattccgtactgctctatttctagacctgttgccaattttgctaacatgtccgcaaatgaattctgatccgtcgaaatcttacggatgttatatctcttgaaatgttacaatagttccctagatcgagatacgtaggcaaccattctttcacccattgtccgatactctttgaatatttgatttacgactatttaggagtctctatatacttcaatattatgagcttttatttccttggttaattgcaggccaaatatcatggcttcatgctccacttcattattcgaggtagggaattcaaggcgaataccactctggagttggtgtccctatggagagaccaagatttttcttgctccagcgccctttacatttaaggttccatcaacgtagactttctagaactgtagttcggaaactagctcatccggatcatcattcattttggtgcactcaaccatgaagtctgataaagcctacactttaatggaaactcgaagttgatattgaatgtcaaattggctgagctccatagtccattttaataaccttctgaatgactctggtttatgtaatacttggcggagagggtggtttgttagcaccttaatgacatgggcttaaaagtagggttgcagcttccgcaaggcgattagtaagcaaaaggaaaaattctctatcataggatatctaaactatgcgtccaacaatcttttacttatataatacaccagaagttagaccttttcttcgcgcactaatgcgatacttatagcatgatctgacacgactaagtacagttataacgactctccctcaaccgacttcgaaagaattggggctttggtcaaatgttccttacccatttattgtctgaaatcgggtaggccacaccaacatctaaccactttactacttcctttctcattacctcgttcattggtggattaagtcttcgttgtgcatcgatgctcgacttagctccatcttccattaaaattttgtgcaaaactattgagggactaatttccttgatatcgccaatgtccacccaatggcctttgtatgtgttctaagtactctcaacaatttatcaatctccacattagaaagtgaaactgacactatgactaggaacgaattcatatctcaaatgattaggaagtacaactgaagctctggttgcttctctacagacgagacatgcctccttggaacgacccctaactcttcaaagtattttctattcaatggctcataggagtcaagtcattttgcatattccataacctcactcacatcttgctcatttaaatcctcttcgattaaactcacttccaacgaatcctcaatcaattttttcttctccactattgtgtccacgagatcaacagagaaatagttatcactagcctttggaaaattccttgccttaagaacattaaaaaccacttcttccctttccaccctcagtttcaatttgcccttctgaacatcttccaatgcttagcctattgccaagaatggtctcccaaggatgatgggcatgttgctatcttcttgcatgtcca

SEQ ID NO: 18221 - DNA, 8235 bp, Cannabis sativa
gaactattttctactaattaaattttatgaaatattataaattattttaagaacaattccaagattctagagcaaacatcaatggttgataatttcgtgtaaagtaacctaacaaaacttcaccaatgaactgaggaataaactcaaaaattcaagctcaaattattacaacatgaaaggaagggtgtgatttttgcttttccaatgttttgggccataatattgatttttcatttgggccagagaaaattagattaggttctcttttagtcttcatttcctttgttttgtgccacaaaattaagtttggtctaaaagatgagatctataactcatagttcataaccttacctaaaggagtaatttgtaagcacacattttatttttattatattaataagttattgggatgccaaactttagatctatatatgatgtgatataatgataatatcaattattaatcatttcgaacactctatatttattttgatcacaattcagatattttttctttacaaatatcatatcacacaatccataatttagatatttcttttgagcatagtatgttgatatttgtagatattatttttatataaatatttcatgatgattctagaaaaataatattaattggccatatcgaaaaactaagaagaagggcctattccagtatagttgtgaacttaacttattggctttgaaaaggcctggaagaaagatctttcaagattttttattaattttttttgtttaagtcgagattgtttaaccacaaaattatttaattcacactaatagattttctattacattttatgatgattcttatctctttaatttctgactcacatccactatctatttattataatagatttttagctaattttttttgctccttttttattttattacttttttccacaaaataaaaaacatcacaaataatccactagtctccttgttgcagtttatatcaaatttatactcaaaataactctatttattttgtttgagcttcgtagttcaactccattattatttcttttaaattagttttagattttgaactgagactacttattaagtcttaaaaaaaacaaaagaaacacactaatattaaagatttatgggtaaaagtttataggactaatacaaattttcaaataggattttagttaaaaaaaatacaagaattttttcatttttacactttaaaataatttttttttttgtatttttatggacataaaaatcgtataaaaatcccttttgcaactagtgttgcaaccattttagaaaccaaactgtaaatttgaaaaaaaaaattagaaaaacagtatttaaagtaattctaaaaaaaaatactgttgtggggtgtccctaggttataatttgctcacattgtgacaattcatttgaagtcaagcataaattatagaaaaacttccaagaaatggaccacttaactctcttttcactttttataagtccagtaggcaaaaagtgtcatcaaaatattattgttgttgctgttgctattactgttattattataatttgttgttttgagtaggtccaaaatagttcatactttttaatttttatttcctgaatataatatttcttacttacattaattactattgttcccacccaatgcttatcaaatgggcaattaaaaaactaaaaaaaatccctaaccaagttatatggattagtaatacccacttgaaaacactactaatattatccacaaaattggatcaaattggattttaaaacatcaaaaccaacctagtcacttcaacttatatattttaatcccacaaaaaaatagccattcaagccttcaagcaacaaccatctattgagttaaatattccaattaaaaacattaaaccaagtcactttttcttaattaaaaatcatataattgttactttttttagaaaaaaaaagagaatattttatagtgtaggtgttatctagaaccgtggcgcaccaccctagacaccactttacgccaaaaccgtcgccgattccgaccaaaatttcatcaaaataataatattaagaaattaattattaatttatcctatggtacggcaccaatggtgtcagctcataaacctgtcgttcagataaatatgacacgtgtgaaacattcaatgggtgagccctaagctaagtagctggaccagagcgcaggcggttgtctccacgtggcgaaatgggtaaccttatcatttgacaagtggcgtaaggtggtttggaagagaatggattagaacaaaaggacacgtggcaatagtaaagtaaagtggttctttatgattccgaagagccggttattgttgagtcggcctcgtctcttttgggctcaaaagcccattttgggctttggtgtttggatagcataataactgtggctttatctcatccacgtaggattcaaaaaggtcatccatatatcacttttcacaattaagaaacacaaatattccaagttggcattgctgaatcattaaaaatttatttatacagtatttgtttgggcattggatgttttgtcttctgtaaactttaaatgttccccacgcgcgttttttaacctttttttacaaggtaaaagtacaaatgaaaatgttgaaaatgaaacttgtgaaaaatgttgcttgggctttattaggtatttatttataaaaaatatgataaatttatttcgttttaagccatttgggtttacatctatttttattagttttattcaaatttgaagttattagatagttagtatatattgtttgtgatttatagttaatgagtttaatatatttatgcatttgaaatctagttaaattataaatgtgagtttttatagttaacttaagtttttaataaacagacacaatccaattaagaatatgttgttaagttttctctttagctctatatacaagttgtcttattacaattgtaaatttttgataatcagataaataaaattgtttctaatttaaaaatttaaggagcaacacttagttgagagtattgtaaggtaattattatagattaatcacgtgtgtatgcataattattattgtattatatacaaatttatatcttcaatttattgattttctaacaataagtatattttttaataaaagaaaaaaaaattgtttatccttactataatgcacctacatcctttagctagaattaatagcaaataatataattgtaaaataaataaataaaaaagaataatggcaaattgaaaataacttggtaaccacattacatgggaccctaaacctataacaactccaaagcacatgcatgcatcacacaagccatttagtacgaccttggccatatgtgttttggtgccttcttaagcaaatcacatatctttttttcttttctgattgagaagcttcactgtgaaaaagaagatatacataaagttcacattatgtatgtaataatacccttgctaggctatataacaatgctcaatatagtttgcttataaaaaactaatgaatgataaaacccaagcatgaaatgtgatgcccaaagaaattcacaaagagaatagacaaaaatgtctacacaactcacaataattattatgtttattatctttaaattaaaaaggactctagtcaaggataattgtgtcgtatgtttgtagttctcaattttcatcacaattattatgttctgaatatttttcttattgcaaattagtcctcaactttaattatattggcattaatttaatactcctccaccctcaaaaaaagtttattcagaaacaatttgccaataatgcttattaaatttttggaataataattgaggtttatttttgttttcttttcttttttaggggtgcttatttcttcaaaatgagaaaaatgtcatataatatattattttcgtccaatttattacaaagaaaaaaaaatgtaaaactagaattacttattaaaattgtcaatagtacttttctgtttatttatttattcaaaagagaattctcattctgattgcctcttaaaaataatcgactaaaattatatataataaatcaaaatatttctatttttctttcttttcttttatttttttaaatttgatttttatatgaatattattatcatgcaaataattagaggatctagcatgcgcaaatatgtttgaaaaataatgctgatcaaatataaaactcatcaaaaaccagttaaatataaattacatattagcatctctgcgcacaattataaaaatgtctcaaattttaatttctcaccaaaaataaaaattatataaagctttttttttcttcgttaaattcatttatattctaaaaatattttctccttttaaaaatatattagagagatgattaaagaattgtattcaaatgttaataaagttataaatttgctcaaaacctatagtttttttttttttcgtgagaaacaaaacctaaagttattacttgtttcgttttgtttgccttaatttgaccaatattttagttttgctttttgtggactcaaatagtttatatatgtaggaaaatttacatgacatactaatttttgtcatttttttataaaaatactgtcaggtggtatttttacttttttactgtatttttttataaattttatactacagtatactgtgttaagtttttactgatgttgcaatacttttgtttccaataggcgcacacatgtataattttgtatatactagtacactatatcctttttctccacaaacaaaggaatctagtaatttaaaaattcatgttttgactaccacaaataatggttatgatttatgttgcaccattccacgtctcttccttttgcaaaaaaaaaaaaatagaataaatttattttacgtctttggtctattaatttaagcacgtgtttcgtttaacttaatctccaattctcagacaagaaaaaaaagaaaagaaaaagaaaaaaatgaaagtatttttgacccacttcccagcaaagcgcgtcgcaaacagtagagtcataacatcattgctgagctgtcaattatagatctcgtctgattttatcaaaaataacaaatgaaattaaatgaactatttaagtatatattaaacgtaattaaaaaaataaaaaataaaataaaaaagatctcccctgaaatttggtttcattattctctctcttatcttttgtctataaaagccagagacaaccataaaccaattcatcattactatcgttctccatttccatcgactcaacaaaaccaaaatatcactagctacatctccgccgtccgatcaaatcttcctctctatctattctgtatcacaatgaaaaccagtccaatcgcttacgacctttacgaatacatcacttcaacggagtcggatccgccccgggaattgccggagcccgatgtttatgttctcacatctgacggactacgaatcccggcgcattctagcattctggtacgaaaaatcagattttattttccacaattttttatttatttcttgtgaagaaaagttagtgattttttctttttttcttttcaatgaaattataaaaggcttcggcgtcggctgtatttgagagtataattgaacagccacgtaagaaccgaagctccgaaagagtcattcggatcctcggcgttcctcaagacgccgtcgtttcgtttgttcgctttctctactcgtcgaggtaattactattttaccctcctcgacgccgtatattaatgattttaattaattaattgaagtaatttatttatttatttaacgaaaggaaaattctttacggttgtgttgatttttatacaaaacaaaagaacgttccatgaaacacaaggagttggttggtgttgttggttgtttgagatttttatgttgtgaaatgacgtttataccctttctggtcgtatttcaggtgcgaggaggaacagcttgagctgtatggaattcacttgctggcactgtcgcacgtttacctggttccacagctgaaacagaaatgcgtaaagaacttgggtcaacggttgacttccgagaatgtggtggatgtcctccaacttgccaagctctgcgacgcaccggatctttacctcaagtgcctgaaactcgtttcaactcatttcaaggctgttgaagccaccgaaggctggaaattccttcaagaccacgatcctcatctagaactcgatatcttgcagttcattgacgaggacgaaatggtaatttcacaacaatgaactgttttatctaattataagttataaattaattgtgatcttatccaaattaattaatttgttatgttgtttattagtgactaaatatgaataaatttttattttaaacagaggaagaagaagtcaagaaagcatagggaagcacaaagcttgtttttacagctaagcgaagctatggagtgtttacagcacatatgtacggaagggtgcacaagtgttgggccgcatgatatggtgcccggaaagaagaaaggcccatgtagcaaattctccacgtgtcaaggtatccagcagttgatcaatcactttgccacgtgtaagaagagggttaatggtggttgcttgcgttgcaaacgtatgtggcagcttctcaggcttcactcttcaatttgtgaacaatctgattcatgcaaagttcctctatgcaggtacttaaatttaattattatttaaatgcctataatgatagttagaaatttagtatagaatcgataaaattggaaaagaaaaatggattgtcggcttaatatcttaatatgttgtttaattggagattataatatgataggacaatatggtaattcttggtatacaatgaatatagttagtgacacctctatgtgtggtggctgttgtggccacgactcaataaatgaaccattgatttatttattttggaagaatgaatataaataaaaataaaacccttttgttggttttgtcgtttttcatacaaatgttccagaatatttgatttaatatctcactaatttgatgggggcacgtttggttttggggggatttcgaggttatttgttttcatctagtgtagtgtctatgtaattggttttgatagctggtgttgtttgtttcttttgtaatgaatgacctggaaagaaagttctaattttcttggttaatattggtagatcttttaagattttactttttaccctttaaataattgattttaagttatggtaatggaaaaaagcttatcactttgttgatatatgttccatggtgttttaggtgggctgttggtatgtcataatcacttaggctgtaaatttaaataattttgggctcattcattcttttcttgatgaggttcatgtccttatcccatgggatccaccaaaactcagatcatactatgtatctaaggttcttaaatgtgatcttaagataaaaattcaaaaggctcaccttaatacgtagcacacctggcagatatcttcataaaatatctaatagtttaaactgattggaagtaagaaaccaataatgataaaggcactgtatagataaatatcttgattttaggcctttgattcaacacaattaccaatcaaatcacctgtcgttttatgggattttatcttttagcctgtaatgattttttgattaacaacacttgtgcaacattaattgattgagatctgtcgtttttccaattgggcaggcaattcaagttgaaaatactccaagagaaaaagaaagatgatttaagatggaagctattggtgaaaaaggtggtgtcagctaaaaccatatcttctttgtccttgactaaaaggaggaaagaagaggaccagagagagaaattgggcttgaggggctacaggttgtaattaatcagagtagtcagtgtagtaatagtagaagaagtacttgagaagtgttcttctttttcttttttccaagtgtgaaaagagtgaattttaaatttcacttttgtaaatcgaagtttttcttttaggtaatctaaatagtaatagtgtggttctataatatgaatcatttgtaatattcaaagagaaaaagtgagaatatcccatcatgaggcaaagaagctaggttgcctcagttgtgttttggtaaagagaaacacttacatgggattaaattactttg

SEQ ID NO: 18222 - DNA, 2938 bp, Cannabis sativa
tcttttgtttggttgtcaactctactttactatataaaataaacaccgacaaataatacccctcaacttttcaaaccgttaaaaattgctgaattcaataacttttaattctgtttaattttactaatgaacgtctaacatggtgattgtttatgtatcaaattatattcctgaactttgataccaaatagtatccccgaactaacgggcatctgacacaaatggaagttcagggttacgatttaatacatacagaatcgccacgttaagcatacattcaaacagaaattcttgaacccaacaatgttcgaaagatacagtttggtacatgtgaaagttcaatgagaaaaaaacaatcctaattagccatatataaatataaatacattatagttttttagataagtatattaacttacctgtaataacttgtagctgtaggacattgctgatctggggaccatgtctaaatgcttgtccactaattccagcattggagagagttccaccaacagtgagatgaagataatcagtccatgattttggtgttaaaccaaatttcaaagtctcatgcaatatgttaatccaaagctcaccaccataaacatcaacataagagaattctccatcactatgaatatacataacagagtttttgttttcactaagtgactccatatttatgacaacacctttatgagcttgtgattgtccttggagtgagtgaccatgtcctctggctgcaacacttagctctgttgtcatccccatttcccaaacatgtttcacaagagtggctatatccgataccgatttcgggtaaagaacagctgagggaaggtactgaaatctgttgccaaaatccttggatgcatgatcaacatcatcaaaactcaaatgcccatcaaactcaagtgtcttcaaatgatcatgattatgattattttgattatgaagaagaagaggaagagtgtttgagaaacaaaggtttatcttaatagtacttattaagcaagtgaagagtaagataataaagcctctaatgatgataaagatgttagctttagattgccaattcattctttttctcttttatgtatatatattaaaaagagatttatggggaaaatggagaaaagggtagaagtagtttttgaaagattggatgagaaaattattgttttgagaagagaatttaaaggggttttaagctagtgaagaaaagatttgatttttattatttatttatttatttatttatttttattattgggtgacttagtcaaactaactcatatgacttgatctaagtagtcattagaatccgtatgaagactgcctactttggtggaagagttttaggattttcttttgttagttttcctttctttcttttaaaggaggcttttttagtttagatgaagccatcacaacatatcaccaagttgaatacaaataaaaataaataaataaataaaaataaataaaagaagattgtgaaaatctttctttgcactttttctaacagttacaaccacaacaacaaaaccccaccttttattttttttaattcatcaaagacaaaatatgttatgaagaaaaagaaaacaaaaataaaaaaaaaatgttcaaaggatactttcccatttttagctaaacaaaagaaaaaaagcttagtccttttggccataatggtgtatttgtattagtatttttcccttgtggcatgatgatgatgatgatgatgatgatgatcatgagactgtgttttgcctgggaatataaacacagcgtatctgatttcagatcggatgattatgagaagaaatggattgttgtggtgtggcctttcttttgattcattttcaatgtggggtctttagatgggtccacgtggcacgtgatttttaactagtttgtgtgtgctttgttgggggaagctatgtatgattggttttatattgggaccccccaacactctcttaattaatttcttctcttctctttcaactaatggcatcacaagttattgagcattgttactgaacactagtagtgtgtagggttttctgcaagtgacattttacaatatgagattcgatacttaactatatcaatagaagaatgacattgaggagagtactaggcaccaggctacactcatggacatgtgatttttaaaaatgatattatctatctccatattggtatgatattgtccactttgagtttaagttcttatagatttgttcttgggtatcttttcctaaagatctcagtatggtaatattgtacttccttatatactcataatttttctcatttctagctaatataaaactttagtttcacatccaacaataatgatgaaaaatattgtgcatcccaatgaaagaacccttttgagagacttgcaccgtacacaacacgtgtcactgtacttgtggtattcgagagatctgcatgacatagtgatgaaaaaaaattgttcatccaaatgagagaaccctcttgggcggccacgtggtacctaccagtggtattggtcaagagacctacagtactgtaccacatggctctaagaagtactcacaagataatattattctacattgaagtaaaatatatagaatctgatactacattatactaataacgattatattaaatttaaaatagtattgttactcccaaaagtaaaaattgaaaaaacttttccttatggttataccttacattacattactcacaagtcactatactcttttggatgattctcttgtttgtatgttttcttttttcaattgaaaatttgcagcctctaagggaaccatatgtctattgatatgtagtttgatataactaattttgatcaagttgtgatgaactagctagctagctctttattatgctctctctagctatataaatatatata

SEQ ID NO: 18223 - DNA, 3605 bp, Cannabis sativa
tgtgattttaatattattccagtcactggcttgggcttgctaattatgcgaaatatttctccacgaatttactgacttgttgtgtttattacataaaggttaggacttccaggtggtgaactctctggatgtcatgcatgctgtaaagggtggttgggttgggcaaacatttgccctagctagaagcaatgagtctgaagggagaaagtcccgaattaggctttccaagaaagagaggaaggcgatggtcgagtcctttataaagaagtaattgctattttgttatgctatgctgcaccaaatggttatttatttcaagttttttatttttttcacgtttgcaagttgtcatattagcacactgtctttcctttatgatgattgactttggaagaggatccttgctgtgtgttaaatttgatcactttgtttattcatagtatattgtttatcacattctaggctcttaaacgtcgtcggcttatttggaaatatctgttactccaaaccttacatcaagatcttgctatgtttttgtgtagtttatctcatttgatgtcttaccagcaatcaataaacttcattcaggctgtttaaaagtcctatttcagaagtacaattgcaatgctctgcactggttcaatgacgtgaataggaaatatattagtattactcttcattggataaagtatgcgtggtctgatttgaaattttgcttaatggttgtatcagtgtgtggtgctgttcacatattctagatttgagaagcctaaaataccttaattatctagaatcaattatttatttaaagggaagtagctaactagaaatctgcatctcttttttttttttggtgatttttcaggtatcaaacattaaacaatgggaattttccatcacttaatcttacccacaaggaggtgggtgggtctttctacacagtacgagaaattgtcagggatataatccaagaaaatagggttctaggtcctgctaagttaagtggagatggtaaaagcaccaatcagttggaagaataccccctgggttcaattgctatagctcctcaatatcatttgacacaattatcaaatggatctcaaataataacggatgaataccatggaagtaatgaagaaccaaatttggttaatgggcatcatgctgtacttgaagacaaggtgtttgacaatggccaagtcgtcaatattactattgagagaggattgagtgagccaatagatgtagagatgcaagggcagagatttatggaattagagcagaatggtgatgatcaatctaacaaggaagcagatttagtttcagatgggaattatgcttgtcctggacaggaggaagttgacagcgagcatgttatcaatggcattcaggttgatgtgagaaatatagaatctcaggaacagaatgcagcagagctgcattcaagtgaactttctgaagcagagaatgctgaagaatcaacagcttctaggtctaaagtgacacgtatagctgcagatgtaacagctgagacatttcctctgaagcctgctactacgacagcaggtgagtttgatagaagctccaatgaactatctaatgtagcaaattcttttggtaaacaagaccttgtaaaagtggatctagcaactgatactgggagttctcagacagatggcatagagtccttaaaaagttttagtttgatggatgagaaaaacatgacaaatatttctagtagtttagatgataacaagtctggcttggtgaatgcggaagaaatggagaaacatggagatccatctttggaaagctcaaggtgctctaacaagagtactggacatgaaattcaagatttgaatggcaacgatgttaaagtatctagcaacgatgtaacggcagtaaccattgaaaaaagccaggcaatttcaggagctaaggtaggcttttggtgaagcatgtcatgtcatcgctacatcattttaataattttttgacactcaagaatcaagattcacaaaatctctcgttttagtaaattgatacattgtttttttttttttttttgatagaagataaattgaatatttgaacaagataatgggtgctgcttgttttaattctttcttctgcaattatctataatttgttaagttgtgtttgttgatgcattgacaggctataaacgttccaaatggcatcaatgtgaagtatattgacaagaatgttggtaaatctgagcatttgaaaactgagcaggagctgaatgaaaatgaagttgatgctcaacaagttggcaagccccagaaaggaagtaatccaactttagatagaatcaatctgtaagtagttatttcaaatctcatagtataaaataatttcaatttcaaattttctagtgcttagtgatctttgctctgttataagaattaggtaattctaactgcctcatttggacttattcatttgtccatttttatctttggcagtgaatcttggggaggggcctctaagaaccctggaaaaccagaaggcaacccaatatgggtcgtttttaaggtgtttgtagatgcctttgtgaagttttggtctgaataatgtttcttcagactgatgcttaaaattttgttgctatgctcatgaattgattgtatatctgataaaatgatgttgattttactgagtgactctgcttttgtgtttagattatagtgtgctcttaaccattttctgttctacttggttgatatgggtttggtatcattgtctattgcctattggtggttgacacgatgttgtaccttgtagctgtagtaagtagtacttttaaaagcacttgttttcaagagtggagtataatatatgttcttcattacaaaagaataatagtaataaaaaaatattatctctaaaatgttattggaagtattggttagattagatgtagtgaggccatcacactatcatgtattggaatttgaatagaagaggtcgtagagattttttcatgacaagaaaagattgcttagatattatgtgacgttgtagccaagtagactagcatattaacatgtatttggagttggaagagcatccggggacaacctcagtgggaattgcagtccatccaattcaataaatgctaaaaagtcttgaaagaataggaatcagatttccttattttggaggagttctctgcatttttctgatcttcgtagttgcgtacacagacaatagcttcttgttgaagctactaacagtgattttttttaaaaaaaaatcagattaaaaaaaccgatttttttaaataataagaaataataatggagaagtagagatctgcaagcatgcaacctgcaatagatctactgctgtgtcttttttttttttgtttttttgagtagtgaaatatactgaatataagcattttaaggttaattggttttttcatctgattttatttatttattttttttatttggaaattaagtggctgattagttgacatgttttttttttaattctaattttagttgtattttctgattagattgtaaattgctattaataatattgcttgatttactttattttttttttcttct

SEQ ID NO: 18224 - DNA, 3123 bp, Cannabis sativa
ttatatttaattttcattcctctgtttgcagtgtcctgttttaataggatggggtgataaagatccttgggaacctattgaacttggaagagcctatcagagctttgattctgtagaagactttgttgtgcttccaaacgtcggccattgccctcaggtacttctctctgctcattttttgttggtattccatcaatattcatggaattggaataagtttcaaaatgaagtaaaaagtttagaatgagcatacatattttacaaactcgctcttcccttacttgggacacatcttgtgttgctggtgtgcatacaggatgaagcacctaatcttgtgaaccctctggtggagtcatttgtggcacgccatgctacgtcttcaaccgcaaatcttgtgccaaaaacagcctcatcatagcctgttgcatcgtcaaaaaccattttgagcactgttgtgttaatctgcactttagacaccctggtttagtctagtgcactctaaacctctagccataatattcaatgcagcacccggtaaactttattgtacattttcttttgctaggaattaaattttgctctgatattgtatataaattgtactaaaaagaagaaaaaaacactgaactattacataagatcaaataatttattggaaagttccttagtgggggagtgaaaaatcccacccgatatggagtgattcgttgtattattttttgctttggttctatacaaagcacgacttcttaaaacttacaaaaaaagactacaatcattatcttcgtatgactcatatcaaaacttagtagcttatcttcccatcatctccacacaaactacccgaacacgatcgagtagaacagttgctctatttgttggaagcttgaaagaaagtgagttacaatgtcactgaatgcagaacagattatctagaagtaaatagtaagttagaggcttaagagttgagaaaggataggtcaaaggagagactggctcaaaaggaaaagaacagaaaacatatgatgctgcatatcgagtgactgcattgccagctcagtgtcgctctctcaccactctcgtctgatagtttcttatgcacaatcttcacatttttttgtcaagaggcgcaaccgaaaacaatgagctctcaacctttctaacttatgtattctacaaactttaaggatagataaacactagaccatgaaaacaactctctgtattattgctattttaagaaagtacattacaggattattcttaatcagttggattaagactctttatataggcctaagccacgccacgccacaccataaccaattaaccaacacaacaggtttcgaggttttatatactagccacctgagtattgagcaggtataatagacataggcattaatagttaatagtcacaatacaacaagctagctcttcctacttaaactaattatcctgcttcctaaatttatataagtaacatgcgaatttcaagcaaaaacaaattaacgggaagttagagagaaagacttctcttgtttcatatcctttacgactcatttcggtttggtatcttttatctatgaaacaagggtgttagccactttatcatgcatgtatttcacctcactattttcatttcctctgcaatctacagataagttgacaagcattttgtttgtaaaattaaagtagacaaacctcagctgtcttggcattttttgtttctctgcacaagaagagtagctgctgcactgaaaactgttacagcaatttccgcagaatcgactgttcatacctttttttttttttttgttcttgtgattgtgtatcaaatgtggaacaaaatcataattcagtgctttcaaggtagcaaaatcagtaaccatatcggctatatgagcactcaccaaacacatgaagtagcattataactagaaaatgatgtagatataatgaatcgtgtaaactctctttgtatgtagacttgtcacaaggttgactagctcatctactaacactatatataaagttgcactatgttggggtataggcaagatttatttatcttaaatttacttgttctacctactttgtattaggtcttaaaatcataagggcttaagcccaaatcaaataatatcatactaatataggagttaaggtaagttggtggctcaataaagtggaacaacaacacaccatcactcaaagaacactctcaatctacagagtgaatgagctatacatataaatgcatggtgtgcttgtacattgtaaagtcatttatattccaccaaaaaataaaaatgaagaacagtaataatgaaacaataactgtaaataaacacgtttggcatataataattgattttgatgagaaaaattatttgattggaaaaccagcagacaagattggatattttagttctggaataaaagaaacatttgaaagaaaatgacaacaaaataaattaaagtttaaagatgaaaaactgcagaaatctctatgtggtgagtatatttgttaaacatgtcaaagttatcaacttgtcaacaaaaccaaaaaacaaatgctgattagttgcacatatatctaaatggttactctctatttgtaataaatcctaaaagatttactctagctttattgattggctgcctttaattttcacccaaaacaaaacaaatctctagctaatatttaccagagcaaaaacatattagagttcaattactttcacaataaactgaaagatggtgtagttatgatttaacatttcctaagggatactagataatctgttgtgaaattcatccttgcaaatcttataatgtaataatatctttgaacaatttcggaagaacccttactcagaaaattattagaacacttagaaagccttggtttccaacgtttggtttgcaataaataataagtaataatcacatattaatgaaaataagtttccaattttaaatcacttgaatgcaatttctattgttgtgaatagggttgcacattctcctcacggggatggggcctcgcggggacccgcccttaatggggcgggaattccccgtctaaatggggaacagagaagggattactttttgtcc

SEQ ID NO: 18225 - DNA, 15015 bp, Cannabis sativa
attcataactcctaatgagcttgtaaattactattctttttataataaacactttcttcttttactttgttagtcttaatttttttaagatattagtaaaatctgtaatactttaacccataatgtattaaaatgtactctttcccaccagcagtataattgtttatttgtttcttccatttcaacttatataatttataatgaccgtgagatctaatttgcatttattttaaaaaaaaatcataactcgtagctactaatcggacaattaagatccaaccacgtttctagatcaaacggctaaccatttgccacgtgtcaaccttgaagctaaaagtcttttatgccataaaaacgaatgaatcttcgtcttattaattttctttcttctccgcgtctttccagttacaatgaccaaactctctctttcagtttcagccattgccgtgtctgatccaccaccggctataaccggttaacccctccacccaccaccggctacacccggtaaaaccttttctcaattcaatttttctcatttttgaaaatcaaacaccttttctttcttatttccttccctttttctcttttttttcattattaatattatttatttattaaattaaatgaaaaagctttaaaacaaaaaagaacagagcaaaaaaagaagctgagttttgaaagagagattcttcttcttcttctgagctcaaagaccgattcgactcggtctctagggttttcttcgcttttctggtttttacttacaggtacgccatttttgatttctttcttcatcatcattttcttcttaggttgtttgaggttttctcatgtatcgaaaatgattgcaatatataaattaaaatgtttattgaacctgtaaactgtaattgttgatttatgtatataatatttgtagtttgattgattgtttgtagtatttgtgattgtttctattatagaaaatgtctcaagttgacgaactatgggagcgtttagttcgtgctgtattgaaaagagaacggactggaaaggatgcgtatgggcaacctgttgatggaattgctggaaatgttccatcttcacttgctaataatggagatattgatgaaattctacgtgctgctgatgagatccaaaatgagaatccaaatgtctccaggatatgtatgattatcttattttgagttgttaagaagctgaatttgtcagttaataacagcattatgattatcttggattttttgttttgtgtgtatgtatatacagtatgtgaacatgcttattctttggctcaaaatttggatcctaatagtgaaggaagaggagttttacaatttaaaaccggattgatgtctgtaattaaggtatgtatttagtttgaaatggattaattttcactgtcttagactggtcaccacccgtacccgttatgtattgaaaaacctcacttgtggcggaagaatatcgtgattacaagattttagcattttaaaacactaaaacatacatcaaccaaaaataactcataggaagcaattttttagtctcttatgttttgcagtgtatgaactttgacaataatattgttgtatggaccatatttttaatttttattagcaaaaactagctaagagggaaggaggagttatagatagaagccaagacattgctcttctgcaagagttctacagagtctatcgagagcagaatgatgtggaaaagttaagagaagaagagttgagtttaagggaggctggggctttcagtggaaacttgggggagtaagtatttcatccatttgaattcaattagataatgtaatttaattctgtgatctactactataaagagaaaaacataactataggaatgtgactttcatttctctcctaatgtttatttccccagaatttattatttatttgaaaagtttcttttaactagtaggaaatgtttgagctgtatctttctctgtatttgggtctacgctttaccttttgttgtgaaaggtattttctcagtttttctttcatggccatcagattgatctctttattgattatttttttctcaggttggagagaaggacggttaagagaaaaagagtttttgctactttgaaagtgttagggacagtccttcagcagttgactgaggaaattcctgatgaggtttgttgtatgtctttgttatcagttgtatttttgaacatccgaaattttgtgaagcatttgtgttgtactcctaacgaaaaatcacgtgaagcattaggaactataattgggaaaaaattatttgatacttatttacagaggatggatatgtttatgcttgagtttctccattgaaagctgaaactaacataaatgggacacattgtatttaatcttgcatctctcaattggtttgttttcttatgcagctgagacgtgtgatggaaactgatgcagccatgacggacaacttaattgcttataatattattccacttgatgctcctagcgtaacaaatcgtattggattttttcctgaggtaattagtttatgtttccaattaaaatatttgttttttgtgacaccatatagagcaaaacatgtattaattgaacaagaaatttgtgaacaggttaaagcagcaatctcagtgttaaaatataggggattgccaaaattgcctgaggattttcccatcccagctacaaggaatgctgatgttttcgattttctgcactacgtttttggatttcaggttcgtacgtctagctcacgtgttatattgaatttattcatttcttttgtttgtgccataagttacatgtggttgctattatttctttttttctttccccttctgttgctgtgttttcccccctcttaaaactttatttttttgttgttcttctatatttatatggcggcgaaagtttgaatcctcagatttgttttgtatgttcatgcatatatatgtatatatgtactatgggggagatgagtttgttcttatttcttttttgaaactaaacttgcttgaattaatatgatcgatgaatataagggctgtggaattgcccatcattatcactgatttattcttgtttttccttttttttacttcctatggctgcctattttaagattgtctcaaaatgtttaggtgggaaataatttcttggcttacaaatttaggtgtacaagaccacatgttttgttctttacaaactctaaaatcggtcaatattatgagaaccaatgttttcttaatctaatgcttgaactttatgtgtcagaaagacagtgtttctaatcagcgcgaaaatattgttcaccttcttgccaatgagcaatcacaacttcgtgttcttgaagaagctgaacctgtaagtttcatctctttaatgctcatagatgtttctcgctatgcgagtatgttcttgtattgtttagatgtttgctaatcattatgtggtttacctaaatatttaatatgttccaaattgtcttattatgaaattcttaagtgagatttgtgaaatttatttgagatcatgttgatttggtttgcaactagctatggagagattttcttattttttcaatattgtagcttagtttataatttgcataacctgtgatgtgaggatgagtcctatgcagaggtataattacatagtttatatgatgttcatgtaatttgttgggaatagcataagcttttaaacacttgacatgtagtagagtagattaaatatattcaaggtcatttcttattattattgttgctatgggtagcaaaaattgtcaagcatttggtttgcttttacaaatcagattttcaagtctcttagggcacctacgtagcaatttttacaagaatagtctccaaatattgtagagttaggtgaatagcctagataagtatttataatgtaggaagaccctcatggccatggggacctttgtctcatggacaggaggggctgttaaatgagtatacgcttaaagagcatagtgaaataaagttgtgatatatcttatgggggtgctcaaattttagcaagcctgaagaacctgtccaactcatgtaaaaaattgggcaaacaacagggctgaagagctgtgtggccatttaagcgtagaaacccaatgcctggcccgataacagccgggtattagtaacctgttgggtcaaatcaacccaacagaattatatattttataaaggttctacaatgtataaatacattctagcctttataatgtgttggaagaggtatatttaaatgagtatattaaaaacattcatttgacagtttttcctaaatgagtatgtttggaatctaaatgcattgatgccttaaattcattatatgtttttatgccaatatttttcttgatattgattcaggaattggatgaagctgcagtgcaaaatgtattcctgaagtcccttgataattatattaagtggtgtaattacttgtgcattcagcccgtctggagcaagtatgtatcttaaattgtttcctatattattcatgatactactcaactttattttatatgtttacttggattaaggtgattaaaacttgtaaaatatttggatggaattcagttttgatgttgttgtcaaggagaagaagatactatttgtttccttgtactttttgatatggggtgaagcagccaacgtcagattcattccagaatgcttgtgctacatatttcatcatgtaagtcaaccgtcaagcattctatgcaatttctttggagcattgaattgtttttttttttgtttctatgtactctttctccttgttctctctaattgaagttgagtgattttctcgtggttgtaacaaattgaagaacacatgtggtattgattctgtcctaccacggatactctcctggttggagcattgaatatatgtgttttcaaaaaaaaaaaaaaaaaaaacttgtaggttttgtttcttcctaataaagtttttcttttctttccgtcctttgaacaataattttcatgtgcagatggccagagaactagatgaaattttaaggcatcagattgcacagccagccaatagttgcaaggctggggatggggtttcattccttgatcaagttatatttcctctctatgatgttatgcaagcggtatgtcttagcgaacatctttttgtcaaattaagcttaaaagaagaaattttaaatattcgtcaaggattttcttgcttcaaattctaatttatatttattaaatatgcatagtagttcggattgtgtttatctaacttgggtgttggtattccttgattgggactttgggtttattgctagaaagtgaagcaaacattttcttttccctctttattatttatttatttggtaaaattgttctcatattttaaagtgcacaggagacaaaaagcaataaagacggaaaagcaccacactctgcctggcgcaattatgatgattttaatgagcatttttggtgagatttttgtagcaatgcctttgagttattattcacattgttggttctaacaagttttatttcaggtcacttcattgttttgaacttggctggccatggcgtttgggctcaccctttttccaaaagccagaactctcgaaggttggttacattctccctaagattgttgaagtgattgacagttgtacaacatttacatgggcactgaaagttcattttaatttcttggtgaagtgatgatggaaaaatttcttatctgttgctgagttccacaaaacagatgttaatttaagtacacgggcattaaactttagaagtatcggtttatgttaatttaagtactttttgttttcgccatctgttgctgagttccacacagttacacctggactttatttactttatggtactgtgctgaccaatataaactaaacctactcgtagatgtgtcctgctgatttttatttgtcttggtacagaatatgcttaaatcgggcagaagtaaacatagagggaagacttctttcgtggagcaccggacttttcttcatctctatcacagttttcatcgcctatggatattccttgcgatgatgttccaggtttacttatttacaattgaattgtcaattttatccatatcttatagtcttcgttgtagcttctattactaattagtcaaactacatgcttgagtccttttttttcctttgatttgtattctgcattcttatactttttattgttgtagtttagcttctgatattgtaatctatatcagttaaaattaattaactcttggactttggtcttttgtgtttttaatagttttacttcctttcgggattgtcagggacttgctattattgcattcaatgatgaaaactttaatgggaagactcttcgggagattctcagtcttgctccaacatttgttgtaatgaaattttttgagagtatgtctttatctcgttcagacaatgccgctttatttttattatctggtaaactagatctcttatactgtgaaaattttctctattctctaggtgtgctagatgttataatgatgtttggggcgtattctacatcacggaggcttgctgttgctcgtatttttcttcgttttatctggttcagtacggcttcagttgttgtatctctcctatatgtgtatgcactcaaatctctgttttgcctttggtttgtctaaacttaactctttgagccaaaggtaatctctattccattttttaattcaggaaagcgcttcaggaagagagtagaccaaatggaaatggtgttatattcagattgtacttgattgtcattggcatttatggtggcattcaatttttcattagtttcatgatgcgaattcctgcctgtcatcggttgactaatcaatgtgatcgctggcctttaatccgttttgtcaaatggatgcgccaggttcttgtctaattataaacacacacacacacacatatatatatattatgcaatgagattattctttgaaaatacacaaaatgcaacggatcataaaggaatttattttcaaaccattaactcaacctacaataatgttattggatgcccactattgatttaattttcattcttgctttattaattagtattaatcatttttttaggaacggtattatgttgggcgtggaatgtatgaaaggaccactgattttatcaagtaattattaatctttttttttttccttttctggattcttataaaatattcttatggatgactaagcacctttaatttgaatggaattttaatatttatattttaacttttgcaggtatttggtgttttggcttgtgattctgagcgcgaagttttcatttgcttattttctacaggttagtcatcatcaatatgttttttggaagtaatgtatatacgttacgttaatattgtgaattctatttttgtttcagatcaggccacttgtaaaaccaactcgaacagtagtaaagatggataccatacaatattcttggcatgattttgtatctcaacgtaagcagctaagctattttattatggaaatgtcaagtgcttatatcatctggttttgtttatatttatgttatttctgtgttgatgtttgtggttttccttgtttattatctgctggtttttgcatgttcgaatttagaaattcgttctatttgatcatttttatttatgtgctcgtacttatcttcttgcttgcagataatcataatgctctgactgtggttagcttatgggctcctgtagttgctgtaagttggatcttctttaggtcttacttaaaaaagaagctatttattaaacatgttatgacacatttacttcaacataattggtagtcatattaaatttgaagataaatgaatatgaaaagaagagattagatcaacaatcattatttggtgataattaagtaaactaattgatcaaaaccattataattattttaaaggatgttctttggctttttatctgctgtgtcacagatttatctcttagatatccacgtgttctacaccatcatatcttctgtatggggctttttgcttggggccagagatcgtctaggagaagtgagtaatttgatctgattcatttgtttctgcttttgtgattatttgtttttttatatgtttgaccataaccttacaccttcaaaatttctgttgtcatctccagattagatccttggaattagttcacaaactttttgaagagtttcctgaagcttttatgaccactcttcatgtacctctttccaacaggttggattttctcatcagaccatctttctaattattactattttatattgatggcaaattgaacgtattttattgctcacttaattgtgtgaatgttgtcttttgttcaattaccatctaaatgattttttatttttattttgcagcacttctcagaatgcgtccagtcaggtaatttttacaaaaataactactagcatttcataattgaagtttctttacagctagtacttttaactattatttttttattttaaaaaaaggaaaaagaaaaaaagccaaaagtgctcatttaaaaggataaaactaactattttatagctttggtttaatagttgttcttttcactgtatcaatgttttataaaggaaaatgcgtcctgagtctttagtgtgagaatactcacactagacaatatcttgccaatatgggcttaactgatttattatgatttgtgatatgcgagagttaaataaactaagactgatggaagacatcttgttatcaaagaattgaggggatttttttaacagaagtatgatattatagctaattttgcgacatttcactttccttttcaggcttatatttcttgtaaaaaaaggcaactttcctatgtgttttgtttgtattttaaaacgactatacgtagagattttatttttcttacatgacattttctttcttgaaattgttggacaagctagcacagattgcatagagtttattttactattgtttagctttatgttatcttttcttttcaccccacctaatcacggttcattttataatcttacgtgtactgaattgtttgtttgaaggtttttgagaagaaggttaatgctgcgcggttctctccgttttggaatgaaatcatagcaaatcttagggaagaagattatttaacaaaccagtgagcacttgaattttgtactgatttttaagctctgcaggtgcaggatgtatgttcccttgccattactttgggttccacttattaatttgagatttttttctgcagagaaatggaattgcttttaatgcctaaaaatactggaactctcaatttggttcaatggcctcttttccttcttgctagcaaggttaataatggtcaaatttattgtacataattctatgtcttcataagttaactggaaaaagcatgtcctgcaattatgtatttcaacatcatgtcaaattgactgagcttaaaattgctagtgtatacttatgtagataattctcgccaaggacattgctgttgatggtagagactcacaagatgatgaattatgggatagaatttcgagagacgaatatatgaagtatgcagtacaggagtgcttttatactcttaagcatatcttgacaacaatattgcaagatgaaggaaagttgtggtaagttccttttaagagagacaaacatctctctctctctccatttatattcatccttcacggtgttatatattaccaattttgttgtttattttcagggttgaaaggatatatgaggatattcaatcaagcatcggacagagaaatctgcattctgatttgaacttaactaagctgccactcctaataacaagggtcactgcattaatgggaatgctggtttgtattcttctcacgtttttggtagtctgttggtgcaatcatttacaataaatggttgactaatcaagcatttcactttgaatttgtatatgcacagaaagaagtagaaacatctgaccaagagaaaggagcagttaaagctgttcaggatttgtacgatgttgtccgtcttgatctcctatctgttaatatggggtatgtttgttaaacctgcaagttctaatttactgcagcgaagatgcttttggcttatccgatcttttttgttgtcttttagggaaaaccgtgaaacatattatttggtatcaaaagcatggaaggaaggccgcctcttccagaaaataaagtggcctaaggaccctgagttggtatgttcatgcatcatttcgctattccttttgtacttgtataatttgttggtgtgagatataatgtaattgtggaccatatgcagagatcccaggtcaaaaggctctattcattactaactatcaaagattctgccgcaaatgttccaagaaatctggaggcaaggcggaggctgcagttcttcacaaattctcttttcatggagatgcctgttgctaagcccgttaatgagatgttgtccttcaggtaatatgctttttcagatttgtgctgttaggaatcatacttctgcttactgattcttgcactaatcgtcctacatgtcctgcagtgtgttcacgccatattattctgaggttgtgatttatagcatgaaagaactcttggagagaaatgaagatgggatatcagtattgttttatctccaaaaaatattcccaggtacaatttcatagcaaagtagctgacaatattgtttttaagtgaagtctttgatagtctgattattgttaatttgttattaacgtatccaaatacaatagaactgaaaagcacataagagaaaatcaattctgcaaatattatgtttgattagcttagtttaggagagaatatatcccaagatataagtcctagaggtcaggtaacaatcatactgtaacatcctattaaaaaacttgataggaattgtggagctgagtcaagtgttcgggaataaatggagaagtgtttgaaatggcgttcagtattgtaaagtacatgattgcattttgttaaatagatatgctgctgcaagaaactaagaggctttaggacatttgtagagatatcatattcataagagacctttatacttccagaagatgtctgtttttcttttcgattatacctcaactgttgtggatttttaattcgagggtttcaatatatttttcttttgtaacaccaatctctcccttaatgatgtttcttgtttcctctgaataataaaaattagatgtacctaagaagcccctagcatttcacacttttggtgatcttttagtggtttagcctttcatgtttatgtatttcttttaatcatatgcaacttagcctttttttgttcattttattgatcagtcccttcttgtttgtgtatgtcgtatttctttatgttatcgttcacggaaagaatgaagttctcatattgaatgtttgtcctcttgactttattaatcttaaatatattatgcatgcagatgagtggaggaattttcttcatcgaattggtcgtgatgaaaatgcgcatgagtcagaactagataccccgaatgatatattggaacttcggctttgggcctcataccgtggtcaaaccttggccagaactggtatacattctaagttttgttcttgaaaacttctttatgtcaatattgttgtttgtacttgaaaacttctttttgttttctcaatgttgagtatgcattctaagttttgaatatttattttttgcagttcgtgggatgatgtactataggaaagctctgatgcttcagacctacttagagagaaaaagttctggcggttaggatcttctttaattacatatatatatttgcaaattttattgcactatcatttacttatcttagtgttaatttcagatttggaaactgcaatatccaataccgatgaaatagagactcaaggatttacgttatctcctgaagcacgggctcaggcagacttaaagtttacatatgtagtaacatgtcaaatatatggaaaacagaaagaagatcaaaaacctgaggctgctgacattgcattgcttatgcaaaggtaaattctggcccgtcctatcatttttctgtttctgaccctgtctgactaattattttactgttgattcaattgttagaaatgaagcccttcgtgttgcttttattgatgaggttgaaacactaaaggatgatggtaaagtacagagggaatatttctcaaagctcgttaagggtgatatcaatgggaaggacaaggttggttgtctttatttttgtcaagtagtatctgtggtagtgtactgtctcattcaattttatatcaacaaagaattcatatgcttttctttcggttcccaagttctccctttctggtagattacttagtggtatatggtatataacatatagggatttataggctgaaaaagtctaaattaacaaatttgatttaaaaatgtgaattcataactaatcaaactgccattatggttgtgtaatgtcttgagaaaattccaatgtgaacacttgcaataatttattaatgtgaaaggtgcatgaggaaatttccacacttacaaattcgataatgatttttattatacttatggttactgcttagtgctattgcagttgttgttgttatttttgttgttagcatgtctctttactatataggtaacttttgaatttagatgtttatttacttagtgttgacttggtctgtttttcaggaaatttactctataaaattgcctggaaatccaaaacttggtgaaggaaaacccgagaatcaaaatcatgcaattgtattcactcgtggaaatgcagtccaaacaattgacatgaatcaggtgacacccttatcctttaggttccttctgctgtacgaaaaacttaaaatggttaaacgacaataatttagtacagttcttaacccttgtttgtcaatggttcttcttctcaataggaaatgtggctctagttttctcaatgtttgaatttatgtgccatgttttcttcttcttctaatctattcagctgttcctatcttttaggataactattttgaggaagctttgaaaatgagaaacctgcttgaagaattccaccgtgatcacggcattcgtcctgccacaattcttggtgttagggagcatgtctttactggaaggtaagttttttttcttccttgcgaaccatatataaatatatatatatatacatatatttatttgtttactagttgcatcatcataattgttcaaatggtcatgtggcagtgtgtcgtctttagcctcattcatgtcaaaccaagagacaagctttgtaacattaggtcaacgtgttttatcaacacctttgaagtaagtacatataattatgccattaatttcatctgcttcctggatgttttgaagagtctaagatcatttcttatttcttttttcagggtccgtatgcattatggacatcctgatgttttcgatagagtctttcatataacacggggtggtatcagcaaggcctctcgtgtcatcaatattagtgaagatatatttgcaggtaactttattatatttgcaagagttccatttacagagttttccatcttgagcaattttctgtagtttgtcctcaagtgaggagaatgaagtgaattaaatttctaatgtttatatggtcttcaaatgtaggatttaattcaactctacgccaaggaaatattacacatcacgagtatattcaggtaagcttattcatttcctcaagtgaagattgcaatttgtctttatggttaaatgaagatctgggtggcagtttggagtttatagatacgtgattttttctcggttttctaagggactgggagagttcttatttatagtttggggttcattgttttgtcccatatttattagttttctttttcttgattgataatacaatttatgtttcttctataaactataataataaataaaaaaaaaacaggttggcaagggacgagatgttgggctcaatcaaattgctctttttgaagggaaagtcgctgggggaaatggtgaacaagttcttagtcgtgatgtctacaggcttggtcagcagtttgatttcttccggatgatgtcattctactttaccacagttggattctacttttgtacaatggtacggtgtcttttgctgaaatgaactggctgtgtactttgtcatatggttttgtgtagtttatatgcattaaaatattggcctctaaagaagctgattgttgttgtatttttccccatgaggcccctcctttttggtcgagaaacagtgttttttttttctttctttgggtgagaattaacactagaatgttataggttaagaatctgtaggtttctttcttgaggggaagattgaattttagagatattccattcctgtgcctcttttaaagttcatgtgttaatgttctccatttctgtatctaggcaattagtcttacatctgactaagctgtgttacttgtgtttctgcagttgacagtgctgactgtgtacgtatttctctatgggaaagcatatttggtaagttcattttgcaattttcatattataatccgcattactatttattttttgcgtatttgctttagctgaaaagtatttaagatgttcttatagaaaaaaaattaaataaagatcatatagaaaatcattcaagtagtggtgtaccgctagtagttatagatatgattcgaaaaaatgctcgataacttcacatttggaaaatacatttttaaggtttaagctatgtattctgcatatctgattgtgagagatggtttttctttcaggcgttatctggagttggtgaaacaattcaagtgagagctcggattatggataataccgctcttactactgctatgaatacacaatttctc

SEQ ID NO: 18226 - DNA, 5249 bp, Cannabis sativa
  modified_base (37)..(46): a, c, t, g, unknown or other
  modified_base (86)..(124): a, c, t, g, unknown or other
  modified_base (5212)..(5213): a, c, t, g, unknown or other
gaattcatacattatgtatatatataatcatgaaatnnnnnnnnnnaaccatgcaacatagaatgttatttctaatctttattaannnnnnnnnnnnnnnnnnnnnnnnnnnnnnnnnnnnnnngcataaaacccaacacaaatatggctagcaagctcttctcctacaaggtgtccgcattatcaataattattgtaaggagactataaagaggctacatagaggagcctctcatcgatcatctagtactgcttggagtttcaaggccttaatggtcagctgagccaacaaactccttttgaccactctctacctatttcttctttttgccttaacttatactttgcaaagacaattgtacttatcctctaactgcggggtcgtttgtaataacattagagacactgtctggtttttatgtttactttaattatgggtttagtgcttgatttttacttgataagttgacctttatagcttggtggagtgtttgattccaacggccaacacttcaataaccttttgaaaacctacaatattatttgttctttcctaaagggattgggactgcgttccctaatcggtttaggagctactaagattattcctcgcctatgattctcttagttaatcaccttaggtaggatatcgcgaccaaagtctgttgcttttttttgttggattagtgagggaaggaggaccaagtatgcaacaaagccctagccaggttcttttttatggagacaaggttgggcttgtgttgatgctaaagtcatccttccttgatccaaggtgacatggttcatttatcacttagacagattgtcttgagtttgttatgagagagttgctggaccacgaaggatttctaggcatgcttctattttctcacttcctgtataaaatattatcaacatggtcattagactagggcgactgcaatagtattcgagtactgctcctttgtcaaggaacataattgaaaacttgttggttgtgcctttttacgagaaccaaattgggcatgcagtgggtttcaagcgattcctccttctaggttagagggttgaagatgtgctacaatctaaactatggcttcgctcccaagactaaaggtgaaaactaaattggtcatgcaatagacttcaagttcctcctttcaagaaggagggttaaagataaattgaaatgccaaataacattttcgaccgaaagttaaacatttttacaaaaaaaaaaaattgaaagtaatgaatcaattataaaagtagttaggatatgagtataagagcacttagtagggcacttgtatgttttttaggataataaagtatacccccaagtgatcttagaagtttggacgtctctaaatttgtgattacttgtttaaaacataacttgtgcggaacatgaattcatgaattcttgtgcaaattccttctttttcattttattgtacctgcatgtttagattgataagaaagtttacaaaaatatcatgtataactgtagaggaacatcagaaccagatacccttagcctattggtaataacgacgtaaatggtttgcattctaggctctaggaattttcgatccatccattctcttaagttgaaatgttccctctcctactttgtgctacacctcgtatggtccttcccagttaggccctaagacccccactcccaattcttgtgaacctgcgaagactcttctcaagacgagatctccaacgtcaaatgtatggcttttaactttagaattaaagtgtctggcaatttttcgctagtacattttactttgaacttgtgactgttcccaaagttcttcaatcaaatctagcgaatcctggagcacagagtgattttaggtttggtcataagtgtctctcttactttgtgttgcacctcgtatggtccttcgtagttaggccgtaagacccccactcccagttcttgcgaagatgggaagactcttttcatgacgagatctccaacatcaaatgtacggattttaactttagaattaaagtttccctcgtacattttgagttgaacttgtgaatgttcccaaagttcttcaatcaaatctagcgattcctgaagcagagagttattttaggttgggtcataagtgtctagtctgtgagatgggattgtggtttccactgggatgacttcctcacacccataactcaccaaatatgtggtatgccccgttgaatttcttttcatcattctatatgcccagaagactcgtggaatctccttcggccaacgggctttacaagcttggagttttttcttcaaaggtgtcctcaatattttgttcgtgactttgacttgtctatttgcctatggtttggccatagcttagatgctcttcacaattctgtgctagttacaaaagtcagtgaagtgatcactatcaaactgcttctcgttgtctgaaataatcttatgcagaagtttgaagcggcatactatatttttgatgacaaaatctagggcatttttggaggtaaccgtattcatgggctccacttctacccatttggtgaagtattcaacagcgactatggcgtccttgactccccctttgccggtaggaatggatcccactaagctaattccctaaacagcgaaaggccatggacttgctcatgagggttatttctatttgtggtgcatgacgaatcttaacatatctctgacattgtttgcacttccggacgtattctatacaattcttcttcatggtgggccaaagtagccttgccgaaggattttctcagttaaacttggtttggacatgtggtcccatagaagcctccgtggacctcgtgtataatagcacttactttagttctggccacacacctcaggtaaggtaccaacaaccctctgcgataaagatttccatatagcatcacatatcaaggagactgatactagatcttgcgagcggcagctcaatccattggaagctcccctaaatttaataattgatagatgggccatatctaggagttaaagtgaccaacaatggcatttatcccctgtgtcttaatgctcgaagcttctaggtaaggactactccatagtgaatgacttttaaatctgtggcaagcttggccagcatatctataaatgagttctgatattctcatgatatttgatttaccaccatttgggaatcattgtgcactttcatgtgctaagctccaacttctttggccagtcataaacctaccagcatggctttatgctcagattccttgttagaagcacgatacttaaagtagagtgagctttgtagttgatgtccttgcgaggagattaatataactcacgctccagctttcttatcagtagaggcctcgtcgacatataccttctaggtggatagctctgggactaactcatccaggatgcacctaacccggagcattccattacaaagtcagctagggcttgcccttttattgacacttgcggttgatattggatattaaattgactaagtttttttgcccattttaacaacttactggaagcttccagtttctaaagcacttggtagagagggtgatttgttaatacttttatggcatgagcttgaaagtaaggtctaaacttttgtaggcggctagtaagcaaaaggtcagtttttcaatcaacgaatatctagatactgcacctagtaatcttttgctgacgtagtacaccagtagctggacttttccttcttcttgcactagggcgacacttatagcatgttcatacacttccaagtacagatacaaatctttccattccactagctttgacgaaatagggaccttagtcaaaggctcctttagtttctagaaggcctccttacattcttcgatcctttcgaatctcttatttcctcacagcacgttgaaaatgggatgcacttgtttgtgatttcgagatgaacctgctgagggcagctatccttctagtgatactttgcacctccttgtgatttcggggagaaggtgtgttgataaaagcttgaattttttctgggttcgcctcgactccttgggaactaataatgaagcctaaaaacttcccagaggagacaccaaacgtaaatttcctaagattgaacttcatcccataccttcagagaaccaaaatggcttcttcgaggtctgtatagtgttccctagaaattttttattttaccagcatgtcatcgacgtacacctccatgttcctccccaactaattcttgaacatgttatcgaccatgctctagtaagtagctccgatgtttttttagactgaatggcatcaccttatagcaatttacacctttatccgtatggcagttggtgtgttcttcatcagtaacgtgcatcttattctgattgtatccagaataagcatcctgaagctaagaaattggtaacctgacgtggcatcaaccatttggtcgatcaatgggagagggaaacagtctttaagacaagccttgttaagttctgtgaagtcaatacacatcctccatgtgccattgagcttaagtacgagaactgggtttgccaaccattcgggataccgagcttcctggaggaagtcatttgtggtcaacttgtccacttctgcttttacagcctccgctctcaccggatccaatggtcttcacttttggtgaactagctttatatcctagttgatgttcaaggtgtggaaaattgtgttgcgattaattcctatcatattagaatggctccacgccaacatagcctgatttctcttgacagtatctacgatgcttgctttcactgttgagggtaaagtgtaatatcccagaaaatataaaaatatttatttttccatattttattaaatatgtgagtatgtgggtattgaagtaagattataatcttacttaagctaattgtgggttaattagtaaaaatctagtaaataaataaataaagtgtaatttattaattacagagattttattagattatgggagtattgtaaatactatttttgaaataaaatattttcaagttcgacgaccatagaaactcgacgaagtggtgaataggggtgtgcaaaagtcatccaatccaatcccaaccgactaatccaatagaatcggatatcaaaatcataattggatcggatcggatgcaaattttaaaaatccaattagatcggatnngatgttggatgagacatccgatccaatggataatcg

SEQ ID NO: 18227 - DNA, 4780 bp, Cannabis sativa
agacaatgaccttgattttccaaggtcttactatactaataataataatatggccttctattctttcccttgtttgttcttcaaatcttttctttttttaatcaatttgctcttaataccaaacaattattttaattaagattttccattaatagcaaaaaaaatgtcataaacctttgctttctctattgcatgcttgtgtttatttccttccatttttctttgttttctgtcagataataaatatagtcgaatttaagataataagatgaccacatcaataaaagcactcgtattaggtgatgtataataaatatagggacactactttttgtatacttagtcaaattatgactcaatttataaaaaaaatgaataatttatctgctcaaaataaaattcaaacactcagctatatgtgtgtttattttatatatatatttttttatatacacgtgtaattgaccattttgaaataatgtttttagcatttaaaattgttgaaaattggttacaataatacaatgtaatgaggactattatatgaaaatattaggccataatttctctaaatactgaaaacaaaaatacttttatccttgaaaacaaaagttacacttctattattattgctcatatatatatgtgttaaattataaagaaatagactccagaagatgaagtattttactctttttgtttagttacatatggagaaaactatttagagcttcaaaaagttattttattaatgtctcacccataatttcctcttctaagaagtatagaaacgaggctatttaatatttttgtccatgaactatgacttatgtattattgtgcttttggatttttaggtgcgttaaaaatagttcttgaattatttacagtgttgtaaattgatcattttcttaagttttttcacacgtggcaaataaaatgatagcatggctgcttagtcaattgttacgtgagtaccatatcaatgctacgtgtgtaaataatttgaaaaaaataatttaatttttttaatttggttttacgtaattttcttaattattaattgatttttagtttaatgattttaaaaaatgtataatttttatatttttaatgttaaattatacacatggcgttgatgtggcaattgtctaaacaactgtgtcatcattttgtttgacacatgtgataaaatctgatagaatgaccaatttaaaatattgtaggggctatttgtaacgggctgaaaagttcacgagacataataatacttatgtcattgtttgagagaaaaaagtctttattttgacactgggagatgggggattcgaacttggaatatcctctttgtgagaatgagaagaagtatgaaactactaggttatgtctccgaccatggaaacaaaaattttaaataacttaaatactattgaacaagcaaagtcatgtctttgattataataaattaaaaattaacaattcatcaatcccattttttaaaattcttttttctcgtgggaccaatataatttataactaagctaatttcattacaaactaatcgttttacaactaaacaaaacataaatctctatatatttgttctcttcagtcctatttcgactgccctttttctaatatgaaacttcagtggccacatttcaattattgctttagttttattgtggtaaaataattatggttctctgcctcaaacatatatatatatatatttatatttatattactagatgggaggaatgtgaactgtgaagaatgaaataatactaatattactagattaacactgaatccatagatacattccacatatcataacttgaactaacaaaaaataaaaagagttgaaaagtgatagatagacaaagaaaaaaccattaggtaaagacaggtttgtactttgaacacatatcattaacaagcatcattaggtaattgagtttgggtaggcttagcacgactcgtgttatctctacgtgtggcaacaacatagtagacactcatagctagtaacacagcaaatgctaagccaaacacaatcccaacaatcccaccagctcctaaactgctctgtctgtcgtgtcgagtcaacattttgttttcttgagcaccattggcttcaatttgagctgccataggtagcggggagcaacttgactcggcgcagggttgtgtttctcttttgttgggattggtttgttgtttggtggggtggaagaaatcatatgctgatggtgagaaggccattggggattcattggctagtccatgtggggctctgtcttgagcattggctatggatagtagcattaaggttagagaagtggaaaagagtaggagagaaattgttgttgttgaagtcatgtttagctttgatgggttgtttagatttatcacttttgtgtgtgtaaagagtctaagtggttcttttgtgggatattgagttgaagtttttgatgttttggtatggcttttatagggtcatgtagggagtttcttgcttggtctttaattttggttatgaaaaagaggtcacaaagtgaggagacagaatgatgaaatgtgtgtactctctctctcttctctccatgtgattttcccaaattaccctttactatgtgaaaattagaagagtatgcaattgttcatggcatgaactaatgaaatttatatgaaatagacattgatgttaggcaatttaaagtgtacaatactatacagtatatggtacgttgtaaatggtaaataattttctaaacctgataataaattatactaaacagtatttacttcttgtgatacttgacactttaaggtaccttttagcattttttgaaaaaaaaaaagtgagaggacattgaatcaaacaaaattgggaaattgttgtagtaagactttaaaaaattctaaactcatttaagagtgatgtcttattactcttttatcaaataaaacattaattaataataataatcaagtgtatacaaatatcattgcttagtaattgagtaccttaataaaaaaaattagacactgagtacagaagattataatgatttgttcattaattcatctttaatagtttcttcactacaagtgtctataagtaaactcacaatgtccatgcttgttgtatagaaataaattatttacaattattaacaatttcttttatgattaaatataccaatttttcatcatactatatattaacaaataatttaaatgtgtcataataattcagagtacacaaagctttaccaacacgcgagcatgtgtgttcattaagcatcatatcatataatataaatatatatatatatatatatttatatatataatataatggccatgaccctattctcaagaatgactttatcagaagaaataacactattttttaacaataatgaatttttttatgtgtggtgtctgaatttcattttgaaaatgtttcatagcataggtcaaggtcaatctttaagcttaatacaaattgacattttagtagggcaaagtgcaagtgtaagagtgcttgtgtttctttcattgtttttagtggtagaaaaaagtaatgggatgttggggatgatggtgtttcttagcttggagggccagcaaaggctataaataacataatgtaagtgtatatacatttacatgatgtgtgtaattatagtttaggtatatttatatgataaatataaaagtggttcagcagtgtctaatactactacaagatgtcatactgctattattgtactgtgtaattaagtattaggttttacttattttacttcaataattattatataaaacggttagacattgtcagagttggctttaaaatttagtaggtcataggaaaaaataatttttgaacctatatttttttttaaaaaaaataagagttttcaaaataagtaaagaaaatatatatttttaaaatgaaaatttttttttagaccctagttaggtaggctttaaacataggtctagcctgcttatgattagggccgagtttgaactagtagtgttgaacaccaatgctcatatctatattgataactatagagggatgtgtttgcctttttataattggagagctagggtgaagactcaagggcatgtttttggctaaaatacaatgcaattgtaattgcaattatcttactttcccactttatcattctttacaacttattagttattacatcatatcatatgccttgccgtgtacactttcccaaattaattatagggtcatcaagattgagattattaattaattaaggtaagaataacaaattatgatgatgaatttgtgtaattcaatagtttatttgcattgtaactatgaatgaatccttttatgttgaagtcctactactaatcctttttttttctttttcccctcaaatcattgcattttacatagtaatacacaattttgatagtacatagcatatcaaagatcattcctagtacataaatttcgaacacttccatcaaaagtgacacattttcaatataattttaaagaaaaaaaatcaaatctcgtcacaataaataaaatatacatacaacatcattcatatatagtttaccaaattagtcttaccaaaaatactatacacataaatatggtgggttttaaattctactcgaaaccccgacccccgactacggccctgggcttgagacaccaaagcctaaagctctaaccacctactactaatcttttgatgagctaagtaac

SEQ ID NO: 18228 - DNA, 3121 bp, Cannabis sativa
cttcagccaaaaggacagaaaggtagtaataaagtcggtccattatgacggtggattggtaacgtaaacttgaagaaaagaaataaaaataaaagttaaaaaaatgaaaaaggagagtgtaaaaacattgtcggctgactctaaagtggtgaacatatacatgcatggaagtccacgcaaactttccaacaatggccagaatttactctatgcaacttttacaattttttattattgtccgtttttagcatattgagttacgtccaacaggaaatggcatgtgaacacgaaaatctaatacaagatatttaataaagcatccaaccgatttctggaagaacttgtaaattaaaattagtaaaatgactatattttatatctgctcaatcttactaatcaatatataatgctaattagatttgtgattataattaaagacgatattatatgaagtttgaatatacacacgtacgtacgtacatatatctattaaattttgaatgatcgatagatagatatgaaaataaaagtagtggagtcggaaattaataataaacatttgttggtattgaatgagaaggtggaccacccatgtgatgatcaggtacctggtatacggccatccgcatgaaaataaatataagatacggtaaaaagtgttttccaccagtacttgacagagaccatcacttcgatcgttcgtttctcgcgattctcaaaactcaaaactcaaaactgtcaccgcccttccaataaaagctccaaacacatccttatttactactgtttggcagtacccccatgcatggctgatggcctgtaaaacctactcatctatatatgtgcttttttagtgagccttttatatacataggtttgctgtttttgatcagaatctagtaaatatcgattgccaaggcataatatttactaagtgcttaaagtaaagttgatgatgatgtaattgactcgcgaggtttgacataattgagcacaaaataaaaaataaatgataattatttaataaatttcaaaaccaaaaatctttactatttgatatatttcaaaacgatgtcatgtgtatactttttttgttcaataaaattgtgtggtttcatatgtggagagagagagagagagagagagagaactgtgttatatatattataatcacacaaataatgattcaacctagctagctagcaggctaagaccattattttgtgacacaagctgagttgcagacagaaataagttatactttagagaatttgagtggctgtatatgaaagcttttcaataaagttgcttccttcaatttgatgaatagtaggtttcaaagaaaataaaattgatgaatagtaaaagctgttgggatatacatatatataatatataagcaaactataacaaagtgagcaataataataatcaaagataagatatatagtccacaaagcactctagatcactagtcacagtagctgatacgtttctagccaatgagaactacaggatgttggtaatgatgcgatgtcaccacaaggaaacaattagctattatacagttcacatcacaattaggccgctgccctaccataatgtaaccaattatcattactcttactattactgtctcatcaatgctcatatatattttttcatagacagcctatataagtgatatacatgatccacttgccagtcattcgtgtacatatatattataataaaggtttaattgttaataatcaatattgattatcatgatgattatgagttaattaagatatcaatatatatctagttttaattactatatttacataaatggagatcatagctgtgacaactgttataactaattagtgccatattatgtgtccaaactagctaataataattattaccttattatatatatatactaatactaatatgaatgtgagcatcacctatttcgcattccaggaggcacaatatctccaagcaatccctgatcagcggaaacctgttgtgaagtagtacttgatggctctttcaatattatatgcccagagtctccagctacactggttactacttgatttgactgatgatcaatcatattattggtagttacatcaggattattattgtaattataagtattattatcactactttctgtgttcaaggatggagtagaatcaattgctggataatagaatttgggcggtggtaagtggcttccgggaaaggaagcaagttcatgatgagccaggattccacctctaggaaatcctactgtgtgatgacaatgttggccttcgtatgttgtgattacagttgtgggatcttcagaagatcgctccacccttttcttcacagtgcatttgctattcgtgcaccgatagtagcttctgcaatagcaaattcaaaaatgtggtcagagtatttcattattattcgtcttactttttttttttttaatacataaagtaaatatatatgtttaaagagggatatatatgaataatgggaattttgtgtaccacctctacataaaaatattgccacttctatattcgcgcatatataggcttaaaatttctagccatacgttttatttctttttctgtataatgtcagcgggtgctcttacgaattaaataccctaaaaagaaaatgtaaatataattaattagtttccactatatcttacccatatatatgtgggtatatattatgtggcagggattttagccgcttaaagatttatacgattctataacagtgtattatatatatttaggtggatataagtgtattatgggacgagatcattaacatataaagtagtgtgaatataaagaatcataataattaacatgagtaacgcttatcaaataaataatgatatcttttgtgaataagctgaaataagaattaatgtaaggatattttatataaagatataaaaaacaacttttcttacatatgtatacattgctcaataaatatgacattaaagctaataatttcacttgatcatcacatgcgtgttaataataaagatatatataaggtagacggcgaggtcataaacggaagtgatgacagaaaaagaagaaaaaagaag

SEQ ID NO: 18229 - DNA, 3703 bp, Cannabis sativa
tgttggaaccgaaactccgaaactgacgaaactgagaaactgaaaatcgaaaaaactgctaacagttaaaaccgccattgaacgatctgtctttttaacaataaaccgaccgttatacatgtatattaatttattaagtttattttttcctttatgtattgcaattactcataatttataataatatattattatattattattattaaagttaaaaaaataaattaataagttttgaacaattaatttatatggttgtagttatagaatgatgtacttatagaataaattagatcatatttttttttaaaaaaaaaagaaaaaattcaatttggacagtttaatccgaccaaaccgagattcaaaacggtcaattttaagataaattctgcattaatcggttggttttcgaattgcaccaatcttaactaaaaaccaaatacaagaattttatatagaaaaaatccgactaaactgacgaatcctcagtcctataaaaagaaattattgttatgtacctttaaatttaaattgtaatatttaaaaaaaatatacacaaaaaaaaaatgtgtactgaatttaaatttagatttaatattttgaaaaaacaaaataaaattaaccatttcttactatagcaaatatataacatgtaaagagaaatataagaaggtgcttttcaaggaataaagatatgtgatattaagaaaaaaaaaaatctagatacaaatattggcgggaatatagatgaaatgaatcaacagcttaaaaccaactactttgcacttgactaaaaaacaacctttgccccacatttcatataaaaaacgcaagagggaaactagaaaatagaaactgctttccaaaagctcacatttcacgcctattaaaaacagttaaaccccataaaattcaacccccacaggccacaggcaaccatttagctaaaagcaaaataacagaccatactgtcaaccctgggtcccaacaccgcccccccttgagcggccacccatccgtcctcgcccacggccataccctcttccccctcctcctcctcctccaccccttcctctatcatatcctgttcctgtacctctttcgtaacctccacctcttcctccttcatatcctgtacctctttcataacctccacctcgtcctccttcatatcctgcaactttttcgtaatttccatttccacctcgttcgtatcctgtacctccgcctctgcctcctcttcctccttcatatcctgtaactttttcgtaacttcctccacttctttcgaatcctgtacccctatcatatccggcacctctttcatatccagaacccgtacccctttcgtatccagaacctgtacctctttcaaatccagaacctgtgcctctttccaatccagaacctgtactcctttcatatgtacctgtacctataagataagcagttggttcaagattttagttttattgataaagcatatttggatagtcatacttgccaagaagaggaaactaaactaaaggacatctttattgatcggtaatggaaattaaggaaagaacttggaagggtattgaaagtgaaactatacactgcccattacagttaatagaagaagtcatcaatcaaaacttcaagtgaacacatcaaaatgagttctttcctaggtttaatactttattagtatgcaatataaacagccgaacacaactattagtttacaaagcatcaatgaaggaaacagattgcatgaataattacggttatggaaactactcacctcgataacctcgacctctgcctcttccaccacctctaccccgatttgaatatccaccattatctagtgaaagtaagtgcatgtcaaaatactaaggttagaaaggaaattatttggtaatcattaactgaccaataaataaatttgagccctcaagatattcaagaatgtattaccttggtagtttccataacctcctccataatttccatatccaccgccttgatagtttccaccaccatacccaacctgatagtttccaccatacccacccctattccaacccctccctcgtcctctaccacggccccgacctcggttatacgaatctaaaagcaaagcgagaaattaagaatatataaaactgtagaagcatgttgcgtggatgagaaaacatgttgtttgcatcaccttcatttacagaattatatggcacacgaggttgcctaggttgttgcaactgctgctgatagtttggctgtggcttagactgatccccttggtaaggctcttggtaactgcacaaaacgttcatttagtcagatgagttcaaagcacacaaaaagaacaaagttgatcaattatcaagctgaaatgtatacccaggagaggatttgtcaagctctttagttgataaagtaattgaaatcatcgagacatgacgagtcatctccacactgcatcagaattttaacaactcagtaaacataaaaaaaatgaacagaacaaaaccatcaaaatgtgtgacatgatgctatcacagcagattacagcaaaaagaaatttcacataattatacattaaattaaacatggaaatactatgaaaccacacttacggcacaagaccctcttcaataggttcccatacgtcagttatgctcactgagctgatagcagtatcttgatgcaacctaggaattctactctgttttgtatgaacaaattacatattagttttgtaacagtataatagagagatatggaaaacttcatcttattacaagattgtactgacctttataatctctgaaatggccaccgtcttactgattgcctgacccattgctttcaatacaatctcagccactcgtttctcctaaatacaatatgaaacaaaacagagtgagaaattttcagttcaaacaacaaagcaaaacatcaccccataacactaatcagccccaataccacaagataaacatgcaacaaataactaaaaggcaaacaaggcatgaaaacccataaaagacacaaaagagagatgaataaaagaatcaaccaaacaataatttccttcttcatttgactcacattaaaagcttaatattaccaatcaaattacaatacacagctaaccaagcaattaaagaccattaatctgaaaatatcaaaacccagaaaccaaaacttccttcgatgataagtaataatagaaaaatccacaaaaatacataaattaacaaacacgccaagacataaatgccaaataaaaatatatatgttctgtactgaactcaaaaacactgaaatctataataatctagaacagaactcatcaaatgaaaaatagtaaagagtacctggagaagagtggtcgcgtagctgatatagtttctgataacaccttgggtggtgattcggatttcattttcattgatgggagattcgggcttgggcttctcaaccctttgatacctatccatgcttcaatcgatttttttttttttttttaatttcgtgttcttcgtttggagaaaacccttaaaaccctagcagaagaaaacgagagaggagcgcgtgagtgaaaattgacttaagcgttaagactcaccacattccttaacacttttgggtcattcttcttatatatcataaaaactccgatttgttgtgggttttccgcacaacgcgccaa

SEQ ID NO: 18230 - DNA, 6442 bp, Cannabis sativa
tatttataactggcccaaattgggacttcatttttttataacaaattagaggttattcttgaatagaggttctactgtaccatatttgattgcattcacaccgtaaatgaagattcaatcaaatcttcataaaattgtggatcaattgctcaattaaaaaagatttatggtgattggaaaaaaaaaacaaaactagtaagtaatacacggcaaaaacacgtcagcataataggatatttaaatattattataccataatatttgaaggctttttctttttctgcataatagtaaaataactaaagatggggcgtcctaaattacctctgaaattgataccaaaagatagagcaagaaaaataacatttttgaagagaagaagtgatctaattaagaaagctcacatggcctagctaagaattctcatgaagctaggtctctcataaatgattttacataacttccatggctcaaaaacaaacttcaaaaagacttcatactatggcagatttcttaaaggaaagaatcaagaaagtaaacacaaaaataggaaaattaggtcaaactcaaactatgactactaccactactactattaatactagtttaaagtctaagattattgtccttggtagtggtagtaatcaagaaaaggctatcttagaagaaagttacattgctgagctcaatggtagtaaccaacttgctgaatttgtttctgatttggataacaaaattgaacaagtgaatgaaagaatcaggcatttgattcatctcaaataaaaatggactgtgttttgtgtaaagtctagttgggcacttcatattctgagtatttgagtttttaaagaaagagaatgaccaatttaataaaggagcacactaaaagatctatctttccgtggttcaagctatctgtagctctatggttatgctttctatgtttggcaaagttattagtgattgtaagaccttgttgtgtactttgcataatgtttctcttcattttataaaacgatcaacaaatgtagcggctcactcctttgcgagagcctctatataccaccctgatcgccatttcaacttgaacaatgtttcgattgatttgttaccaagcttggtaacataaagagcatcaagcaatgatttgcaaaacaattccaagtaagattaccatgatcaatttatggatgagaagatctttttcctttgtctactctctaactttcgtttaacagattatggtaatcctttattcagttaaagatatgaaaagtcattaatgaaaatcatataaatacttgctgctacaccacactaaagttttaacttagcttcaccatacagattgaatggagcactcaatcaaaatatacttttttttttgagaaacaatgagaagatacttaaacatgcacacatagtagtgttttgcatgttacttatgggtcccaattttatctcacatgttggagcaagaatatgtcatatagttttaagtgtttatatatattgttacagctgctgagatgagagcattttagcagaacagtatatacttttgacaacttggtttgcattttgtcccttcattttagtaaattaaatccatgtagtgctacaatgacctgacaaagccatgtgaagtgaggctgagcatgattatcacaccactttcattttcactttcccatattcaatcattccttgtttgcctcttatgtttcctggtttcaatcaaaatatcttatgacaaaacattcccaattccattctccttgtcaaatttgaaagtctaaaactgtcattaataatatttaagaaagaggtgaccatgcaagcaatagaaattcaaaatgagctatgaatgagagccaagactttcacgtgtaacatttaatgataataataataggattattgataaccatttcaggacttgtgcggttttacaaacacatcaaagccctttgaccttcaaattttaaagagggtcaaaacatagctatcatttctctcagtacatattttgcttcttcttttttctttttttacttaataatataatgctctcaagagtttacacaaacttacacaagtggtcttaaggagactcagcaacgagtaattattcaccaggctcactcgcattaaacctacttaacaagattctctctaccagacttcatccccaaaagcttgcgctgtacggaaaatctgtgagaagcacaacacactgcccatgtaccacaaaacctactaagttgacacattgttgccagcgcttagtttatgctgccgaacctgcttgctcgcataggtccaataaatccagtgtctgcagagtaatttaaagttaaaaacaccgttagcatgtgtacgtatagcattcttagcagatacctatcgaaatgttgaaaatatctatcatacctcaggaactgagagctcaaggcgaaactttggaccatcatagtgatgtaagactggcctaaatgaatcttcttccaaagccttgcacacttttctaacacggatcctcacctgcaatagaaggaaacatttggtctcaatgttgtcgtctcccaaatattctaatcgaactatcataagaaatttctcaaaacaaatcttacctgagcaggaaaccttgactctcctttgcacttcttatcttcccaggcagttggatcaatgtttgaaccaccaaaacttgcagcctgtgaaagaacattacatatgaaattaaaataacatgagaagaaggccgcattcaagaaagaatcatctaccaattgtagattagatattaataagattttttaacctaacatggttgttttgcatataaaagtaacaaatagttaaagaacaaacctcaaagataccatgtagctggtgagtagtatagttgtagagaaataagggtaagcctggtgttatggcacgaacagaatccctatatcttggaggtaaacctatcaaagaaacacaataatcaactcaaaatcatggataataaaatgtgacattcttaacaaatgctgtgatattctaaacatacatacaaagatcatttatttgcagatacagcctaagaatgcagtgttgaattattaaaatagttgaatttaccaaatagctgccgcttcaaatcttcttgcatagtgtcattgttgcaaacgaaaatgtaacctcctagcacttcatttcgagggagggtctcggtagcaggcaaggtcttaaaccttttgtcagctacattgtttgcattaccattgtcactattgttgttattgctgatgttgatagagtccttgtggctcaggttgtttccactatacttgttaatggtcatattccccacaatgtttgcattactcttctgatagactgcattcatattgaacattccatttctgaaggaatttttgttcaagttctcattcatttttgaatccaaattcagagagttaaaattgaggatttcacatttgttatcttcctggtacccaaatttgtccattggccttggctcaacaggaccctttgaaagatcaaggttattcatgcgctccccttttaaccttgtctgttcagctaatttagaagcagccatcaaccactggtgatcttctgaaacttttgactgacctctaagctgatctcctaattgccaaaagctttgcatgttgttctccatcttgtgatacctatttgagtttcaaataaaaaacaaaccctttaacaacaaaagcaaggaaagtatagagattaatgtttgaaactaaataagagtgagaaaatactttaaaatatatacaaatccaagactcatttcgtttaacaaagtcttacccttttcaaggaaaaaatatgtaaaagaaaacaaaattaaactaaaattaaattttaaactgtttcccttaaacattcagcccaataaaggaaattagtcaataaccaaaaatatacataaagatcatccatttcctttattttcttccatattctgaccaaccaaacagcctatgaaaataagaaagagagagagagagagtaaagtcaacccaattaacaagcaaaatttagttttaaattttttgaaagggaaaaatttagttataaaatctaaaaacacaccaaaacatcccaaatctcagcctaaaatgagcaaatcagccttaataatacaagaaattttcaaacaaatctactcaataaaacatccagtcatgcattttcattcataaaccaaatcagaattataattaaccaaaacataagagtaattaagggaaaaaaaaaaagcaagtaagatcttggactaaaagaaacctcggaaacgaaagttaaggtccgataaaccctttagattggtgatgaagtagccctagatttggggatcagagagagagagaagtgtaccttttatctgcttggctgtaaaacccagagccagaagacacgacagagaagaagggcagttggattttgaagtgtatttatagatccatttacccaaaataccttaccatgttctctcatttacattattgccattcaataaagattaaatttttaaaaacaaaaaataaagttttgatttttaatacaaaaaaacaaaataaagttttgatttttatttcttatttcttgtgacaggcggtgttgcattagggacggttggcaaaaatattaattaattaattaaaaaacatagctatagtttataaaattacataattttgtcacttaaagatggaaagaatgattttttttgataaaattttgaaatgggttttaagataagctttgtacttttaagaagtgatttttttaatgaagaaaagaatatcattgtcggaaaatttttaaataggtttagaggaatataatatggcactaatctcatctcacaaacgagaatagataaattaaaaaaatttagataacgtactcaatcatgaatacgaattccgccctaaataaaagataaagactagaggtgttcatataattcgtaatttgtggttgcaaactttaattagttcggaccaaactatttgagattagatcaaataaattcggtgtgaataatttgatcaatccggatcgttttatattttctggttcagtcactattttactagtagtcatgatataattcttactaattatttcataaattagttatttttgaattctaaatgtaaataatataaactgcgaaatcttttaggtaaaatatatttatttaataaaatatttagtatgaatcatcaaaattggtgcactaaaaagtgaaaaaaattatactaaattattgtatattctacatcaaattggtataattactagaaatggtattagatgatatttttgcttcattgctctttaaattttcaaagaatctttattttaattttatcatcttctttttatttcaaccttgaaagaacacccaaaattaacaagtcattattcttcagaatcttcactaattttattatttgaaaaaaagaaaagaattaacaacaacaacaacaacacctcatagtactgaaaagttggtttgttcctgtagaagttgtcggtggtatggataacattaaatgcttttgttaactcatttagcactaataattcctcatagtttggctctaatcttagtttgtttattatgttgtttttattcttcactacctaataccctaatacctattattccttgtcttcttctttctcttctctcatgtaagaagaagagtttcatttcaaaataatgaatcaaattcacttttcaatttaaaccgttgataagagctaatctaataattaattcccataagggtttttaaaattaaagttactcaacacaaatttcttagtcaaacccatgattaataaataagttatctctattgtaccttttatctttgtgttattatatttaaaacgtatcatattattattcatttcattggatcctagcataaaaccccaaaaagcatccaagagaaacgaaaaataaagcctacaaaaaaaaaagggtaaagagtaataaatggctgaaaatgtttagccaaaaagggagaattgaaaaggaaataacggccatataaattgaaatgtgcttaataataatcatcatcatcatcatactactttctattgatattagacatagtatgtgaaagtattaattacctacttactaaatccaattatcgagtttagtatcaaactttttaccattttgatgaatcaactctagaattaattgaatgacttaaagtaaaaagagatagcaatttacaaatttcacttaacctaaaatatatattttaggcggtgttgcataaattataatcactacgcaagtatacgcaatcaagtagtacactcacacaggtgaggtcgaaccacagggaattggact

SEQ ID NO: 18231 - DNA, 3591 bp, Cannabis sativa
  modified_base (2846)..(2851): a, c, t, g, unknown or other
tggcgattggctaatcactagttgctgctgttgtggttgctgctgtgttacaacaacaggtgggatcatcacagctggaggagatggtgcagcagcagcagcagcagcagcaggaggaggtacagtagtagtagtagtagtaatggcagtagtaataggggcctggggtggagcagtagaagtagtggtaattggaacatgatgatgaatagtaacattgggaatattgatgatatttggagtggttgttgcagcagtagaagtggttattgtgttgagaggtggtggaggaggaggaggatcaggcaagtggattgtctgcccagtaatcttctgtagaaaagagataatagcagcatcccttgtagcagaaatggttcgctcttgagccataagctcatgttcacgactcagtctagccatctcttgtctcttccaagcctcatctcttatcattctgtcctgttctcttttctcaataacctccaagaatctctgctgcatagcctcttgtttttgcataacctgtttcattaggttctcaaaaaactccatcgtactaccactactgtgcctgcttgaccaatctctactcttacgtttgcggctgctgctaattcctacaccagccgtggaaggctctcctaattcgaaaacatcatcttcgttgtcgtcttcatcgtcatcatcttccgagccatgtgatgaggatgcggtgttggaggagaaactgagtgcagggataggagctgcagctgttgtaatgggctgctgctgatgctggggttgttgtggttgtggtggttgtggttgtggttgcggtggtgggtgcgtgggataattaggaggtggaggagtagtgatagtgatgttaggagctctgaaagaggaaatgggcattgggttactgataccaacgccgagagagggttgagaaggaagaggaggagggagggtttggtggtgaggttggttaaaggcatggagagcttctagctcggtgaagaacttgtaggttttaccatcttgacggccagcacggccttctttggttcgtttgtagtatttgtgaacgttttcgaatttttctttgcattttttgccacttctcttgtaccccaactctgctagcttcctgcacagtacttacacaacgtcaacaaaactaaacgtaaatatatataaatcatttttctcttctattaatcgtacaattaagatgttattattagaatttactacatttctaatattaaagacaaatagttaatgcggtgagtgagtccatctccattctccatacgaaaacatgtaggcaggcaataaataataataattgagagggaaagagagaagagagcgcgtgtgtttagacgctcattattatatttaataatatttttgaggtttagaagaaaagaaatcctctcgggatttggaattttcacaaaaacaaataaataaagatgatgaatgattctttttcttttaattaaaataataattaatcattaatgatgattaaaaataagagatcaagaggaatgaaatagtagaagtagtagtagtagtagtaggcgattgagttttattagataatacacaaatacaaactcatatgctatatctggatctgggacgactctaatctctaatatctaatcttatactgaaatgtgtgctttctaattctctattgaaaatacaatggctgggatttccttattacctacctacttactctatatctatctatatattctcttaaaataaaataatgaaaagagaaagaaaagagagatgcgcaactagtaaacaaaacaaaaacaaaactaaaactaaaactctctctctctctcgtgaagcgtgatggaaagggattgatgagaagagaagggaagggaaggcatgtcatgtgcactacgaatactatatgcaactgctactacctcacaaattaaccaatgaaccaaatcaagaatcaaatcaattcaaatcatcaatgatttaatttgattagaccacacaaaacaaaaccaaaccaaacaaaacaaaacaaaacaaaaccaattctcttttctatctttctttcttaattaataatggagaattggagaagaagaagaagaattcagattattaataattaagatatagatatatatacctggagacatcttcccatagtggacccttgagtgtggcatcacggaacacagtgtccatctctgacctaattctgagaagagctaatgtttcttgcctaggccatcgatttccacccccactgctcccacctcctccgcctcccccagaagacatggccatatactcatctaaattcagagatgaggctgcaggtggccggctgctgattggagacgccgcttctactcctccactacctgttgcttgtacttccatcgccgactcagtaccacctgttgttccagtagtatcctccatcaacgacactcctccaccgccaccgccaccacctccttctattccgtgctgcatatatatatatatatatccctctcaaattgataattaaaacctttgtttaaataataaaccaaattgtactaactaataagagagagagagagatccaaatcgtataactaataaggattattgggaatttggatttggtttaatttgagtactgtatttacttgaagaagaaagggatgaaatggaatgaaacgcatggaatattatagcagggtaagagaaagagagagagagatccagggcagtactagtcgagtttttttaaaaatcttcttttaaggaaaagcagcagtaaagaagacaaagagagaaagagagagagagannnnnngagagagagagagagaatgagaaaagaggtagctaattaagcaagagtagaagtagaagtagtagtaagagagagcataatcatcctcatcatcatcatcatcaacaactagtactactgcactactgtcccgttctgatgaggcccctagttattttttctctctcctctctctctctgctgtttactgctaccgcccacttttttttcttttaaaaaaaataaaaatttttaaatgaaaatgactgtgagaaaggtacccagcgaggttggctatggcaaagagagatagaatagaaaagataaatagagatagatagagatagcagcaaagagatgatgggctgtggggaagacagagataaatgtagagagagagaaacaaaaaaatgagagatgacgattatgaggatgttgatgatgatgattaagaaagagaaaaataaataataaaataaaataaaaaaaaagagtggagagagaaaaaagagagagtggtatgtatatatatatagatatataagtagtgttatagtaaagagtaaaagagataggattgtatatattaataagatgctgtgttgtcagggggctctcactttgctgcatctaataattgccattaaccatttttagttttaccctctttcatttttatatttaatattaatgtctttttcttgtaattaaacacaacttattacggctctgtgtatcaattgcaaatgaatgtacgcaat

SEQ ID NO: 18232 - DNA, 5749 bp, Cannabis sativa
caatacatattaaaaaagaaaaaaaaatcatattatcatattttcatttttattttaaaaacaaaagagatgaactttcactaaaattaatatcaccaaaaaagacaataaatctgccgaataatgtaacaccaaagttgtagctagacatgtgacacgaagctctagccagacaatgaattactctgtagcaaatcaagtaacaaaacacacagaatattgtttaaacaataatgcactagcaaacggttgaaaggtggaagacatagggtatagctagccttaaccacgatctaaatgtcagtctccagtctccaccaccgcacttcccaattgcctatcattttcatttattcttaattttaataagtattcataattttgcttttttatattatgcttttgatcccacccaccaagtatatattatagttatttggagaatcttatgatttttttttttaaaaaaaaaaattaaatcatatatggtgctaaaatagatttaaaatataactcaatcgttttaggggcctatagtttaagcttaaaaactacttgttttaagatttttggtacatggattaattatatcccttttttatatatctatatatatataagcaatttaattataataaattcacacaaatttttaagaaactttaaatatttatagcattaaaaatctgaaatcaactgtttccaagactgttttataggcgcgtaaaaataaattattttaaaatttattttttgtactatgaattatacaaaagttcattaaaaaaaaaaaagaataatgaaaaattataagtaactatagtattcacttgtaaaaaaaattataatttattgtatgtgccgaaaaaaaaagacattcttatcaataagttgtaagggcttacgagaaccaaacactatacttcgccattattttcttcttctctccacttcaattcaattctatatgtactttgactctatgacttttccatgcattgacatacaaacgaagcgctacaaagttatttaattgatgatgattaatgtgattataattttacgttggtgctactttcaaattctattggtcttgtcttttgacatgtgttagggttttccctcgtgattgttcagacgtgtatttcaagttctagggtttaaagtgtcgtaagattcaagtcttgtgatttccagatgtgaggttaaaattctagggtttaaagtgtcatgtttttcaagtcatgtgggtttctgccgtgcgttcaaggtttttgaaggtttggtggtttgcggttcagttcttgtgggttggagtcgggcggctcaggtcttgtggggtggattcaagcattcctagctttcttctgcgcgattcagattttgtaggggtgggagatctgcgattcgggtatttcaagggtgggagacgtgtgattcaaatattacagtggtcttcgattcttttttggtctcttgtcgtgtgattgattctttcgttgcaagttggggtgtgtgatcggtttttcgttgaggggttggaggtgtgtgattctttgttgggttttttcatcttggaggtttgttatttaagtattgcctttgtctgtttccgatatggcttctagcagtcgcagtttaattagatgatttagaggaccaatgtgctcaggttcaattggatgatgaggaggagtgtgtagtagagtttgataatgggtttgaggaggaaataattgtggatgatcggtggttcattgttgggcagtttttgaatgcacgagctattgattttgattccatgaggcatacaatggcagggctttggagacccgtgaaaggaatgtatgtcaaggaattagggtcgaatctatttctattttagctttaccaaaaacttgatctcaagtgtgtggaatgtatgttaaggaagggtcgaatctatttctgtttcagctttaccacaaacttgatctcaagtgtgtggttgatggaagtccttggacgtttaatagactccagtttttatttggccgagttctaaaggtggggacctgaagtctatgaacgtgtgatacgatctgctacggtgtacattggtactgttgttgagtcagatcctaagaataattctggcttttggctcgagtatatgagagtttgtgtgactgttaatatcgatgaacctttaaaatgacgaatgaagatgagacaaaagggtggagaatagttttgcactaactttaaatatgaatgtgttccaacgttttacttagtttgtattattatcgatcattctaagaatttttgtcataaagttttgatacgccagtggaggagattatgaaatcgtatggtaagtggatgcgagttcagccaaagaggcagaactatctgttgcattctcaatatcgttggtcatgtaaggaggtgttgagttgaattgggatagttttcttgagaatgatgctgtaccggttgatcatgcagctttcgatattcaagacactagaaaggaaagtttctagggatagaataccaaagaattgattttgtaaatcaaggaaggacaatcaagaatgctctcaataagggtattattattgcaaataatattcctaattttgtgagaaataattaatgagttggcaaatagtagagttggtgttaaaatgggccatcacgaaactaagaggcattgacctaatgatggtgagaatgagtctcattaggctatggctatggagactagcatgaatactattgtggagtttggttcgaattttgatgggctcgcaaaaaatgggctagatgtgggtcttggtttccaggcccactaggtattatgagtattttgagttggaattttcgtgggcttaggaatccatgggctattcaattccttctgtgtctcatgatccaaaagaatcctaattttgtttttctttgtgaaactctttgtcataaggatgtggttgaaagggtgtgtgtgtctttgggtttcaatggtatgatggcagttgaagtttttggtaggagtgatggcgattctcttttatggcaaaataaagatggtattgatcttcttagttttgcttataattatgttgatattgaagttatctcgtttggttcttatttttagcatttaactggattttatggtgagtcgaagagaagcttaagttctgagtctttagatcaacttcgtgcacttgcgatggaaagtaatctcccttggtatgtggttggtgacttaaataatgtgctttcccaagatgattaaattggttgattgagggctttcaaaatacccttcaagttttgtggtcttattgattttgaacttgctagtcatcagtttacttacgtgggagaaaagtcgtgctactaataattggttagaggttcgtttacaccgagcgtatgtgactaatgagtggatgctactcttccccattgtgaaattgtttaacatagaagtttcctcatctgatcattgtcctttgttgtttgacctgtatgttgctgcttttgtggcctaacaatgcaaatttttctttgaaaagtgttggctgcgtgaaccattttgttatcaagtagttaaggattgttgggagggttgttctttgtttggtatttaggaaaagattcagctttgtggagcttttctacttgagtggggaaaagatattttggtaattttggttctcgtataaagttctggcaaaaagagattaagatattaaaatagggtcgcgacaacgattccattcagaaatataaagaggcataaaataatctatttaaagtaatgactcaaaaggaagttttttggtgacgaaggtctaagtaattatggttccaagaagtgatcataattgtaaatactttcatgctaaagcgtattctagtcatcgtgtgaatagtattcataaacttcggcgtcttaatgggagttgggcggactgggatacgggaatcccaaatgtaatggtgaattattttaaggagctttttgctccttctgatatcgatgccactgaggttcttaatgggattccttgataaataaatgatgcagacaatgaggctttgttgaagcctatatgcgatgaaaaggttaaagaggctctttcccagatgcatccagataagtcgcctggtctagatgatatgattcctggattttatcaaaaatgctagcgcatagttagggttgatgtggtgaagcaagtccgttctttttttcttttttggcgacttacctgctggatcgaattagactaacatagttctcgtcccaaagaagaagaaccctcgaaaaaatggatgatatgtagcctatagctctttgtaatgttctctataaagttttctctaaattgttgatttatagtttgaaggaagtattgtcttatattatttttgataatcaaagtgctttcattccgggtcatttaatttcagataacatcgtgattttctttgaggttatgcattatttgaagacaaaaagggttggtaaagaacggtatttggctcttaagttggatatgattaaggcttatgactgggttgagtggtcttatcttcatgctatcatgctaataggggttttaatatttggatagtggagttgatttatcggtgcatttccttggtaagctatactattactcatggtggtcgtgatataggtcctattatatccctgacaaaggtattcatcagggagatccactgttactacatctgttcctaatttgtgaagaaggtttctcctgagttatcaagcagtttgaggctaggggtgtgttacatggctgccaggtttgtaatgaggttcttgtaatttctcatattttatttgtggatgatagctatgtttattgtaaagctacagagtgtgaggctaggaatgttattcaactcctccaaacatttgagaaggcctctggtcaatgtattgatgtctctaaatccacgattttctttagtatgtatactatccaatatattaaggaattaatgtgtgggatttcgggaatgtcagaagcctctgctgatattatttacctgggtcttccttgtatgatgggtcatactaaaaatgttatactgagctttctgaaagataagatgcaaaggagaatttagagttgggaaggaagaatattatcaaaggcttgtaaggaggtgttgattaaaacggtagcccagtctttttcgacttctgctatgttagttttttttcgtatagtgggtttgtgtaataaactagaagagttgatgagtaatttttgatggaattttggttcttctcactctcgtggggtgagttggtttagttggaagtgcttgtgtgctcctcgtaatttcggtggtcttagtttttgaagcttgcgtgagtttaatctttatatgttagggaagtaagcttggcgtctagtcaccaaggagagctctcttgtaagttgtctcgataaggctcggtattacccacgtggttctttcctttaagcttctcttggtcccaatacaagttttatatggaaaattattttggaaacccaagatttagtgagggttgagactaggcaatcggttggccgaggtctgatattttcatggttagggatctgtggcttctatattctacgtcttcttatatctcgtctagagtggggttggatggttgtaaggtggctgatctcatagtggtgggttcaagagaatgagaattgga

SEQ ID NO: 18233 - DNA, 3353 bp, Cannabis sativa
  modified_base (2214)..(2218): a, c, t, g, unknown or other
taaaagaaagagttagacaggataacaatcctactggaccattcaatagccaccaccacaaacgtgccttcagcattgtcatttgaatttccttaaaaatctctatcattccttaaaacataaaaaccaaaagtataaaaaggacccacactctggaatacattgtctttcttttatttggggaggcaaaccatctgaatctttccttttatgcattgaaactatttgcggggatcatgtgtataagtaagtaatcattaagatacattaaaattaaagatgcataataattgtcaaaaactctgaatagtgattttgtctttagtgctgcaataaacaaactactctcaaacgcatgcctttacttggtatctataatttttacaacggccatcatttcacagatgcagcacagaacaatggggatatatcaaaaagaaggcagtgttaaccaaatggtgtatcctaatcctatcaacagattccaaatcctagcaaaacaaaattcaaacaagtggagctcactgcaactaaagaaggtcaacaactaaaaatgaacaaggaagaaatgacatggagcaaaacaattttcattgtttttgcatcattgagtacgcataccaaaaaaatttcttaaaagagaatactatatttccccagtaagttatgtaaacattaatgtgatgcatactaatgcactatataagctgcaatacattgtaaaaccaagaaacacaatgcataccatacctgtccaggttgcattggccacgtcggtgagccaaaaggtgaccctgctggtggtagtgcgccctgagctacacccgaataaggtgaggatggttgcatggggggaggtggtggaccgctggctcccataccaccaagatcattgctcatggttggaccacgaggaggcacaggtcccattgtctgtggaggcccaagaggtggttgtggagcacttccaatgggcggatatcggggaccacctggcatggcaccttgaccaaaacttggtggaccattgctcatcaagccaccaggtgccctagatggcagtgcaaactgaccagtagccattggtgaagatccaggaagaggctgagcaccaggtggcagtgactgtggtgctactggaccagaaggaagaggcccagaaccaggtgcaccataaccacccatcgaaggggggaaagaaccaggaggtcttgatgcaaatggagaaggttggcctacaggtggtccagtaggtctcactggcgccccaccagtttgtaacatggcttgtgggggtcctgatggtggcatcacaggtcttccaagtgcacctggaggaggaggcccagggcgagaaaaaggtgcttgtgcaccaggcaagccatgagaagtggctggcgaagcaaaaggcggtggttggccaaatggggaaggtacagggctagaattaagcatagaaggtgggcggttgagattcatattctgcaaattatcagccagggaatcgggagctctttgggcattaggaatgtaattaggaggtggcaccataccgggcctaggtgcccctggaggaggcacattagcagccattgatcaatcaaatacaacacccagatcccctttatctccttctgtataccaaaaatccaaatttcaacaatccacgatccaatcacataacatcaaatcaaacaaaacaaaacgaacacatttcagaaacacaaacgaaaatcaccatcaccaccataaacaaataatcaattacataaaagttgagcattaattccacaaatttataacgtagtaatttatccaaatccaaaacaaaaaacaaaatcatatcaagccagatcactcatattcctctttctcactcaacctcaaatcccaatcaaaacaatacagattcgtacattaccgcactaacactaactcattgatcaaatttacataatatagtccgtgcttttacaaatatataaggagatctaaaaacattttcactaaaaagaaactgaattatgagtttagattaaaatcataaagagatgaagatgaaccagacaaaaatggtggatcgcctggtaacggtgatagcttcttcttcttcttcttcgttcgacaacgaaaatacccactgaattgacgagaaggacccaaaatacgaccactctacagaggtggagctttttttatttttatttttatttnnnnnattattattattatatataaatgacttgtaatttattttatttattttttacttctcatatttttttttctttttctttttctttttctttttctttttttaggtgtatgatttattgatctttaatcaaaaaaaaaaaaaaaaaagatttattgatcggtgacaacgaacagccaattacagattgccacgtagtgtttttaacgtcacctcatcggctgaaatgggaacttccgacttgaacgacatgtcgtttcattattatttttttttttaatttatgattgtgaacatgttaccaattttttccttcaaaaaacacacatcttctttttactcccttgataaaatatattaaaattaaataaaaaatggcaaatataaataattagaaaaaaaaaaatctttccattgattattttcagcacccaattatttttgcttttatttgtgaaaggaaaaaaattcattcaatcaaacacaatatatatatatatgtctcagacataaacccagtaaaattgatttttcaaagaagatgcaaaatatcaacagctagacggtaagaccccgtgcaccttaactatagcttcgtagtgacaacattgattgaatgtgtaggataggtgagaggtggtgacacacaacgaccaatcctgaaagaccactctttcgtctaaggatgcataaccgacgcaccaataattcgaggaggatgagacacttcgaggtgggtagtttatctgggttggatgcttccaatttttacgtaaactttttcttaccagtcaagtagtacaacagctgtatcttatagcctagcgtggcgggtcgccttttgaactcaataagaagatagaataatctattagatagataaggagtagggcttttcttgcttgtttagtaaagtaacactttttattttgataggagtaggtgcttgctagggcaggatactcttgattcttcatttgaaactaatgaatgtcgggtcgggccttgttctaaaaaaaatagagttgcgtaaagcaaactccctttttggacgcacggggcttagtcaagtagaaccaggttgtgttgcttgatgctctgatcgaaaacaaaaaagtagggccatgccagtacgact

SEQ ID NO: 18234 - DNA, 3012 bp, Cannabis sativa
  modified_base (2152)..(2154): a, c, t, g, unknown or other
gtacatgtcaaagttcatgggaaattactaattagcctttcaaaaaataaaaaataaaataaaataaaaaaacacaaaaataattaaaaaaattacaaaaatatagtttgtatagatttttcaatatttttcagattttatttaataaaatacggtattttaatatatttttatattttaatcttgttgttttgttgttaattattttagtatttgtatattatttttgatgttgttttgatatttttttttgttattattttcttttatttttatataataccgtaaaaatatatatagaaatataaaattttacaaaaattagtattttaaataattattcctttattaatttttctttgtattgcatagcaattttttcaaatatcactttaaatacaaactaatttacaaaataccttaataaatatcagttacaataatacttatcacgtcatcaaaaaatacgtaaagttctaaacctatatagactaaggttgcaagtttatcattgtgaatagcgactttaaagtaaagcaatgattaatattctaatgacatgtttacttaaaggaaataagaattaatggaatagtatttattcccttataattgtttactaaattttaaaaaagaagaaaataatgggcccacacaaattagggagaaaacaaagagaaaaattctccccctttttcataggaaatacatttccctttcctaacttagtttattttaattttaattttattaattaaaaataaagaagacaaatatgccctttaaaaatctataaacagaaaataattacatgttctaataatggcaattttgtcaaattaaagcattccgattacatttcctaattatgtaaacaaaataatatgattctagttttctttctgaacagtttagtaaacagtataaaaaaaaatattattttcgattattttctattttaaactgattcatttctcccattgattattctgatttcagttacagtttagtaaacacgccataaatagtgagtagtctagttgggaacttgtgaactactcatctttttgtaaaatgacatctctctattatgttggttgtttattttctaatactctcagaacttgtaatttagtagcccataatatgataaagtgggtttccatccacaattaatatgattgtttaatgaccatgaaatctaagttttcttaacactttcttttcaaaaataaaaaataaactaatattcctaaaatggaagaatcttaaaattctatttttttttctatttctttttaagttttctaagttaatttttcattaataaaagcttcatctttatatcatattatttgagatactttttacttaccttcaaaatttattttaatacatctaatatactattaattgttttttaggttatatttatagtatcttattatttaaaaaaatatttaataacttttaaaattgtttatgaaaaagaaatttgggttatcatgcttaaagttgaagcatggtttcctaagtgtgccacaaaacaaaacatcacccaaacagagagcaagagaatgagaaatgtgcggtggtaaatcgtggcgagcgatgcattgtggtgagtttaggtggtcttttatggtagatagaacaaaaagaatgagaggaagaggagagacaatgagagaagttgaaatgagaggggttttggtttaggtagaataataacatatttttgttatgtgttaatggatggattaattttggtccattctttatatttaatcatgataatctaaattttattttatgaaactattgagttgtcatatattattataaattactatatttatttagtaaattgttctgtttaatataaaatatatacataatccacaatttagtcacccatattttttttatatatgtaaattatataagtattctaattaatcaaacaagaataacttacatatttacttcaaagtcataagaaaatatttcacacttttggaacttttttatttaaactattccttaataaattaaaaaaataacttcaaattactttttatatataacataaatcaataaaaaattccaaaaaataaacttgagtatttaaatatataaagttttttttttnnnaaaaaaaaaaaaattgtaactaatcaatttattatttgtatcataagcaaccgaatagttgctttgactacaacaaattttcagaatatttgattatgtgaatctggatgcttggttggataaatggtgatttgtttcaatctattagcaaatgaatgttaaggcattacttgtaaattttttgcaattcaatatgtatgcattgttaaatatggtttgtggtacggtcatgcatgaattctttaggagcttgcttgcttatcatttatgatgaaattctagatgatacgtttagaaaagtgatttaaacaacttttaaaacgatggaaccttttaagctaaccttaaattatttatccattcttatcttttttgagtttaaaattaagttatctatatgttgtctgacaccattcttcagtttaattggaacactttattatttttcttcccttgaaatttacaatgagcataaatataaataattgggaaataatttgtaatgtggtgtattgtgagtattgtaaaaagattgggaattgttccccccccaaaaaaaagagtattgttttgaaaaaatatatatatgtggtcatatcaagtaaacttttctcaatcttgaaagaaaaaaaaaaaaaaaaagcagaaatgagtattgcttggatgcattatttggtgattgtgagtttgtaaagtttatacacttatggtgattgtgagtttaaatgatatttcatctactcgggccttagcttatcgttataaattttaaaaatccttttgattcttgagcatatttgtttacattactttgaaaatgataagtatggcaagtgtgagattaagagagtagaacca

SEQ ID NO: 18235 - DNA, 3606 bp, Cannabis sativa
  modified_base (3577)..(3580): a, c, t, g, unknown or other
ttatttttaagttgggggttttagttttgtttgtctcagaattatatcaggcattatttatacagtattcaaatgtagcttaaggtgcaagtaatgtttagttgcttgggtttcttggatagaacagttttgggtggagagtctaaagccaacagtgaagctaaattttaatggagtgtgccttttgcaagcttctgtttactccacatatcttattccagtaatgattttctttcgtggttgataaaatttttggttttgtttccttttttttctttcgtatctcaatgtagttactgctgattattattttgtttgttaaacaagaaaaacttcagttgaatgagaatagatatttacttttttcctttgcagacgtttagattccattaatctatttttttttatttcaatcgttctcataaatgcatatttatagatttatgctctaataaaatattaaaaataagaaaattaaggaaaaaagaaaaaaataattttggagagattttagagtggcacgtcactgcctctttatatatatagatagattattatccttatttcttatcattcatgattatcaaatcctgtagtgaaaggtagaaaccctaatctcccaaattttctccattgatttttcagtaacgcaggcctgatggctcctttcaaaggcaaagcaaagatgtccaagcgtgatgagggaaaagacgaaagaatagacctgaagaatattatgaaagatattgagcttttgggtatttcttaatttcacctctttcctttagaaaaaatttcatgagattcatatgattagtggttactaaagacaccaattttactctcttagtcttgaattgctcataatgttccttttgcatttgtttattcagtttctaatcataactaaattttgttgaccaggcatagccaactgagaactaagaaatcttcacacactgtgttttattgaattggagcaataataactttattaattatgttttagtggaaaacttatttgaaagaactaagggttaggtaatgggattattagaagtattttaagttagaggggatatgctgcgctaatttatcaagaatgtgcttattgagatgcaacacaaagtgagttgatctctgttttctattagatgtcatattctgacttaacataggggccatgatgatccagtgggattaggttgctctatttgagcctcctagtctttttttaaaagattttcttctaatttgattgtaattttacctctatgaataaagttgtgatttctacccctttaggatcatattcatgtcatctttattgctgaggaaatcaaaagaaaagtgattgatttttttcaagagacaaaaacttttgttgcttagtatgtatttggaccaacttgaccaagtgtcataattttgtatatcagtgcccagaaacgttgattacttccaactttaattttatataacaaaatgatttgtttattttgctcttattatttgataaaaatctttagttgtggttacttcacaaagaaagaaaatattacctttataacaagtagcctgctttataatatgatgttctgaacctgatgtacagtctcagagctttacataactataagatgctgagaccagtcacacaggaactatcttctgctgtagttcacagtagtgaagattttttttttttgcttcattttgccttctatgactagcgtgattaacctcaaagtcattagttagcagcatcctttaattatgataacattctctcagaagttaaaccttaaagatgtaattgttatatttagtcatcgtgttctgtcattgttatatctagaggcattttttctgagtggatcctgtctgttcttgtttcatctaccttgctatatgtgagtgggcttatcccctctttggtttatgtgagttgttataagtaggctatcctgtctgttcattttcttttagtatattatgcaatagcaataatttgcggctggattgttttaacgtttttagagagaattggattttggtaccttggtatgttcttccataaagatttctattaataagttgattattttgtctagtgtatatttgtttcaaggtgcctgctggggcttactaggtggatggtgctttcttatttcgcattgtattgtcagatgtatccatttgtattggttcaacagagggagtgtgattatcttgtataagagtagaggatgaaggaatatctcttgaagatagattagaaacttctaacactattttgtacgtggtttgaaatccttaatatgataattttcaagtggagaagtgtttgtttcatcaaaaaaaaaaaaaaatcacattttaatgtttcatcaaaatggaatgtcctggcaatcttgtggcttttatatacaccagtgattcatagggtcatataactgttttgcttatacatattcattaaccataggattcattgggtgtagaagtttctgatttgggaggctgactaaatatcatatctaaaactaatcaagtctttttcttctgattctggtgtctgaaaagtaattagatggattgatagaattcccatgaaattttcttaaattacttatactcgatttgtcattgttcctgtcttctgatttgtgcaatatataaagttttcctaacctccatttttccatgtaaggttactcgcatatgacatggaaggagaagaaggaatttgagaataggaaggtggtttcccttgggggaaaggtatggtaaagatttccctgttttattcagagagcactcaactttgctctgagcaatgctttgagtgtttttatgtctaatgtccagtaagtttgtttttcttgaaaaaacgatcaaattttgtctttctcttgggacagccttcaaaacaacagagattacctcttagtgtagcaaaaccgaagatgaaaaaacagaaggaaagagaacagaaaatgcttcaagaggtgattgattctctctctctccctcccttgtaaatttactgattattgcaaaaatatagctctggtgctaactgctgtagtttttatagaggttgattctcggtcgatttggtgggagttctagtaggaactctggcagtggtgggaaaagatccgatgtgaagcgtcgtcggccagaggacagagttctgaagtcaagtcaaggtgtttttagaaaaggtgtacttgatgtgaagcatttgctgaatcataatccatccagagcgactgaaccttccactcagatgttcaacaaaggaagaaagactggaaatggaaacagcaaagggaagagtggtggtatgaaaatgttgaaatttaatttataagtaaaaaaaaaaagccaggataattcttgtttatgcatgacaaaattatattagtttttaatttacctttttatagctttagagggatccgtattctctctcagaaagagagatcattattttttttcttttgtaacttaaatgggaagtattggtattcatccaatgcaatccgtatttttttggtcaaacaacatnnnntccgtactaagtgcggatttcatatt

SEQ ID NO: 18236 - DNA, 11099 bp, Cannabis sativa
  modified_base (3510)..(3518): a, c, t, g, unknown or other
  modified_base (3711)..(3722): a, c, t, g, unknown or other
gatgtacgtcagccgtcagatgagggagttatttaatctgacggctgagattgatctagaggtagttagggttaaaaagtaaaaatttactctgacacccatttaatgtaccttaagacccatctaatgtaccacagaatacattccatgaaagtatattacggacaaggattgaaatatatatgtgtgtgtgaaaaaggattgaaatataaatacctccaaggtacatcttgagcaagtaaccagtctccttccctatcttgataagtgagtttatagttcaatgaatcctcttgacctgttccccaaccaaaccagctgatatcattaaatattaattatataaaataataatccaattatgtatctccaccttattttgtttgtaccaccataattatgaaactttaaatctaatcaaacactatttaaatatttgaacatacgttataaatatatatataaaaaatataatataagaatttcatacttacattttccaaacatgtccattaaggtatgagtgagagtgttgaaagaagtatggagatttaagtcaatttttctagctatggccattccttccatcttgaccttcacgtgcataaacctagaaattcttccaccacagctgcacccattctccacagctcggccgccgccatggaagcaaataagtctcctcttccaagccttgaccggcggccaccccaccactctatctccttcaccatcgttcctgttcacaattatatatatggtacagaaacgcttaagccaaaagatagattttcgatgtgggatctaaatgatcattacactacgacttacttgatgaagttgtaagttgtgtcgttgttaaaaaggtctttattggattcatcatcttcatcattgggtttccggttgttccataacaacaaaggaagcgttttaggcaccgttacaatatcttgctctgaaaacgcctggccacactttcgtttcttcttcttattacaagacacaaagccctgatgattataattcagatcaaagccctcgattggaatatctatgtggaaattagaggtgggaagagccaaaccaagttgaagctccatcatcggcatatatatttttgtgtaaagaaagaaaaataatattgagaagagatagtggtgtatttataaagtagttgaaatgtgagaatggtttttatttattttactttttaatggagggtagagggggtgagttttagtgggaattttattatgttgaaaggaagggaccaaataagatggtgaataagaagagaaggcgtttaggagagacagtgtgttggggacattgggtaaggtgtccgtatcattgttcctcttttgggcgacccatttaggactattgctgttactttcagcacattgttttctgaacccccaacaatgtcctgctttcagctacccacgcgcccattaccccactctctctctctctcttcagtgtacgtgttgaaattgttcttcttcatcacttgtatctttcctacgtgaagatgctgtgaagtgtctgtatcaatgagtcttcaaaccatccactcgtgagggactgttgtgcgcttgctctttagttttgattcaatcattttcgaaagagaatggcaaggtggtgtcaaagttcctcttaacatttttcttgtttttcctattgagaaatcccggccttgttttccttactttttctattgaaaaatctcactctcatacatgatgataataccttttgatattattgcctctttcagttaactctcaacacataccacaccagtatccatgcctcttataacaaacctaacattgcgacgatcttctaaaagcaaactcgatgctttgtatgaagtttcgtatctttccaacgatggaaaaattgtactatcctacactcccttaataaacccatattaaactttctccaaaccacaacttttttactagattaataaaaattctcattaaacaaaacttgaaaacactcaaagaatatgtctaattcaccaaatttgaccaatataaccttcctctttcctgctacagagtaagaacaattaattactttacaaatttctcttgagtttccacaacaatggatagaccgaggtctaactcacatccattttggagcaatcagacttgccttaacccatcatgggaggaaaaacttaccagtctgtgcaacaaaaccattgcttgatacaagaatgagaaaattctaacatgcctctataggcatcctagaagcaacactcaatacaggcacagttattgttacattctatcctattttttgcataaaggataaacgattattagatgccttgaaggttcaactataaattgtgggcatagatcaagaactcgattccttaagatctatattacactatcaaatggcctacagggtgcaaaatcatgccattgacatctcggcaccaggaagttcagatgtgctaatgataacagtcgatacaaatcacgtaccgacaagcactcacattcctcgccagatcacaacagaaaaactccaacaaatacttctaactttatggatcaccaccggtagtctactcaacagatcttgttttcatgtccaaaaatgatgatttaattgaaatatccttcctaaagaatgaaggaacttcaaggatcttctcaactcaatacataatgtcgttaatcatccaagaatgtacaaaaatatctgttagttttatggtactaaatcaggtacgtatagaaagagttttgtattatctaattatcatcatactatatcacaatgaacctccaaatgtgtgtacattaaatcaataataataataataataataattttaaagtatacatcttgaagcctatcagagtatcctcgaaacttctcgtatgttgtatcccttaatccaaatgatgatgaaattgtaatttaactcacactagtgtcttctaagtcaatccaccacacacaagaaatagtgtgggttattaggataaagtgtatgagatctattcttgttgagttctcaacacatgagcaagaacattgagagaaaaactaatttcttttttctttctaaattttcaaaatttaagtttaggaagagtgttctgatttctaaaattaggctcctatttatagtagttaaatctctttaattaaattatattattaaaaaaaatatctataactaaattcagttactaatatttatgagagaatctctcaactacttcaaagaatatctcaacaaacttaaaatattaataactacttttcaaattaaataattaattacccaaaaaaaaaatccacagggacaagaacaatagtaggtgtctatactagtcttttaggacaaggatggtgtcttttgtcttgacaaatcttgtcttaacaatttttttcctttttcctatttaattaattttaaaaaaaatatttatttattacaaaaaataaataattactatnnnnnnnnntcaaaatagatttttttgaacatctttatacaactctttatccatatccttgacagtgtttcaaggtgccaaattcagggaccattgacctataattctaagctctaataaactagattatttatctcatcaatcaaataaccccttatttattaattccataattactccactataaatatggaattgaacnnnnnnnnnnnntagaattatatttattgagtttaattgtagtgtccattgatataatcaattccaatgattagccctccgtgaaatggtttgtaattagtgttgatcaaattactgttttacccttctaattatttatttatcctttagttccattaattcactagtggaagtataattcaagatcccatctaaatttgtgcccaactttccagtaccaaaattaacacataaagggaaccaacattcgatccgttaggaaagacaagattccataattgtaaatcatgttcccagctatccgtattattagattctcaaaacaaaagttgtaataatcatatcttctctaagaaactttaacgagtaaatcaaagaaactaataacatgaacatgacgagttcatgattactcaggatttaggcgatctactattaattattgttatgatatgaattgtataataaacggcatgttaataaagacatcttcattcatatcggtcattgccatatataatatctattatatacaacaccttcacttagatgtctcactacattagtaatctaaaccaagattacttgcaccgaagaacaggcatcagtgaacctagcaactattgattaaagattcgataactataatatgtcgctcactattttattcataactaagtggccttagttctctgtatagctataagtcacaatctcatatatgaataaggaatattctgatatataatataaattattcaattataaatattaataatttaacattcaagcatatatcaattattcaattctttatttaataataaaaatgtctttataggcttttcagggcttaaagcccaataatatcatcctttgataaggatggttcccctatatatgcctacaaatcctcctcagggagcatatatgggacgtttgtaactatccagattgcaccacacctgatgagcaagaagaggcacccgaaaagaaaagcaatgtaaataagctaaaagcaaaatgggaaaataaccaaaaggatattggcccacttggcgaatcctaaggaaaatttaactacttagtcaaatattccttcctacaaactattggttcacgaggacattcaaccaacaggatgggaatgtgaagaggatgagcataaatcattactccaatgttacaaaccaaagaagtacaaaccaaatgactcacacctcttcatgctaaaaggtagaaatgatagatttccacttccttccagctttatggatgaaataagaaagctcactcaccagccaaaagtccacaactcaaatatttgagaagttgatggtacgttaaagaaaatccctctggccgaacctgtccttaattagcaaacagacaacatgctatcccaaaacaagaccctccaacagatacatgagaacctttatacggtcacccacaaagttacaaagatcaatgaagatttttttaaaagtcaacaccattatgactaggcccatctacaaaatttcacatatgcacgaagaactactatagatagccaaatctaggcaagttttccaagagatttttctaacaaaagaagcaaagctaaagggtctgaagagccagtacgtctctactaaaactcaagctcaatcgaaagaaagaacacctctcattccaggcttagactctacaccatggatattttcaacattatcaaaatctgtgcagccgttagcacatcaccccaaaaaaggggagactgaattccccgtctaaaaagaattctggatgaagaagatcaactaaaaaaataaaggccaatgcagtactcaacacatggtcaaaaagagaaataacattacaaacatcatcaccagtactatctaaagaatcttccacaaatcaatctcaatgaagagatagaaaactcagatgacaacgatttgtcatcatattctagccaatctgatgattgggaaactaatgaccaaagaagcggtgatgatgaagcaaatccacctcaattcatgacaactaaccatacaacagcagtctcgcgaatagaaagagaacaaaactctgaccaaatagagtcggtcatagaagaagaagtgtcttcagaagaaaggcatacctctactaaacagtagtttagtggcaagccctacgcattcatgcttgatgatcttcctctaaatcaatggagatctcgctcccaagaattcagagcatggacccttttagaagcacaaaaaccaagagcagaaataagagacatcttgctagagttagtatcaaaattcacaagaatcctacaagattgatggaaaagtcttggagaatacaggcaacttcaatttctataaggagagtccattgaagcggcactaaatcacttgtacgtcgaattctttagacaagactctcaagtggtcgaacatttcagggctgaatttttcaaaatgaagagttgtttaatagaaaaagaggatatggaattgcacttccaaagaatgactgagtagttttatctaatcggccgtatcaacgatccaaaccttaaataagtgttccttgcatctatacctgaaccattaagagaagatatatttagactccttttagcaaacaacagaacactgcagaacacaatttttggagagttattccaaatgttgatgagctccttagaaaaggtgtgctcttaaaacaaatttctacaggaatacatgaagcaaataaaataactcgacaaggcatgcatgcaaccaaaaatgtcttactatcaaatgttcaacaaaagacacatactcatgctcaaagtagaaggtcaaaaaaagagaaaaggcttcaagtatatatctccaaacaataggactccttaaaaattctttcaaaaaaagaaacatcctaaaaaaatcctcaaacaggtgtttcttgtgtggaaacaagggccattttacaaaacaatgcccataaggtaaaattgccaaaataatagcacacataaagaacgccactggggtatcactctttaataacgatgttgagtcagtcttttcaatcaaagatgaaatatccccacatactatgtgcgcattatagtcggggtccaatttagacaatgaaagctatgccaaaaattttcacatggatacaatcaccactagacaaccgatcccaatagcaaaaatgcatgtcatcccaacaaaatactcgaagccaatcaaagtagttgtattttttaatacgggagcatcatatacaattatgaaccccaacatcttgcccctagaactgtggaagaagagaagcaatttttccgaaataaccaagtactccacatccaattaatcagtaagtcgataaagctacgattcttccccgatgttcccttcccttgtccacttagtcattggatcaaaacttccaaaaaagggtctcattgtgagattcgaccttcacacaaaaaagaaaaggacttagaatactcccacaagggttggcctacaagcatttattcacccaatgggagtaaatcccaaattactttcacatggcacaagacgtattttcatcaatcaaagaaaatctaatacatagttcatgtgaaaattctcactcaaaattctcaatgaagtgtaatctccaattatggaaaaatgatgaattctacatctctataccattcaaacagaacgaggataaataagtaattacaagggtaaaataataatttgactaaaactaattacaaactgacacaaggatgactaatcaccagaattgattatatcaatggacattgtaataaaacttagtaaatataattttataattactaagagttcaattctatattgataatagagtaatcatagaattaataaacatgattatttggttgatgagattcaataaataatctagttattataggttcatggaacccggatcgccaacttgaaatattgtcaagggtgtcgataaaagttgtataatgttcaggaaataaattttgaagtgttaaagtagtaattatttattttataataaataatttattttcaaatttattaattaaataaattggggaaaagataaaaactgtttggacaagggtggtgccactattactatgttaggacacagtgataggcactcctattagtagggatatcctattaaatttgtttttgggttaattaattaatttaaaagataaatatttatttaaatttgaattcgaaaagtagctataggtatttaagttggttgagatattccttcaaagtagttaagagtttctgtccaagtggttcaaatgttttctcaagtagatcctcccgatcaaaccccaacccatccaaaacaaatggtcgacagagcctgtctgggaggaagaaaaacttcttcgacaaacaagggttatgctagagaacctaatacagagaatcattttattacttttactcacccatattttcctaatatttttttatttatttattttgaaagtcttttttatttctttttagtctaattgacctgccaacaagaaatttaaaaaataagagttacatacttaactattataaatgtaataatataaatattttaatgaattttcttaagaaaacaacacttaaatattacaaatataataatatatctactaatcccatcaaaaatttaaaaaaaaaaaaaaatcaaaattaacatgctcagttatgttttcttctagtacccattattcattatctgtagccaaacacttatctgaagcttcttcaaatgaaaataatcatggttacataacaaaaggcaatagaccataataccatgtctttaatttattagttattatgattttagagagagagagagagagagagagagagagaatatttgatgatggaagcaaaagcaacaagtatgttcgatgttccaatatgtccatcccaaaaagataatgataagaacaataatgaaacgaaacaattaaacaaaaacaaatgttctctcaatgagatttgtttttgggtaatgtacttatgtttggtgtttaaggtcgaaataaaataatttataatagcatacatcatgtttttttaagtatggtcaatatcattattctaatcttacacaatataacaaattcccaaaaaagattcattcttctaataatcccacattgcctccactttatccatcatagcttcacagtttcagttaatttgtcagttcaattatttttctgaataaagaattaaagtcacgcatatgtcacgtgatccggtcagctaaacccacgaggtccggtcggaccggccaacccgcacgagggctcaaactaaaacgtttctttctcaaccgactactcttatcctatccatctgggccgagcccatctgcccaatggtccatactactaaaggtccactgtggaccacatttacccaacaatttttttttttttttttaacttttccacttattttaaaatagttatcattttttattcattaaaaaaaaaatagttatcattttcctattaaaatatgcactcaaacattagatatatattgggaaattctaaagtgtgttatctatttcggcatttaaagaaaaaataatccaatttatttttattagtagtatacgttgtagttatttaaaatattttgtaaaatttttaaaatttagaaaaatttaacacgctgaaatagggttgaaaaaatttagaaaaatttttattttatatttgtggaaaatggattgtttgaacattaaattttatattgtaaattattccgaatttctgaagattttacaggacgtcttaaataactataacgtacacgacaattaaaaaaattacactaaaaaattcttctagatgacgaaacaattagggattacactagtccaccaattttaattagatgcttttttaatttaaattatacaaatagtgtaacaattaaagcgataattacattaaacactaatttttatatttttacgttcattttttacatatatttttacggtattctataaaaatacaagaaaacaatatcaaaacaacacaaaataacaccaaaacaatataaaaaataatatgcaaataacaaaaagtcaataacaaaataacaagagtacaacataaaaaaaattatattttatgtaaataaaatctaaaaaatcgtaaaatattaaaaatttcgtacaaactgtatttttgtaattttttttttattgttttgtgtttttttttttaaaatttatccccaaattaacactaacatgttattgtgtataataattgagtgcatattgtaaatgcacatatcattattcattgtataaagagatcaattagggtctgttttgagtcaaataaacaaaacaattttggctatgtataaaatttgagtggttaataaaacggtagaaatatcatccactcaatgtgtatcatatttggtggctatggtaagttgtttatatgggttaaattttcatttgaaatggaaatagtagagaggggacaacctagtgaaaaaggagtttgtaatctaaaataggcttttgtcttccattggggatgaggtccccctatttgggtatttttcggatctcgtatatgaggtgtttgtgataatggtaacatcaatatcacaaattgtcaacaacgattaaaatatattcttagattatgccaaagggttttgtattcattattggttacaacaaataaaattctaaaaattgggttttatataaaaaaaaaaaaatgaagacaaatatgttagtgtcaaatcaaatttcatctctaacattcacttagttctattaggcgtgtccatttcatttgcctaatgggaaaaaggaaagggcaattttcttttattattactgaaaagaaaaagaaaaggtgagagtattaagcaagttactgattcaaaaggtaggccaattaattaatttgggtagctaagaaaggatgagaccgacaataaaaataagatgacttaaattgggttggtctggtttacttttggtacaacatttcattttttttttcttttgaagctacttatttttttccatgttactattgaattatataatatatcacatagtacaataatgatgctacaatacaattttcaacccaaacccataaagagaaaaagtgtaaaacctcaacgatgagaggtgacccaagcagcaataccaccattttcggggcctataactaccactaaatagtacaaacatctgcatacatataccaatatataaattttcaaccaccataagtttttttttatttatttaggttagtccaacataagtttaacttatagggtaaaagag

SEQ ID NO: 18237 - DNA, 8746 bp, Cannabis sativa
  modified_base (4547)..(4558): a, c, t, g, unknown or other
aaaaaaaattcgtaaaaatgtaaaaaaagttataatttataaaaatataaatttttaatcattttagaaaataaaaatacaaataatgttatctcgtactagtaatttctcaactcatttttatttattattttgttttttatgaactgtccggctgattagtgtattctattaattgggaacatgcaaaaattagataatttaaagatttgaagctttagttcttgttttcacgatttttattatgaatattgttattgggtactagtgatgcttattattttttataagtgttattttaagattagttagtaatatattttaaaacttattttcttaagttatatgggttttcgctacttaattacaccaataataatatgacacaaacaaggatgctagacaccagtaatattttttttagcaattctcttttattaattgttaaattttaaaacaagttctataaaattattttaattgagaattaaaattttaaaagttttgaaaataaaaaaaaattacttttaaaaagttttttttttcttaattaatattttggactccgacctcaacttgaatcttgaagcccgcacttcggccccgaccctagtcccagactcggaccacggcctcaaccccagacttggacctagacccgacttaaataaaatcaaaaaataaaaataaaacacttttgttttctatttttaaaattaaaaaacaacatatttttattttttaaaaacataaatttactttaaaaaataattaaaaaatttaaaaataaaaatattaccaaacacccctaatttatcatatttttcttcctatataatcatcttatagcattattatatatgtgtactgttgatcatgtatcaaaatataataaaaaattaaacgattattgtttttttctgaatgttatatatagttgaactatatatatttttaatactgaactatattttcaagcttatgaaaagtggggcatgaatgtaattgaatgatataatatatattggtggccccagaaaaataatgcatggtatgtttcaatacctcttgttatttattactaagactcgtaacaaaattgaaaaagacattataaataaaataaaagagaggaaaaaaaaaagtcattttctttattgtaattaggagaaaacattagaaagaaatactgattaattctgataagaataaagttgaacaaaaataaataaataaataaagaaaagaaaaatccaaatttaaagagttttgtttttgttaaggcatgagccacaaaaacagatgagaagggttaaaatagaaaaaaaaaaataaaaaaaaatgggcacatggatgacataattaaccatatcatatatatgatcacatgctctccatgttactcaaaactttttctgtccacatattaacattcctcaacttggccactttgtcaaaaatttatactgccaccttggttaattatattgttattaatcactcgtagtagtgtggatgtaaggattgcttaattgaaataagatggattattagataattagagtgtaattataaaattatgttatatattaatcataatttatacatttgtggagatttatttgaattcagtatgtgttgtttatgatatgtatgaaatttcttgtttcccgtacttgtgctcagtagcagtagaacgcgatattggaccagaagaggatcacattttcatatagtttagaattttattagcatgcacagtaggacaggatagttagacatgagaagtgtcgggtttggaaaatgaccaaattacccttaggtggcatgtttgtctttgttttgtgttaagggataaaattgtcatttcattggaattcttattttgtccttttgtggacattaatgaaattgtttttaggttggatttatttaatgataagtttatattaattattcttaaaatgaaagttagaagcaaatctagaaaattcactctctatcttttgaaccacctagaaccagcaaggaggaaggattttttcagctacaattcaagagattctagcacgatttaggtgtctcaacccaagatataactctctagcctccttctctttgatatttcttagctcaagataggttttggtgcatgattttgaaaattgaggttgtgtggttgtgtaattagttttatttcatgttctggagttaggttaggattacttgagttgttttaagctgagttagttgattgtggtgaggtttgtgcaaaattgaggtttgagaactcaatttagttctttaatggtgtttttgacttttggacttattgttgaggtttattgcttgttttgggtgtattgtggtatatgcaggtattctggaagtttttggaaggtttgggattaaattgaggtgttggggatgattttggtggttcctacactaaattggtcgaccggttcagggggacctgtaggaaccgaaatttcggttgatccccaaaaaaccccacctggtctaccggttggggaagcggtctgtcgattgggacagttttgcaaatcctagtttttcttattttttgcgatacttacggtattgccatattacatcgataggaaaatctttagttttgattttaagtccccaaaaaatattttagcatgtgtctcatcagaatttcgaatattgtaaatatagggccctgtaaaatgtcgcactattgtccacttaggctgaccgacacacctacaaggtaagattagcataaagtatgtatgtgtgaaagaatgcatgttattattaactacactactagcactgaaatatttgtagaactaattaagtgtgttagtacaatgtagggtatttaagggtaagttacggtgttaccaacacgagtacaagtgggtaaggaatgcatgtggtacaacacccagtaactctcgaatgtacaatatggccccaccaacactagtacgaagtcagtactgcagtgcatgtgatacacaagtcgtacttctgttgcgaacgttcttaaccatttggtgagccttgtacttgggcttcggaggacctaagtacaaggcagaattgcattgtgtatatatgttatgcatatcttactgagtctgtcgactcataagtttgctaccttgtgtaggtaaagaaaaagctaaggtagaggaacaatgagttggaggcccaacaaaaattgtacatattgcgacaatgaaacttaaagagtttcggtcacactgcattttgaactatcttttattgtcgccttgcgacttgtaaacaaaaaatatattatgtatatatttatggtatatttttcaaaagtggtttcaatctaaaattagttagtttttaaatacggacgttacaattttagtatcagagccaccaagttatttgctgaagaccgtcaatatatgtacaatcatagccagtgtcgagctcaacttacgtttccgtaagcttttaccttttagcaaactgtttaaataatattgctataatgtgtgaaaagttatttaaattcaaaaaatacggtcttggaaatgtattgaccactgtctaacttatatgccttatgagttcgcaggctaagtcttagattatggacacccaacgaaacgttagaggaaaggacgaaatggttgagactgaagatggtcagggtggtagaaacctagaaaaaaaaacaggatttttgagtttgaataaaattgaaaattctcattgttcgtaggaaaaataaattgggtttaagaatagaattgaaaaattgtaattatttctattttattttatttttaataaatttttggttttaaaatggcaatcataaaattaaataatgttaatagttaactcagttaactaagaattttattatataaccatttacatattattaaaataaaatactaatactaacaattaaattaataattgattgaaagtgaatattgttaatgtataaatatatttatgaaaacttctaaatagttaatacgtacccattcatagttacttaaaaaataagtagaatattttaaaaatattaaattattcaattttaatctaataattataaagagaaatttttatgattaatttaactacttaaatatatatataaaaaaaatcttattttacatgaaaatatatttttatcaaaaatatctcactcaaactcaatatgtttttttatcttccccatcaatgtaacaacctacaataatagtccatgatcataaaatgagagatattaattctttaattaaatagtaaaattattaaatatataaaaattaaaattttcctaatattattcattaatatatatttataggacaagactatggtaggacctagcaaaagttccctaccggtagagaactttttttgaccattgattttagatcatgtggttattatgatgtaaggtatatactcttatgataagactacttgtatacaattaaaagtttatacacattataataatatttaataatatttattttttnnnnnnnnnnnntaatattaataattaaaaatttaattattttttattttttattttgaattttttttttatttttttatatagtttatttgaattatttttatattggtatttattttcaaaaaataattatttttcctaaacttttttttttgccttttcatcttccttaaaagcatatgaaagcaaactataatattgtagtatgcgtgtagtattaattaattaaatcggttaaattttatttttcctgccaaaaaaaaaagagtttaagagatgcaagttggtacggtaccaattaaaaagcatcttaaataatttttataaaactcatagttgaaaattttaaaaataaaataaattactttgaaaattcacagtctattttgtatactttcttttattaaaattcatttcatttatctcatcactttctctctcattttctatcacattatttttactatttttactaaaacaaaaactaaaacgtaaaaataaaagttataaacacattttaatttcaaaaatttatacaatatatttaagattagattttttatatatatattaacattttatgaattttttttttctagaaaaaagaaatattgttttcacgttgttttcttgttgaaataatgtgaaaataacactctgtatttaaaaaagaaaattaaaattcgtaaaaatgtaaaaataattgtagatctataaaaatgtaaattttttgttatttttgagtgtttataaaataatccctttttaaatttccaaaaaaaaaattaataacatgtttttttagatttaaatgtttaaatttaaaaataaaatatgaaaaaaaaaacatattatacaagcaggcacacatttaaaaattgtatttttttttttcatcttctctagtctaacaatttatttattgaaaaaataaattatactcaaaataattacctacaaaaatttattaaaataataaaataaattaaataattacctacaataaagtgcattgtattaaagtaaaactcaaaattatacttgataattggtggaaaaaaattcctcatactatagggaaaaaagagtaagggcacagtagacaattcctatatttatatatagtctccctaaatttatatttaaaaacatgcaggtaaaatataaaaatgctatgtaaactaaacaaagacattattttttaactaattacatttgattaagactaaacctttgtagttttaaaaaaaattgccacattaccgatccatattatgaataaagtgtttgatggatattttatgtacacatattattaattaatcatgatgagatacatatcatacattataattatatatctatatatatatgcattatagaagtacaaacaaacaactactactttatatgattggccaacctgcaaaaccttctttctgtctcaccaaaaacaagtatatgtatatatacccaacttattttcccaattctatcacttacctttaaaaacccttagctgtgaaatgctcaagtttacagctcattatattattttcagcatttatatacatataaatattatataaaaaaaactattatataccctttttcttttaaaactttttaataattattaggtccttttgttctatcttacttttctttttgtgccatgtaatctcttctttaatttgctgtaaaagaagccatttttattgggaatttattttcatttattaattcaacaatttgcttgtaacttttcctagacagcatcttaatttcttgtacaaaaattaacttaaaacattattttatacatgtagtgctacttaaattaatatatatgtattatcttttttatttatataaatatagattataatattttgtcatttataaattattttctttatggtcagtttaatttttttaaataatacctgggatcgatcgatcgatatccataatgatctggaagtccactaaatttatgtactgagatcagacaattatgttaaataatatctatatacaatatatatatatttatactataataatatacattatacatagttatatatactaatatttttcaataaaataattattaatatatacacagacataaacctaatatctgatgccactaataatagcatgttctatttattgatcatgatttgtatttttaaaaaatttcatttcgtttactactcaacatttatgataatcgatttatttatcaatatttaaaattaaaattataattgatttttttatttggttgattatatgttcatttatcaagtatagttaagtctcttgatatttttttttttgtaaaataaatcagtgagtatgagattttttttattattgtggattatttaattagttaataattaattgatcaatattaattaacattaagctaaataattaggactcttaataattagctagaaatacatgaccaacacgcctgaggtttcttttcttttcttaccttctttctttttaatttttcaacttgatatttttttatttattatattaaatcaaatcaagaatttcttattttttattttttttcactttttaaggtaattaattgaatacttatcttttaattgtaacataaggtggcaaatcatctgtcaccagctattgtagagattagagaattcatgtgccagcaaattaagcataaatacataaaacaactcagtaaattttatatacaatatatattttatatttatatattttttattgtcttgtttacaagtcaagcaaaataaaaaataaataaataaataattaatagataagaaaaaccactactatatataaaccctcatcatcagttacacgcacaccttattttaggttaaaaacacaataaattttaaaaaataatattgaaaatatgtcataatatataatatatatttgtggtaatatatatttaatacagtgctgctacaataataatatttgaaattgtcaatatatgaattgtttacattagaatcttaccaacttgcttaataattacccttttgaaataatcagtataattaatattattccacaaaatatatatatataaatttattaaaatagattaattttcagatcttttgcttgagtaaaacacctatacatgtgatacccatatcattaatattgtacattatgattcaggtgaggatagaatattttaataattgagtatatatataaatacaattcaattaattaagctaatctacagctacaaaagaaaaggaaagggtttatattaataatatgtaattattgtatatacatacacatacataaatatacctaaacctatatatataatatatgtatatatatacgcggtgatttatattaattaaaacatttaataatccaattgattggttcggtgactttggtcccacttttcatattgcattatatgttgcccccattattagttcatttttttttttcatcttcaataattgagttttgagttgatatatatttatatatttatagcaaaatattatgtaaacatatatagacaccaacaacaacctagctagatagattatatattatcttcattatttttttataattagataataatatattttggtaattatttaaaaattttattatatataattgtgtaccagaatatttctcattataattttcttatataaatatatatagaccatatttattaattaatttaatttgaagttctttaaaggggtttgagaagctataagaaactttttttttcaaccatacaaaaaacataacttcatcctaaagtccaaccacactgaaagcacgttgtggggtcattaatttattaagttattggatttttattattattccaaataatacgaatttttccacatcaaaatttattataatctcatcactttcttttatttcaagtaagtcaataaaattacgtcaattttttttttattttgaaaaaagaaatgaaaataacaagtgatagtaaaactcctaatatatttgattatagaagagctaaaaagataaatattattcctcacaataaaaattatttgtgactaaaaataatatttaagttaattagtaattttttttccaaagtttgacatgtactaaatcatgtcccctaaattt

SEQ ID NO: 18238 - DNA, 3912 bp, Cannabis sativa
gagctgagtaagtccaagtccaactcaacctccattgccagcctcagcctcttcttctttaggcttttacttattctcaagccttttctttacaccttcattttttgactcaataaattcatcttcctccattttttcttttctaacaattattaatttcaattaaaaaaacttacaaaataattcatggtgtataggctccattgacctagctccatctccttcgacgccgtgctcgtcacgtttttatttttttttatttttttttatttctctctctctttggattcgacgcggtaatgcttgtgaattggtccttatggccatgaacgattctcggagtatttcttcttcttctgccgattccgcttctgttgctgcacccgatcaggtaaaaaagaattcacctttgactctgatgaggatccagtttgaatttatttgattgatattttgttgggctttcttcttcttctttttcacctaattgatttgaaatttatatatacatagaatgtggggcggagtcggacgagtggtgacggcggtcaaacgctgggctctggaccagcgagtcggcgctggcgtgatgttttttggttggggatttttgtcatacacctggtgggattggggttcctcctttcaattctcgggatcaataggtttaagaagacagataggttaaatatagataggtatatggaacgagtgttacagaatcgaaaggaattgactgaaacttattggcccttttatgctcttgctggtggagttgggactgttcttgggtggatttggctgttgttgttgggttctcaagccaattacatgatgaagatatccgtccacattttgactacttatcttgctgtgattagcgttttgtgtttctggggtgatcagcttttctggggtgtcgcgtttgcgattggtgccgtattgcagttcctctatgtggtatcagttatagataggtaggtacaagcttaaagctatctgccaagaattgaagtcatgggcaaattgtttgttttggattttttggcatcacaatctgtcatgttgtctatggtttttatttgtgttgtttgataatagacttccatttacgatgctggtgctgcaaaaagctgtgaagatggtatggagcctccctgaagttattagagtagcatacgccttcatgtttgttatgcttttatggatggggttatggtccttcggagcagctggtgttgtagcttcaagcatggataatgatggacgctggtggcttcttgtggtgagctggcaagttttgctcttttttccatcagttgatattggataagaattgttgcaatgaaggttcaggtctcagatcatagtatttataacaatgctatcatgcttgaacgcaggttctctctgtaagcttattttggacaggtgcagttctatgtaacactgtacatgttatagtgtctggtatggtgttccttgttcttataaatgatggtcaagaagtgtcaccgatgcctcctccgaattcgttggtaaagtctctgcggtatgctgtgacaacttcttttggcagcatctgctatggatcactctttaccgctgctattcggacgctgagatgggaggtaccagatcttcatttcatttttcttttcccgtatcctagatttcattttctaatattctgaaatatattccagatcaggggaatccgttcaaagattggaaacaatgaatgtctgctttgctgtgttgatttcctttttcatcttgtagagactctagttcgttttttcaacaagtatgcttatgtacaggtagtttagtacttttctgctgagtaatctgtcatttatttctttatttaagtgaacacattttatctatttttatgagtttaaattgacatacaactaataacaggatgatatatacagattttcattgtgaatgatgaattatttggacaattggtttgcattgcttgtaacttatcattaatatgatttagtgctctaaataaattgttaaattgtactcggtagacaaatggtttgcttccactgttccacaagctctggttcgattccctcctgaatacctacacagtaattgttatattttcttgaatcccaaatggtttgtattggggttattatttgatacatgatgatcttatgaaaacaactttaatttaagtttaatgatagatcaaatttgcttttgctagagtattgacaagcaaacaacaatgatcagcattttgatttatgcaattcagggaggcaacttactgacttggtgaaacagtatgaaacacaattaaatgattatcatgtttatactacatgagaacaaacaacatgaaaatgttcattagtttacttagtatgggcatgttggagtagctaggacaagaataaaaaaatctgtgaaacttgagacttgacagacatataatcctattatctggactaataatattgttgcagatgataactctgctttgtggaaaaatggaaatattattggttctgaaccaatctggctaattctaccaagagtttctcatgtattcttcataatttgtttcctatacaaattgaggtgctccagagtaatagctatctcttaattttaaattattttttggtaaccttgtatttcagatagctgtttatggcaagagctttaatcattcagctagggatgcctgggaattgttccagtcaactggtgtggaagcacttattgcgtatgattgttccggtgctgttctactgatgggaacattgttgggtggactcatcaccggaacttgtgcaggagcctggacatggacaaaatggagtgacagagtggttatggtcggattaactgctatgttgatgggaatggtcttggtaattattctttcttacaacttttttcttttctttctgttgttaacttctattttattctcatctggatctgaataacaataaatcctggtcgtttaatttcatttttgtgaatttcttctttcactccccaactaatatataaatatcatattatatatattggggctaaatccaaaatttatacccactatttttgaaaataaataaataaataaaaaaggtaccccaaccaaaattgttatttttaaaatgaacccaagagtaaataacattctgatgcataaattatcgtcaaaaaaagaaaaaaaaaacctttggcttattcatatcttcttaaactattttcatatctcttcaattataattttaaaactggaactttcatgaaattataaagtttttgtttttttttcaataaaatcacactaattgtaatataaatactactcacacctcaacaatgtgggacaaatacacaaacaaacaattgagcttaatttacaaattaatgaaagcatcttaaggtgtcatgtaaggtgctttatagaaccgcgtaaatgtgcttgaaaaaactacacataaaaatgtcacgttgggccttaagcttatttccaattcaaaatcttcatataattcttcaccatgggaatccacaacatctcaacaccaccattttatagaactgatcaaagagccaaagactagaaaaataaaagaaatatcttttatttctttgaatatctttaaatacatcaacaaaagagcatatcaagaagaaaataaatctagaaggatggaagctataaaataactgacataaaatgaaagaaaatgaggccaaagaaacccttcaggtggggtggcaacagtggaataaggaggtggtgggagtgcaatttctatatgggtgttgattacatgttggtttatgataaattattataattattttatagtctccagtctattttcattacctaaccacttgaggctagctcaa

SEQ ID NO: 18239 - DNA, 2939 bp, Cannabis sativa
  modified_base (2739)..(2739): a, c, t, g, unknown or other
  modified_base (2888)..(2888): a, c, t, g, unknown or other
taatattattattaaaaaattatttcgacaattattttaaaattaaataaaatattcaaaaaataaaaatatattacaatttttttatataatttttaataataatattaaatgtattaatctaaacgtgtcatttgtacaaaagtgtatattaaccaattcaagtttaattgggaaaaattaataacactttaaatttgctaatgtttctttaatttagaggattttaccattaaaatttaaacttgaaagattaagtgcaagtaaattgataatagagaagatttaattgcaaaaaatatttttcgtcatgaaaaatataattttgcttaatttgttttggcaaaattaatcgttcaaattttataatttattaaattatattttagatgtcactctagtttgtctcatttggtgacataatttccaatttattttgactaaaatggaccgagattttatggtactatattttgattaattatgtcaaacgccgaatatataattgtaacatatcaaagtgtaaaaaccagctatctcaagggcatataaaacgtattaggtgtgtgtctgtgaggatcgaatcattatgtaaagaaataactccctcgtacggtggtacattacagaatacatttcgtgaaagtacaattatgggataaaatcatattcctatataattatatgtaaataatatttttcaatttattaattaatttgagttgacagattcatggtggatctatttgtgcctcaaatgatttcccaacagacagacatttaatcgagctatggccaacttcaacttcttcaccgtttgaggacattacaatcaaagacatgatgctcaatgccaacttcagaggtggtggaatctcattggttaattcaattagaattaccatagaaaattgctacatttcacatttcaccaccaatggtatcctcatacaaggaggccacgaaacttacataagaaattccttcattggccaacacatcaacgtcggaggcgaccactgtgaaaaagatttctccggtatcggaatcaacattataggaaatgataattcagtcacagacgttgtgattttttcagcctcaattgggatcatggttgaaggccaagccaatgtgttcacaggggtacattgttataataaggctactatgttaggtggcacgggtatttatgttcgggttcccgggtttacccaaacccgaattataaattgttactttgactttactgggattgtagcagaagacccggttcaacttcacatcagcaattcattttttcttggtaacgctttcattttaattaagtccttaaacggcgtcgtatctggagttaccattgtgaataatatgttctcgggggactatactggggtccacatagtccaattggatgaatctaagaaggagtttcatgatgttgatcaagttgtggtggaccgaaatgatgttcgtggaatgacccttaaatcgacggttgctaggaggacaacgtggagtaatggaaccacgtggaccgttgatttctctaaagtcttgctctttcctaaccttattaaaaatgttcaatacacgttacatgcgggggcgttgtttcctaatcatgtgttgcggaatgtatcaaggaatcaaatcacggtcgaatcagacattccagtgtctgccacgttgcacgcatatgtggatcaatattgagtatattatttacataaatatagaatctttttttttgtaaaaacgtacatagaaagttattgtgatgagtttattaattataagtacttatgtacacggctaattgaattacatatagaaattgtttgattaaattttatatgcatatgaaactaataggagtaagagatcattttcccatgacctatatacaaatatatgttatacttgaaatttaattagcacatgtgaagaagacccgtgtcaagttgggaaaaagtatgaacccagacacgtaattatgattacatttaaagaggaataactagctaaaaacataattgacagagtgtgtttataattcggatgactgaatagtcttttgcgagataaagatatacaaactgtcgccttgtgtattaacgagaaaccaacttcaagtgtatatgacgaggcactaacctcgttacgtgaaggggatataacgacaatgaaaacacttagcgtataatttacagtatacaaactaagtataacggacaggtgaaccgaagcaactgatagcgaggcgtccacctcgccacaggaagacatgttcatgttaaagatcacctcgtcactaaaagctgcgattgtcaaagagggtgttaggtttctagagtaaaagcgattagatttgcattattaaccttggaaagaaatatgaaaagcttcagctcgctatcaaggttacctctgctctattcccagcaacacattccaaaataatacggtttacaacgtatttaatacacatttattttgacccagtaaaaacaggatattcatagctgtgtggtattcaaataataacctcatttatttaacgcgatatgtaatcaaaccccgtgatttcaagggataatcgttgtaaaaatatcagtcaaactgcctacaatgtgattataaatagaggcaggacagactgaagaaaaaaaatagaaaaagaggaaatcgtaaggaaaaaggccctaaaaaaccatcagaaatctaataagattgacncgtggactatgcagaattttaatagcaaaatcacgtaaaaaattctgtgttcatactttttcctttactgtttttatttttttgcgcgagattatcattattaggctcatatttggttaacgaaaatctgcgttaacagtttggtgctntcattgagagccttcgtgaaaaagctaaaaaaaaatcctccttacataaaa

SEQ ID NO: 18240 - DNA, 1983 bp, Cannabis sativa
attctttgcctcagatagatattgatcatcctcaagctggagcaaccccccacaagatgttgatgatggagatgatgattttgtggaaattcctcctaggtctgttgctggttgtccatattctgttcctcaaatgtcgctaaatatcatgcaagcccaattaagactagaagaaagtaacaagactatagtttctgaagtatgctcgctgaagacttttgtccaagatggattttctcgctttgatatggcattgttttagcttattagtttccatgaatctagaaaacatgtatgtcttaatatataatttatgttgcttcatatgctgttttattagatttttaatgattttcatatttgagaataaaaacatccctgtgaaaaaccattattgcaacccctgtttaaaaataattatggatcacaaataccctttctgtacctctttcaacaacctttacataaaccatctctaataaaatgacaatcattatatgcagcaaacctaacaatggcaccaatagcaaccttcatagcatctttatatattttttattttttaagttcacatagaaataccctttttgtaaccctttcagcaacttttacagaaaccatctgttataaaataacagtcattatttgcagcaaacctaataactatgcaaatagcaaccttcatagcatattttatgtatctttatatttttttattttcttagttgacatatagataccctttcagccaccattatagaaaccatctgtaagaaaatgatatttatatgcagcaaccctaccagtgaccccaatagcaacctctattgcatattaatgtcatatttttattttttttagttcacaccatttaaatttatattttaattgttcaataggattcatccattgatttgtcccaatctccttcttgtcataatgatactctttttaatgagaggagaactaaacaaagacatgagaaaaatattgttttagaagaagaagaggagaaggaagaagaagaagcatataaagaagaagaagcagaagaagaagaagaagaagtagataaagaagaagaagcaaataaagaagaagatgccgaaggagaagaggaagaagaaaaagatcaacaagaaaaagaatatgatcatgagtctaaagaaaaggataatcatgatgatgattatcatgggcttaatataaatgatgataatgattgcggtggaaataatgaacaagacaaagatgatagagattgtagtagagaaaacaatgatgaaaatgttaaggttgagtgttttccctttaattaatgttttaagattccatacacttttcatgtttacgcttatgattattttattttgtatattttgtttgcaggttaaagatgatggcgcaatttcaaataaagttcttgaagttgcaacaccagttgctttagtgggtactgagaatgataatggtgggtgttttttggattcttcatcagacgctttattggaggagacaatgcaaaatgcttataaagctttggatgcgatgaagacaaaaattgtatagttttatccattatactttttctaaatttttactatttaatggtttatatttattgctgttataagtatatttatatgattttttttcctcatagccatcttcttctcattgcacgaccatggttccttatattgatagtgacaagagtaagttggaatgtgttactcctatgtcaaaaaggaagactaagcttccatcatatttggactcaccatttgtgagaaattttagttctggccttagtaatcgagttaaatcaacaggagacattaaggttctcaaaggtctttgcccattagatgaaaaaattggtgaaccacttgatttttctcttactcaagactcaacggatggttagataagggaatgaaaagtgacaacaagtgagtgtttactttgttttttttttttttt

SEQ ID NO: 18241 - DNA, 4599 bp, Cannabis sativa
  modified_base (4557)..(4566): a, c, t, g, unknown or other
tttcaatcattttactaattttattcttattttcacgatagtctctatttttttctaactaaaactttgtcccaactttttcataaattgacacttcgtctctaaaaaatacaatttattatgtttaaaattgtgtcttaattatgtgtaagaataatttaagtataactcataaaagaaaatatttaagttaaattttatttaaatataaatttaattaatgtataaacaaaattactcttcaacttctctcaaataattacacacaaaataattcacttgtattgtatctactactgagcacaatatacaagaatgcgaaaacataatgcttaaataaattactaataaataataaaaaaaaaaaattgaaaccgatttgaattataatattcttttgcagaattttctttttgaattattttcatataaaattagaattaaagaaatataagagatgtaattacagagtttctcatagaaaatataatataacagagcttccaaataaaagaaaaaaaaaatattgtctataaatgagaaatgaaaatttgataaaaaaacaaataaataaaagcacatacgattcttataagaatatactcatgaagcaaagttttcgtttcgatgattaatctaaatcaatactaatttaactctgtgaacttgatgaatatatacttactcatgaacaattatttataagtaatacagttacagaaatcccatataataccgaaaatggagacaaagcttccaaaagatggaaaaatataaaaggcacaaacaatgcttagaagaaagtgtgaaagtaaaacatgacacaatatgcaaaaacctcgatcaaagagaatgccaaaaccggctcaaagaaatatcttatgtctgatgctatttattatacaaggatagcaaatgacaaatgcataataaacaaccgtatatatttatatatatatataataataataatatatgatttatctccctgtaataacggaagatgaataatgagggtcaagatcagagctaacacttgagggacagggaggcatagtatacattggcacaggtaacttgggcggcaaattaggcaaagcagcttcaaagttaagaacactcatcacttgctttatagagggccgacatgttggatcaggatggcagcaccacagcccaacaaccatcacgcactccatctcctcatcattgtattccgtatcaacaagtcccttgtcaactgcctcaacaagttggccactcccgtaaagctcccatacccactccaccagcatcaccttaccctcttctgcatttgatacaattggctttcttccactacagatttcaagtgctaccacgccaaagctatagacgtcggactccttgctagccttgctggtagttaaacattcaggagctaggtaacctcttgttccagcaaccaaagttgtgtctagacccctttcatgatcaactagccttgccagcccaaagtctcctagcttagcattgaagtttgaatccaacatgatgttgctcgacttgatatctctatgcaccacacattgttcccattcttcgtgaagatacaaaagagatgaggccaaaccaataactattttatgccttgttgcccacggtagcatgggtttttcaccacgtaggtgtttattaaggcttccattaggcaaatattcataaacaacaaggagctcatctcctttgtggcaccaaccaataagttgaaccaaattcctatgtcttaaacgacttatgatttttacctcagaaatatactctttcttaccctgccttgagcccagaaactttcttaaccgccacgtcagtgttggattctcctaagatgcctttgtagacacctccaaagcctccctctccaagcttcccagcttctgaaaagttgtttgttgcttggcttagttcccggtaagtaaacctcttggggccaatccctgtttctaattctccatcgatggaatcttcctcctctgtttctgcttccctaccaactctctttctccaaaacatgaaccataccaagcccagtccacagcatagaataccagagcccacaccgaaaccgattcttgataattgatggcttcctcccccttttttagtttccaagggaggtgtggggcttgggatagcagatatggtattattattgtgaaagatatttgagtgaaatgaccaagacaaaactttatttaattgcacatatgaacctgtagctgcagagaaaccaactctgacctcttcccctaagaacgtcaaatcaactagagatgaaaggctagtgttttcaccaatcactgtaccatcacccgcataactgagaaacacggttaaatttttagaagtagagttgtaacttattctagcatttcccactcttgaaccatttgtcattttagtcttcggtgagacatgtacatttgagacaatggagttgacattgataccaacatgattggagttaggatcccagtaattcttaaaggtatcaaactccactgcaacgataggattacttacaatcgaatcagattctctgggtatcagtccgaggtttccgccttttgagttattaggaataactgaattgaacggcgcaatgaagaacgctaatccatctccgctattatttttgtggcctccatccattacaaattcgaaattagtggtgaagcttgcaagaagttccctttcgggatcccgaagttggacagccttgttgtacgaggctcgaccgttaccgtggggaatagaagaattaggaggaagcaatgtgagctgtagaaccccgttgtctagataggcgtccgcctcgagtttaatgtcgttaatgctgttttgatcgaaactggggaagctgaaggaaactgaagaacccttttggagtaggaagaagaccacaataagagtcgttataataaaattatatgagctaataaggaactccattgttattgttgttaaatcagtaacgaagcataagaaagatcacagatacagagctgggaagtagtgtgtaactaactatatcattagataaatgtaattttattcaaaaggactatatatgatctcttactcttaaagacgttctatattattcttgtttattagcttaaaggtcttagtcaacggcgttgatttggtcatgttggcatgtatagaattattggctttagttagacataattgaggttcaatgagcagagaaaaatcaagaaaaagagaaagactaaagatttgaatgagaaatcgtctcattaattatgactatttctagaagagaaaacatttctgtttactaatcaaatcaactggacggacagtaacgatgggcatgtgatggcctggtgtgtaagtcttcattcatacgtacaaaattaagtactccttaagaccccatgtttcaaatttgcacattacatacacttttattgaagtgttcatatctcatgtagaattcaatacactcacacattttacttcttattttagaaaatttcactaagttctgaaactcttgttcctctaaagttgctgatttttgtttcctgatagtgttgattcttatcttgttgtgctttgataccactgttaaaagttaggtggtcttttaaccctgaatcaagaaaagcacaattagtgatattaggctaattaaatttgcaaaacttagtattattgcaatattagtactcattcatccatgagttcaagaatgaacagtaacgaaacaattagggtcggttttgagttgaaatggactataagcagaaaaacttttttgggcctttactataaagatacagagaaaattacacttactatgagattttaaaaatttttacgttaaatatgacacttttaaatttgaccaatttatatggtatttttttgtttttaggtctttttcggtatttgatatgtcatatatatgtaaattaggttttcaaatcccacatttaatatttttatatgtttaagtagttttatttcccactgatgccagaaaagtcgtcggagtttgctgctggtgccgaaaaaatcaccagagcagctgtcggtgctagaaaattcgtcgaagctgttgttgatgccaaaaagtttgttgaaatcggcattatcgccgaaaaaattaccaaccatcaggtgggtggttacgttggatgattgaggatgtttgaaaatatctagcgttacaactatcatgtgggtggttacgttggatgattgaggatgttcgaaagctatcttgacaaacttcattgtcgggaggatgaatgacaaacactcatttgaaattatccgacgtcaccaccctcaggtgggctttcggtgggcgttcaagttggatgattgaggacgtttgaatgccatcttgatgaagaaaccaattttttggtgatttttctcgacgtcaacagtaactccggtgacttatccggtgccgacatcaaacttcggtgcctttttcggcaccattgataactccggtgatcactgtagtttcatttnnnnnnnnnntttttttttaaaaaaaaagatattggcggctaa

SEQ ID NO: 18242 - DNA, 2251 bp, Cannabis sativa
aaagacttaacggaagcgactttggacggcgccggagaaccgttgtggtggctgacggaagggagtgagtggacatacttgcaattagggcatgaaggagaagacttagagagtataacaagaagatgacaattgagacaagccaaagcaaccatgttgttgttgttgttgttgttagtgctcccacccacagaggaactttgtctcttcatgaacatctgatcagagaacccatttatcgtcctgttatgatgatgatgatcctgatcagagagagatgacatgtttagctctaggtctagcgccgcggctgccgcttgttccatcggaatcggccagttccagctctttctcagcgtttttctgttcaagtaatacatttttcccgactgccaaacacccccacaaaaaaaaaatatatatatatattaattaattgtatttttctatataaagaaaaaagaaaatgatagcgtgagagttttaattacttcgagatcgagacactgctcccaatccaaaggtagaggatctttcagttgaagatcaacgctgagtggttgttgatgatgatgatgatcaatattattattagtagtattcatgagaaaatgatgatgatcttgaaagagcttcctttttcttgaagcgctgctatgatctgattccaacgacaaaccaatattgttgttgccgtttttatgaacaaaagcctgcgttggagccaacgacaactctggaaattccatccacctatctatgtatatagttatgtttacaaactcgtaaaactatataatataaatattgatattaattgaaatgaatgtaggacttggctggggttgaggttgagattgtattatgtagtagagaaaatctcgagctaggtagtgttgagaaatgaaatagagagaattatagtagaaggaggaggaggaggagtaatattagtttgaaggtacttatgaaggttctttaattgggttgatcgaaggcatttaaatggaggagcagtagctaggccaagcatttaaggtgagaagtagatatcactttaatgcctcccaaatcctcctacttctcctttcttcatacacgcatttaagaccaatctctacacatgaccaacctcaatatcgattccaccctccaactccatcacaatacaaattactaattattgttcttgttgttgttgttgccttcctagctacttaattaattcaattctcctaaaattctgtactttaattaatattttccatttaattatcagtttccacaaataattgactaattaatttatcaaatataacatatatatttttctattttcagtaatattatttctttcgatttattgctaataactatgtaaggtgtgacatttatgttatttgacgggatttatttatatatattttttgaataatataaatataatatatatctgggtgaacaacaaaaaaaattactatatttaattagtaacaacattttagtaaaaatataaatttaatctgactaaatgtgagtaacaacaagttgcttgtgactagaatataatattcagatataagtttttattaatttaattttagtcataacagatattgtgactaaaaatatatttagtcacaaaaaattgtaattttttttactaatatttttaagcacggacattttaacaacaacataagaataatgatttataattaattaatcacaacatttttagttttagtcacaagttttcttatgactaaaagtaagacttttgtagtgaatgggtatgttatttaaaaaatttgaatttttacgcttaatttttaaataaaatttaaaaaaatatatatttttatattacatgggttgagttattcgattggttgagcaaaataaaaaagaatgttattgagaaaaaaaaaagataaaacaaaaagttaattaagtttaatttagatatttttttatataaatatatttttgatttagtgtaaaaaaaataatttttgatatttttttaattaggtatctaaattatacataaatatattttttaatttgttgttggatgaaaatctaatagctagtttaacatttttaatatataaattggtaaaatccttttattctgtatatattaaatgtgcaaaacttcaagatggagaaattctaccattattatttattaatatataaatatatatttttgtagttttaataattattacaaaaaattttactt

SEQ ID NO: 18243 - DNA, 2911 bp, Cannabis sativa
  modified_base (2791)..(2794): a, c, t, g, unknown or other
cacttggggatattaagcacaaccatatagttcaatcaacaaattgtgtgaaagtagattctaactatgagaaaaaactagaaaacaacaaaagaactaatatttgtttgaatggtttacaaacgcatattagaataaccaagtttcaaagactcccacgactttttaatgtcaccaattaccttctctgccttgttttttttaagcacacaaaacttcacatgatcctcttcatccctatcaagtgactgttttaaagcatttgcttgatcagccaaaacttcaagcaccttactaagtcttgccttcttcgccttcctttcagtcagctgactttcaagctcgtctacttctcgatcaacacactctgcttgtttccttactggcaagaacttattagaagataattccttcatagcttttttctgatcatctattgacttctccttctccaggacctctcttaggtcttgtttggcaacttcatattgctcacaactttgaacaaaattagccacaaacttagttatctcatccaccatgttctttggaaaggcattgctacttagcaaaattaaaagtgatttcttgagctcaaaatctctacccaattggatgacattatcaagatcaatatctaggcattgtttgaagatatcttttgaatagataatctcctcaattgtcaatgaagtgccaaagctgcttacaaacttgtctggcttaaaactccctccttctattatactttgaatttcaacaaacaaagggtcaaattttgaagtagttctttttgtttctgaggaagttgacttctgatcgataaaatgtaacttaagaattatagatgcatgacttaatataaacaaaaaaatatatatttttatatatctctagttgtattattattgtaaagaaactattagttagtaaacatcaggcataatcacctgatcagcttctctattttctcttttgacatgttcttcactattcacccttacctgcaacgtaattccaaaaccccattaatatttcttaatatcgatcttgacaacaataatagttttatttaacataataattaagatgaagaaaacctctgcttcgactgtgcacgcatctcttacaagaaaacctttgctaggatcatttaattcactcaaaggaatgactgtatggaagccccaactctcaccattatcattgaacacgtgattttttgctgcaaattgtgaagaaaaacaattataggaagagactgcatgttgattaatatgttaatatgcaacaaaactcatttattcacacaaacacaatcaaattagtgtttttataaggacgtacataccatcatattgtacacgtttgtgacgaaatatttatacacatataataaggttataaaatttcaacaatgtgaaaaatgacaaccagtaaaacgtacacatttgatcctttaaaaagaccatacatttaaacaaaattgaaatgaaagctattttgcaattttacgtgtatattatttacttaacaaatggtattattcaaataaagagtgctgtaaaggagaatatataataccttcattttcaactgttaattcaggattttgattaataactgataaggtgaaaaacttaacgcatatactccatccaagaggcaaagttttggaatccgccactactaaatacatcgacaaaaaatccacatagttgccttttgggacaatttgtatcttcctgcacattcaaattgaatctcatttatatataaatcatatatattaagcgtgcttagaagagcagtgttaatagataagaagaggttcagatatatataaatatatatatatatttatataccatttgtatcctcctgcatagaaaatatctgaataatggttattgcaatcaagcttcgaaaagttttctatggtacatcttaaccgagcataatccataggcggagcactattcccagtagatgtatcttttgcttgagctactaatatcatcatgtgtcagttaacgaatatataaatatgtatatatataatgtttaatttgactgaaaatatatataatggtattagcaagaacacaatttatttttattttttaaaaaatagatataattgccaccaaaatagtgctatagatatattatgttttgattttataaacactgaacagtcgtttttttttttcaaaaacaaatgatgtggtatgtaagggatgaaagaacatgcacacaggaagaagctaatgacttttcttaatcaaacaaaactactcaattttgagaggaggaaaaaaataaacaaaatcaattcataaaacataaacataattcaaaataacataagtaaattataaaagtaaagcagcagtaagttagtttagttaccctcttccatttgccagtctaacaaaaaaaaaactatctaaatctatctaatatctattatgggcagtgtttaattgggagaaaaaggaaaggagtggagttttcaaataaatgagtaaataaggcagtttcgaaatcttaatcggcaattacccatgcgccatcttcaataaaatataatcatttacaaaataagctacttctctatatttgctgggggaaatcgaaacgagcgtcgttttttttttcaaccgattattgtacggtcacaaagtaatatctattaatatttatgagaaatgctaaagggcaccacttagcattcttatgtattaatatcattattggttaaactaattatcgagtctcatataatttnnnntaataatttttagagagtatcgctagccaatcgcaacacgacataatgctcttattatatataaaatacatagttaaattttagattacacctgttagttattttttgttttgataa

SEQ ID NO: 18244 - DNA, 4662 bp, Cannabis sativa
aaattagatgaattcagttcaacttaattaaattaaattggatattattcaaccctactaaatactatactaatatgactctttataattaattagcagtttctaaatcaaaatatataaaagtggattcgaataataatttgtcactcgtaacatttctgttcttagtattattataaataaaaaaataacaggtgtcacacaaaagttaatcacattgtcaagaaaacgagttaaaccctctcctttttttctcttgaaatcaaaaagctacagcaattgagaactcaaacgtacgtacatatatggataaattacatttcttttttattttaggaaagatacattacatttctaatatttgatatataaattcatataaaccaaatgtaacattctttttcttgaccgtatatagtttttcaagagtaaattctttctattccaaggttttcaattcgctcttcgattattatgatttaattattcttttatatttatttatttatataataacatataaaaggcacgaggcaaatgatttcattcatttttgcttaaatttaaggaaactcgctcacgaaaaaaaaaaaaaagaagaaaaaattaaggaaactcgaagaaatttgacatgtttagtagactaccctttctctctccctctctctttctagtgttcagtttctctctctgaaatctataatgttttgtctagtgagagagaactcttcgccaaataactagtgtttctcacttttcttgccacattgtccttaacacatatgtagcttggattttccagcacttacccttgtagcttctgtatctaacacacacacacacacacataatctttcttcccctattattattatttttattattgatattgtttgtttcatttgcatgtttcagatacccaacaacgcaaagcattcttttttttttttcttccataaatatatatatatttagatatataatatataatataaacacagttgcaagtttaacatttttgcctattctcattcgcgaactcttgtgcatgttttgagtcactgcttctttcgtgatctttatgtgtttgaggggatgaaatacatatatctatttttttactctctctgtcttttttattaaatgggtattggtttttctgtgaattatagtgaagtttgtttgactttggtcgtttgaagctgctggttcttctgggttttgatttaattgggtcgtttcaccctgatgtgatggctcctgttagaggctctaaaaagaggaagaagacagaaaagaagcctgaggaaaatgcttatggttctgggtcatctgagagggatggtcctcttgattggtgggatgaattattgaggagaattaatggtatattttcttatatacttttctatgtttcatctcattttttggttgttattgtttctcttcttatgtttgcttctgttaatctcgtgtgtgattcttgataattgatattgctcttgttgaactgtcatattctgataggtttgttggttattttctgcattggatgaaattctagttgatgggttgaattcagttttgtcaaaatcaattagctttatgctttattttctcattcaaaccaatacttggtattagcaacaaatgtatttggttacatacaagaggaatccctaatccttcttttaatgttatccacttcaccttaaagttctgtttttctttgacttaatgactcagagaatgatagtattaagatttcataagatggtaatgaggatttttttttccgagatttgaagatcaaatgatgtttctagattattatactgcgcactttggcttctattgagctttaagttttataagatacacatttctttattatttctcaaaataattgagaaagtgttttctgtgttatcattcagcaaatgtagagttgttgggtgttttagaatataaaatctaggcatggatgtaggttgtttatggatagttatatgcaggaatcttctgattaagctcttgttcgtgaaatagaaaggattcgaatcataggttgcttatgttctatatatagggtttcagcaagttgtgaatttatagtcctatctactgaatgttggaagttttaaaagaggattagttaggacattgttttgtgcagataaaagctttttcattatgcataaaaccaagactttcatctcctaatgtcattcagtaaagcattattaagcttttggttatatctaaattatgatcatgatgaaattactttagttagttgtaagtatctgatctttcttcagtgtttggacggtttcttttctcctccttttctttattggtgagtagtagatatgcacaaaatgcataaagaatgtgtctgctgagtatcaaattataggcataagagcaagagagaggcgaggatatttggttcagcaagcacatttggttaatagctttgctggttgttttgaccaaggtagacatttttgttttacaaaagaagttataaagtatttgctgacatttctttgggtaaattttcaaatatataatcatctatcattgattcattatttccttttcattgctacaaataaggaacttcttatagattatgtttgagaaactgatttcacatgccaaaaactattgcaatttgatatttgttactgtttttcttcccctatggtttggaatagtctttgcaacaagaatactattacaattatttcattctttgcttcattaactttcaaattgctgcacctctactattttctttgatgcataaaatcatgtgtatgcaaataaataaagtgaacagtcattaggaaaatttactgaccttagatgattatgactgcttggcaaaatgtctggctgcttataaaacttgatatgtaaattcacttttattagataggaacatggacaggaaaaagttctacatcggttgcactaaagtaaagaaatcaaataaataatattacgcagactttcgttaaagaacaatatattttctgcatgtatagtttaagctagacttattgaaatgctaaatatatattttgtgtaatctgtatatcacttaaacagcttactgatattttgagcgaagactctttttaagtgtgagattagaatttatagcttttaaattatgtattgttatttgttgatgctctatacatcaagtaattcataaaccaagaacacaaatatattggcacaattttggttgaatactttctcaaactatgaaatgtacttttatataccttttactttatatatatatgtgtgtgtgtgtgtgtgtgtgtatatgtcaggaatatattgataaatcttagttaaaagtttgaagagaacttttattggtgcagaaatattttcttaacaacagagatagacaaagtaggtaaagattttagataactagcaaaacaaaacaaggtaagagctgaagagttttaattgccagcaaagtggttacaatacttcactatccaaaagttgctaacttgaagaagatttattatgtcaagatgctgatatcagatgatggtaaaaacaaaagaaaacacattcaatatctcaagagttgggaaaaggaacttattgggaaattaagaaaagaaaaatctctcagatcattttagcttagagacagttatctttctgcttttcactatatatgacattttacttatatgcacggttttttttagttatttttatttcttactcattggccaattaccagcatctacccaaaaccaatcctttgggagacctgccagactatgtttatgatctttccgaaaaggctagattatcttctgctgaaataaactataagtttagctgttaggagatgtgagagcatatatttacgttttgtggcccagaaattatatggtatcaccactactaagcaatatgcagacatattttgagttttggtgtgtattttccaaaatgagttctgactgatcatgcattaaacataattaggctaccttgatggttccatacactttggcattagctctttggcatgcgttgtagattcatacatgaataaatacatatataagagtaaaaaaactacagctatggataataaaaaaaaatatttttgtcctcttgtcatggcaggtctacaatgtccatcaaaaggtgttgacaagtttgaatctgttttcaagatttctcggaaaacttttgactacatatgttcacttgtaaaggaagatatgctggctaagtcagctcattttgtgtttgcaaatggaaaatctttgtctttatgtgatcaagttgctgtcgcactaaggaggctgagctctggtgattcgcttgtgacaattggcgatttgtttggcgtgaaccattcaactgtctctcaagtgacatggcgatttgtagaatcaatggaagaacggggacttcaccacctacaatggccttccaccgaagcagaaatgacagaaatcaagtccaaatttgagaaaataagaggcttccctaactgctgtggtgtcattgataccactcacatcacaatgtgtttgcctgcttcagacccggccggtaatgtatggcttgaccatgaaaagaaacacaggatgatattgc

SEQ ID NO: 18245 - DNA, 4220 bp, Cannabis sativa
tttcctcccatattgacataacttaaagaaatctctttaaataatatatttttcaaatatgtttatcatatataggtacctatatagaatcacttcagggattcaattatgatcaaatatgttatgtctaacttctcttgggagtctcttttagagtaccgttttcatcacggttatcatttttgaatcatcaatactttataatattaaggtatctccatgagtacctctagatttaacaatttcaggataaatcaaatgaacatttattaataacttttacattgttcatttacgctttaggcgttttcaactaattctaactcaactttgaataatattgattcgcagttggtatatatcattttgaactatatcgttgttatatactttgtgcaatgatcattttttaaaaattatcatcgatcccaactgcttctctccccctgatcgagagaatttttaaaaattgtgatatgtaataatattaatacacttgtagggatttcaatatatcacaatgaatcaatatttgtctaaacccatataaacaaatattataaaataacataaaatagatgagaaaaaagaagaagaagatgaagagagcaacagaaagtgaataagaatttctcagttgtttattctaatgggataaactcttatttatataaaagtattgattaagagaacgagaaattaaattaatatgtagtaaaaaaaaaatacaaaaaataatggtaataattaatatggtgatttagacgtctataaataatatttgataacaattattaataaactgttaattttttatgtctaaatatagggtgattacatgaagaggacacattccttaagttcacgccatttcacctgctaagtgttaatggaaaccggacaacacgtctgattttacctatcttttggtggatgggtcgggtaagtcaatccttatggacccagtggatgggtcgggtatggacccagtgaatgggcgtggtatatttacatgcttgcaatactacctaatccatctaactaaaatgttaaataaataaaatagttggggtcagatatatgaatatatccaaatagatagagtcagatttaaaaagagttcaactaagattatatcatgatcaccagctttcttgtatgtatggattgcatgtatttaattaacagctaggaatatatatactagtagatcatcaattccaattgatgatttgactttaattttaatgtttttcttttcaaataaaaaataaataaataacttcaaactttggactttccatcttgttgtttattcaactactatatttacgtttctatataaaaactccatgaatgtgttactctcaacttcctcccaaaacaaaacaaattgcttaataataataattacatcaacggccatggaagagtatccaccgcaccatttcttgtgcccaatctcaagagaggtaatgaaagaacccgtcaccattttcagtggcgtcacctacgatcgaacaagcatcgaaaaatggttctttacatacaagaagaagacatgtccgaccaccatgcaaaaagcctccgatttcaccttaaccccaaatcacactctcaatcgcctcattctctcttggcaatctcccaataccaccacaacgacgtcatctccttcttcttcgaatagtagtaattataaacacgaacacatggtggagcttctaaaggcaatcgattcctctccgtttaaggtccgatcgttgaaagaaatgcgttctcttcttcaaatcgacggcgatgaagctgccaaatcggattttatcaaatccaacggcgtacaaatcctctgtaaaattcttacacagattctcttttcggacggatctgatttcgttacgtttcgagcttgtgaagaagctatagcagttttataccagttggtttccgtagttgttttgttatcagaaaaagaagaagaacatcaagtgtttgatttattgtctcaaccagacacaatgagatctatggtaacgatgcttcaaaaagccagcgcagatacgaggctccacactctttcaattctcagaaacatagcaaagaagacaaattacgattggaactcagatcacgcatcacaaggaacagatttcttcaagtcgttgttggagttagtctctgatcaaatcagcaccaaggctagctcatcagctttagaggttttgatagagattctaagcaaatcaaagaagagcaggctccgagccatcgaagcaggcgcggtgtgcgtgctcatcgagcttctccccgaatcgaacagatcaagatgcgagaaaatgctttacttgacaaagctactgtgcgaatgcgcggagggaaggacggaactggttgagcacggtatgggaatagcagcagtgtcgaagaagatgttggaggcttcaaggacggcaacgaaggtgggtgtgaaggtgctgagcttggtgtgtagttttcatgggaatgagaaggttttggaggagatggttatgtgtggagcggtaaagaaacttgtggctctgcttcatattgatgggagaagctcaaccaaagataaggttgtgaagatgtttaagttgcatgccaattcatggaaacgttacccttgtttctccactcactacaatcaatatttgggcttacttgttaatactaatgataacaatcatcatatacaatagtgtccattttatttcattcccacaaaattttttgatgttcgaaatttaaatgtgtcacacacatatataaattaaatatacatgttatttttattgtaagatcatacagttttcaactttcaaaaagattaaaaaaaaaaaaaaaagaaatacaaaaatgactatatggataaatatataaatatatatatatatataattggtgtaatttatttccctttcaattttgctttttggtttttttgctattattttgatgtttcaattacttgtacttgtattactcaacttattagtactttggggattgtgataaattggaacaagtttgacagaatttatataatcatgtgtggaattaaaaaatcagagtggtaaataattttctagcctctgtttaattaactactaaattcttctttagtgctaccattaaattcctaatttcctattctatttctttcccaattaacctccttatattttagtgctacgcctcagtgtttctttttctgtttttttttttttttcatgataatgtttcttatatagttataatatcaaatctctaaattttcaaaataaaaataaaagattttgaatagtgtataatatcaacaacagagttcttaccatcttagtttactacgcgtattcaaaaaaatttaatttattttcgatattgtacacagttcagaattttttaaaattttattaagatgattttgtaattataataagtactgtcacgaaaaaaaaaaaatctttcgacatgtgtttcgaacgtaaaagttgagaaataaattttaataaaatgttataattacactactcatttttatttttttaaaaaattgtcacttcatgaacaaattgatgaaaatgaaagcatgaattcttttttatcatttttttaattgttatgtgtgcaaatattaacaaaattaatcttagaaaattttatttgcacccaaaaaatttataagtataccccaatatttaaaattattaaacttacaataatttttaaaaattagttttaatattttctaattttttttttctctcacattaatttgtattaattttaatacctattttaattttatttttaaaatttttcttttaaatcatgtataatttttttctaataaaattttacataattttttattttaattttttttgttataatatttaagaaaaatgtatttttatttgataggtatctttctaaaaatatgaattgaatgaaagaaattaaaaagaaattaatataattcaagatatacattttatgtaaaataaaaaatattaatttaaggtgtatttataaatttttgctgtacaaataaaactacccttaatcttatatgtcggactaatttaaaatggtagtaatatctttatatattaaaagtgcctatctaacagcatttcttggtttaacagaatatactttaaaaataaaagaatattctgttaaatttagcgatgtta

SEQ ID NO: 18246 - DNA, 5009 bp, Cannabis sativa
atttattgatccactatgacaaatcaggtcaacatctgaaaaatgacacttgttttcccattcaattgcgttgagacttcaaaaggaaccacctaaccattgagctagcctcggtgagtgtcaagatatgaattttgtaactctcatcattctctttaacaaacatattgctttagaaagatccatacacataccttcacaaatgccaaaaattcctcctccatgcgaacaacaactgccattcttttcaagtaggaagcaaaatggtgtctctggacaatttgaacagaatgaccacttcctctgcagttaataacaaattttttattcaacaaataaattattatctaaattatacaaaaggatcaatcacaaacttctatacaagatcaagctaagaaatactattcattatctgaatgagaaagatttaaaagttttacctctttggcatggctttctcgtcagatttataggtccaatctattcccttaagtgcagccttttcaagaggatcaccaacctgcagacaagaaaagcattaaagcaacatattgatatgttatgcagaacacaaaacattgttgtaaacgcaaaaattctgtaataattaaacaaaggggtaataaataccaacggtttgctaactccgagtaaatataatcaagaacaatgttatgctttacaacaagtataagtagagaagctagtcttttaacacgagtctacgaaattaagcataccaacttgttatcgacgaaaactaatgcatgacaagaagccattatctccacagtgcgaggaggtaatttagttgcatcagattctaattccatagaactatttaatccaacaactccacagaattcctgttaaggaacaagaaaagaagagataagcataataaaacaagagcacttagaacataaatacaatagattgtttcataacacaagcataccatgtcatctgatgtaagtgttccagttttgtcgaaacagcaaatatcaacctggaggagccaaaacaaatagttcaaaatgtatctctatctagcagaacagaaactgtgccttataattgagtgcatacaaattaggaagaggaataaaagtatgaaccaaaagaaattagaaaatcaaatgaatatggtaaatcaaaagacagtccctaaagttgtctaaacatacctttccagcaaatggaatgcgaaaaggttcggtacaatatattccacgtcgtgctaatgcaatcagagatgtattaacagctatggataattccattggcagctcaggagggatcacagaagtaataatgagtgaacagcttaggaaaagcttgtacttgcttctagtaggatcctctagcccctacatcattaactcattttgatcaagaaacagctaaatccaaagccaaagaaatatcgattaggtatgcaatgttttcagttattcaccttttttagaacataaccagcagctataatagcgaatacaactaaaaataggataaacaacccactttcccaactattagcagtaacctgaaagtcaagaagtacgaaggaaaaaaccaatcagaaaacaacaagaggaatcaaccgctgttgatttaaataagcatggatgatgaaatatcaatacaaattaccctctcggtagaaaataaaattgttcgcatcagttttccttgacttgtttcaaaaccagttcttagaacgacagccacacaaccaccatcaggggtcttcaaagggaagctctgattccagttttgtttaaacagataaacaaagcaggtgagcatgaggatattcagaatacaaaatacatgaatttcttcaagtctgagttaccttatctggagtatgctgaagaattttcgttccaccaaacaaaacatggtttttatctctcttaacagataacttctcatcagctcctctacccataaccgaaacctgaacacgaagcatccaaattaaagactccagctttcccaatttctaaatgagccatcactcagtatgctacagctatcagagagaacataacaatctcaactctaataatgacagaaaccatgtaagctaggctccacacacaagaaaatgagacggcaaaggatatgtattttatttcaacatttatataagtgcacgccagtgtgtatacatcatgctacatacaacttcattcattaaaacatgttatacgttaaaattgttcttccctagtaccagtaagcctatgtgcagaacgattatttgttttgtcttaaaactttaaggtttaaggtccagcactagtaacaaacagaagaattaccttccattggggagtagactctcctgtgagaatggcctcattgacaatagcacttccagctaagataagcatatcggctggtacagacttatcttctccattctgaccagaagagcgtccaacagagacgacatccccgggcaaaagatctgtcccagagagcttcacccacctgaaaagatcaacaacattaatagcaagttttctatactgaatctgtgtacaaatgttgtgtgataacatacttcccacaacgatgcaccattagagtctggttgtctactctaacacgtctaagctcagttagcgtcttcaacctacttttcgccattgttgactcgaacataaacaacatgaatagggtgaacaaactgtaataccaatattcatccaaacaccagaggccaacacagaacacctacattacgaaaaagtaccaaacgaagagtgaataccccaaatgagagcagagatagggtagggagttggagttgaagagagaacctgaaatacaaagaagggctccatacagtgctccttcatcaatttctgaaacgtgggctgtggatactcaaacctaagcaaaatgaaatcaaattatcaagcaagaacatttgaaatcaaagacccgaaaatgatgaaacaaagtcaaaaaaggcagtagtaacctacacattccttccccacttatcagtggcaacaacaattttagattcagttccatggccagtgtttttcagataatatccaaaactttcctttgtagggtaaggaagcttgctaaagttctgattttcttttgagtaaatgaaacgttgctttctaaaatcaaagtaaatctcttcaccgagctgaaccaaacacaaacgatgtaaatacaaattaagattaacaaaaaattaaacgtgttcattagacaaaacaaacaaacaagaattgaattagttgacttacttgttcacggaaatttagtgaaacaacttccttaggaccagagaatttagccggagttactttgcatgaatccgcatggtgaatatcattaacctgaaattcattaatcaatgttcatataattcacaatccgtgattcaaaatcccaaccaatccagaccaaaccatttgagaccggaccaaatgaatccggtgtcaacagtatggtcaatccaaaatatacatcaactacatgttagtaaaaagctgcaactgagagcagcatttggattatttggcatttccggtaaatactataatcaaaagcaccgtttataattctgtggttcggtcacggttttataattcttgttcgtaattaaaccaaaccaaatcccctaatcttttatacattatttatgaacaattacctaaaggaaatagaaacatctacgaattacaaactatagtttccaaccaaaccaattcgttctgaggttgattaatttagtttagtttgagcatttgattggtctggtttggttttgaattttaaaaaaccaggtttggttctccatgaacatatatatagagatatatatttacctatatagataaagatagtgtttttacatacctgagcatattggacgaagcatttaaagtcaacagaccaaacagtgaagagaaaaaccaaaatgtgaagagttgcaattgcaccgaaaactatggaagcgtcgacaatgtcaatacttggaagaatggtagtgagccaaatagcatagagaagagcaaaaggccaaacatcgaaacgccatggccaatgcttcttcctcaaaagatcaattctttcaacgactttgccgccaacatgaaatctcaacatcgttcttcgcttctcctgtgaccaaaaatcaaatctttgaaataaattgaaattgaacagaacagaacagatccccaattcgaattaagaaattagaaaattccttcgattagattggattagaagtttgagtatctgaagaagaagaaccaaaggttgaagacgtagtgagattattcctcttcctctctcgtctaagtcgtagaagccgccatgtgagatgagtatatatttatatatttcttaattaaaaaacaaatgaaaaatttaactaaaaaggaaaagtaaagcacttgttgagtgtttggctatatttctatcttggttgggggatttaggaagttggggttcgggtttgggtcgaggttgggattggagtttaggtctagagtggggttcgggggacaaattttaggtttaagtcggagttggggtcaaggtcaggatttagggatgaggtcgaggtcagggtttgagtttggctcggaattggaattgaggtctagagtggagtttggggacccgggatctaggtctaagtcagaatcggggtcgaggttaaggttaggatctagggtcaggttcagggttgagatgtatgttagagttgaggtcgaggtcagggtttaagatcgcgttcgggagctgcgttcgaggtcgagatcgaaatcgaggtctgtgttccgatctaagtcaagtcagggttcgagtttagatattggtcagagtacaaatcaaatggagtgtgacgtagtggaaatatttttcatgatattgtataagaggttaaaaataagttactattaaaaattatatatttttagaattgaattaattataattaaccttataaaaaa

SEQ ID NO: 18247 - DNA, 3307 bp, Cannabis sativa
atgaagtgaattgtaactatttgagtttgagcaaattaacccccttcccccctctctcccaaaaaaaaaaaataaataaaaattggcatcaatatttgtcacaagtgcttgctgggttagtcaaaatccaatagttaaaatagatttccctttttctcaaaaaaaaggtcctttatctcaattacacagctatgtatgatagctattttagtgaaatgaaaaccagtaaatgaaaccacgtatatagtacgtgctagtagcctagtagtatgctgcttatagaaatagaggatttatattcgtaccatatgattgtcgtcaaataggttgtacgactcggatctaatcaagagaatgacatcactttcttgttcaagacttcatatccttttggaacaagaaaaaacaaaacaaaacaaagcattatattttctagctaggtaggcggtggtgggatgatcgatgccatggcttacagcttcgacatggttggtacagctcaaacctatacctataggtatatagcaaacatcctgcaactaattaactagacttgagtttagtctattcatccacataaccaagtcctcatattgagagataactaataagagaaaattgccatgtatggattctgttgtcaattttacacttcgttaagaaaataaataaataaatcttacacatgaggaatgtagcaattaattgaagaatagagggtcccataaaaggtcattttggtaatgaaagaaaagaaaaaaataaacactttttacgtgatgactttgggtaggctagtccattccttagggcgagtgagagccacgagaaaggaagccatgtggcaaagttcttaatcgcgggaaatgtacatgtttctagtttttcaaagaaaataaataaatgattcccgtgtattgtttttttttttttgtggtaaatgccataaattatcaaaattttgtcattatcaagtccagcatcttagattcaaccaggtttggaagccagagtcagaattgactcccattcccatggccgaagctaggtcatacaattgtctgttcttcttttaagtcttctacttttttcaattttctcgagtctactgtttgtattgttctgctcttgtttcaattcgtaatttatttatacacatattttgtttcaaatttttcatcgttgtattgtaggatacaagtcccgttgcttatgaaaagagattaaaaaagcaaaaaaaaaaaaaaaaaagaagccacaattgacttataaaattatagtctccattagagatttcttacaacaggaaatgaaattcactagaatataaagtaagaaacaccattaatggtaattcttaacatgcccgtaatatatatatatataataagggtacatttttagacatgaaagcttaataggatattctctattaatttttggttgataatttaagagggactgactgattgggttgagtcctttcactgaagcttgaggtttctcatcctgaaatggaaaacatatttaaatagatgagcattattaattattaggattatataatattatatatagccgaacaagaaagatatatgagttgtaacagtcagttacaaagtacagtttgtttgatactcatgatcatattggtcattctagatataatttgcgtgagtaagaaaagatgaacataaaaaagaagctcaatcatattaagttacgccggcaggttcgtaagatatatatactatttattgaggcattgttctgctaaagttgaagaatatactagctattagagtcaaagtcttggagaatctttgagcataaagtataatttagatatgattttactgaaaggtacttttacgtttctttaaggacctactacatcgatataaattgaaaatggatttaaataacttaaaaatctggctttgaggcatgcatattcaagtaccataaaaggctaagttagtcaagagaaagtgtccttttttacggtagatatggcattaagtatgtgtgaaaagtgtggtgcttttaaagccatcgtggttaaataatattattttccgaatatggtaaaataataggcagtatataaatgtgttatgtttaggtccatggaattaaggttggaaactagtacctcttttcatcttcgtttgtgctgccttgggtactccctccagttgtcctatagtttgggaatgggacttggcctgactcaatatgcttgacatcttccacaaggagttcatagtgccttttcacttcctccggggtcttacccccgaccgccttcgcaacattgtaccaacggtcaggggtgtccttgtcatacacagctaaagccttctcaaaagctttgttctgtttcacagtccaagagccacgagatgatattgaactagatgccattattactgaaatttggtgttaattatagggactgatgattcagcaatgaaatcaacaaatggtctagtgtaagttttacagaagcaaaagcagtttcgaagttggaataagaagaagaaactaaataaaacaggtgaagagaagaaaaagcttatatattgagaagggtgacaaaggtaatgaagagatatgaagactcaatcaagttcagggttgatgagcaaagaagtatgagtgcatgcttttataagcgggagaagagcaagggaaggtggggtagcactattggcaacaaaaaatggactaaaatttaaatgatgtgtatacttaggaaccacaaaatgaaggaggacaattgtgaagaagaagaatataggagaatcagtactatcaagaattgttatgattaatatataaataatgtaatatgattatactattcatcgtctcgtggcattataactaattaagccatgaagattaaaacagtatatatgtgatgatagattctatatatacgtcaaaacactgatatctaaaaactaaaaagtggtggcttataactatgaactaattcaactggcaaattcacgcagttcggcttttaccttgtgtgcaaaaaggcaaaagagggaggaaaaaaatatttggagataaaattgaatggagataaaattgaagaattttttttttgaagaattttttttattattattattattattttttattttcctattgcatgctacgaaacatttaatatattttcatcttattatattttctatgatgatgtcatttggttgtttggttggattcatacgagagggatatcttcacaatgcccaaaaaaaagagaaataattgagtgttagaaaat

SEQ ID NO: 18248 - DNA, 5999 bp, Cannabis sativa
  modified_base (5809)..(5821): a, c, t, g, unknown or other
ttgaatttgaaatttgcaggaatgtacttttgggagtgtacaagtgttctggtccaggagtaacagcactgcatgggacatcttgggccagagagcttgattttgatacggctcatcgctttttggtcaagagttttgtaaatggcagacattggattgcaccctctgatgcttaattaattatttcattaattaattaccatacacaaattatatattcaatttttcatgtgtgtaatataatataataacttgtatcatgttatgtatttctggcttgaataaataaataaaacacatatatatatataaatggactttctttcttttcatggttttctttcatgccactcactcactcccccaaatcatttgtctctgattaaaattagaattacatgatgatgatgggatgagagaaggagaaaataccaagttgacaaattcttggtcaactaaatttctaaataaaacatttgaaaaagaaaggtgaacaatatatatgcaactctagtttaggtagcgccactttattataaacttgatgtaatgaatcatggatgctccggttgggtttgaccgacagaaaccaccaactacagctgctgcgaataaggctttgccggccggtctctgatgttttcacattatacaacaatttccctgagattctagcatctctggtgatctgcagaaaacagaaatgtcttaagcttggtgctcggtacaatagaagagatattgaaattgaaatacaagaaaagaaatagctatgcaggccatgatgtttaataatgaatgaagaaaataataagaacaagtattcaagcgacctcaaactctcccaagagctattgataaattacaatagaattctcatgatccctctaattctgattctaatctcctgtatgtacccttctactgtttatatgctattactacatggggtcattatcatgtacggatgtacctttctactattgtctaaaaaattatgtaaattgttgagagctctagaaaatgaaagctcttaacaacgattgaccccatgaattgttatcagcctacaaacgattttgtggacagtaatttaaaataattaatgcctatgtaagttccatgaattctatgtagaaaataataatgcaaactggtggatgagattttaagttgaaaattattagattacttacagttggccaagagtagctagatcaaaatcaggagccagctcatgcattatatcattgggtggttgaccacattcctgcattttctgcataagttcaacaatcttactgaaattattggaatctttttcatatacttcattaagatcttttatcagtccatattggtgggagtaacgttcgtattcttctttgctcaaactcgcttcatgctcagccaaccactttgggtatctttctccaatttccttcatgggttcatgaagaatctcctttgacaaaagttgttgcatcatgttctccatgatagattccatgtcctatgcagaaaggaaaatagaattaatgaaaaaacacaatagaaatcatcgaagagaaagtcaaaggcgatatgcataaattataatgagcagcatggccaaaagatgaaaattgctttgaaaaaacaaaaacagaaaagaagaagaaagaatattgacgatattgatgaccgtgcctcaatgatgattctcatttgctgagaatgataagtattatatcaaagtttgattactgccataccatgaatcaaccttgtaatattcagatatgtagtgttcaaatgtaaaaggataaactttgatgtttttcccacaaacaaatctaaagatgagactgaaaagagggattcaattcaagggtgttaaaggataaactttttagtgagaagcaattctaaagatatatcagcctaaatttatgatcaattaatctcaattttaggtccaaacagaaattgacatatgaaaaaactattttgcatagtaattgggtaaaactgattcagtaggagcaccccaaacaaacatataatacaatttccacaaccgaatcttaaaaacttcaaatttctgtaaggaaagcattccactactgttcaaataaaaatttgcattaaaagaacacatcattgttgtaatgaaaactacctaatatgacatcataacaaatgaattgggcaaaatgaatcatactctagatagaatactaaaggactaaagcaatgataatgaaaccctaatttagaataattaagcaaatgggcaaaatcaagcactatcatattcaattaaaaagcaagaacaattttgaagagcaaaaaagaaaaatccaatgacaaaatgattgaataagaggagtacctgtgagccagcaagctcctcaaactgcttaacccaatcttccatcatagcatcattacccaagtctggaacaggtggcctggcagctgtggtgacagattccagacccttaacagcctctctagtttcagctctaagtttatcaagggcatctgctacatgggattcctttgaagccttttgtttgccctttttcttggccttgaggtcaggcaaacccaaccccaatccttgaaccccactacccaaaggaacagccttttgtgtgttatctctactttcattacttctataccataaattaacaaaaaataatcagaaattgacatcaattctcggtctttttcattgtttagaaagtaaattactaaccttgcaatggtggaagctggacttgacttggtactgaggttgagagtttggaaatcatcgagagcacctggtaatgatataattatttacataaaaatgaattgaaaattgaaaaggaagagaacccataagaaaaagtttggagctttttgacttactatcgaggagttcatctaaatcatcgtggttggtggttgccatggttatacgatacaactcagagggatggggattggatttaccgccttagctaagggaattatgagaattagctctgttctgttacgcggtgatatatatatagagagagagagatatatatgaacacttttttatggtcccgcttttcttttttcttatttattactgaaatttaaataaagagatttatcattaataaaaatatcttttttcccattaatatttagttgggtaatatagataaatcctaaagaatatatttttttttgcctttgagaaaaaaaacaaaatagtaagagagagaagtctcaccacatagcaaccatccatggcttctccatcttctctcagactggacatctccctttcctctctcaatcgctcattccatcgtcccaacgtattttcttcttctttttcttacgtttctccccgtctgaaaattcaattcactccttcccaatacaatacactaaaactccctacttgttcagattctttccgcactttctaccgattctctccttcgaacgaccacgatgaagaagatgccgagaattgcagcttcgacgaggcagtagagcttttcaacaaaagagaatattacaggtgccatgatttacttgaaactttatggaacagcgctgaagagccctctagaactctcatccatggtattcttcaatgcgccgtgggatttcatcatctgtttaatcaggtaatttcaacaactaataaccacaaactgtttttttactttactaccgtctctgatttatatatatataatttggttttaagaatcataaaggagcaatgatggagttgggagaaggacttagtaagctgagaaagatgaacttcaagaatggagcttttcatcagtttgaacaggaaatatctacagttcttgattttatataccagacccagattgaattagctgcttgtgagttatatgaattgtacttaaacatctttattaattgttatatgaagtattatgtaatttttgtgtgtttgtttgaagtacaggcagtgatgatatgtgtgttaggatggatcaatcggagaggtcgtaccaactgcttgggggatatggtgcaggacagcatctgtataaactgcaaagcgactcatcaaatgaacagactatgcatatagtgttttgtccaaacatgtcttatgttaatggccacccacagaaagtaaagcttcctactcttaatgctaccactcaattactccacgcttcttcttgacttcgaaattcacctctataatctttggtctgctgcaatgcaatatatgtacaagaatttatggtgcttagtagcacaatcaaatttagccctataaatttttatactatttattaaagtaaaataaataagatttaatactgatataacatttctcatatatatttatctgctaccatcataattattaatgattactatttttttatccattttgatggttactctaatattagtcattagatcatctaagtattaaaagatatcttattttggggtttttatctttttaattttttcgtataaaaaatatcttgaataaagatgcagtttttattatttaataatatttattcggtaatagtgataaaaaaaatagtaaatatcattttttcaatataaaattttggtgaaagtatgtaatttttttaaatcctcgttatgaattctggtaaaagtttatttggttttatttttaattataaacaatgtacgttataattatttaaaatattatataaaattttaaaaaatttaaaataatttaaaatataaaaaagtaatattcaaatatcttatttcacatgtgtataatataaaatagtgtaatatattgtttgaatcttattttcagggtattaaatttttttaaatttctcaaaattttataaattattttcaaaaactataacgtgaaaaaatttgaccaaaaaattatttaaatactaaaataaataagggtgtatctgtagattttttcaaagatgtattgtggaattttacaaaaaaatatatatgggataaagattcaatttttatatatattaattaatatttatttggtacaaaaaaattatatttctatatttctttctacgtaaaaataaaaaataaaaaaacgcacgacgattagcgagtaatacgaaagagagagaatacgcatgttggagagagtcacgttctagggtatcgtccttcgcttcagcccagccacctagacgatctgacgatgacatcgcctccccattcgcagacgacgacagtgtaagctcttccccgtttgtagacgacagcggtgcacgaactcccaatcgccagacaacggcagcgagtttcttccctctcgcaaacttcaatgacagcggtgtgaaggctcctgggatttcaaccattgttctatgttgttgattaaagaaagtaaaagattggttcaagttattttcgttctgcggttcggtttcgtgtcgttaatcaaaacagtaaaagattggttcaacctgtttccgtgagttacagtcaacgattggttggttttagttttctgtttccatgagttattagttggctttagttcttttgttgaacaattggctttagtttattgtttccgtgagttacagtcaacaattggttgctttacagtgaacgattggttgtcgttattttgttttaaattactctttttttaattattttttatttttttatttttttactgttatgaggttaattcctattagcatttttatggggtcaaaatttttagtttcatgtgtagaaattaattacgtttttttattagtcttgtcttttgacatgnnnnnnnnnnnnntctcattggttttggtttattggtttttgacgtttgttattggttcttggttctggattcgttcgggtgtccatgacgtcgagtagttattagcgaatggaggcagcggagaaaatggcatggatttttatgccgaaatagcaggtgtaacctaaaatagatgaatttgttagcataa

SEQ ID NO: 18249 - DNA, 8091 bp, Cannabis sativa
  modified_base (7234)..(7237): a, c, t, g, unknown or other
aaaattttgattctcaatttaaaatttaaaaagtaaaaacagaaaactgattaaaaaagtattaccaaacgccaccatagcttagtagagatcctcttttctttcttcttttttattttttatttttcttttaatggtctttttttcatgttaactattaaaagatgtattctatgcagctttgcttgaatttttatataatcagaacaacttgatagttgagttatcttttatgatttgtacaatgtcttatattaagttacaatcaaacaaaatgattttgcattttctacttgaagtcttgaataaactttgttttcaactttaagatgttcatctaattggggaaaaacttaaaaatataaaattgtcataaccaatcaccaatgaaaagtagcatagaagattgccatcaaaactataataaagtaacctatactacaccatcaaaagctgaaagatatttcaaagttgaagaaaagaaaaccatataccatttgaagaaaaaaagacaaaagacaaccaatcatgcattacctttaaaatataaggcaaaagacataccatttatgagctaaccagtttaacaatgaactaaatactcagtcgagaaaatttatagcccgaaattaaaaaaattaaagagggaaaaaaaattgatacaaaaactaatgaaatataaaacaaaaaaaacatctggatcccacaagggctagtcttcaagcaagttttatggcacatgatcagccaaatcccggcaacaaaatctatggcaattacggttgtttttctttcctcgaaaaagcacactgcggtgacaccttcctcgtggggatggggaaaaaagaaaatttacaactccataaaaattatctgttgttcttggcagctctctccaccttatcacataccgtaatacaactagctctcttcagaagggggcggcggtgaatggaaggaaaataaggcattgaataaagtgaaacaaaacgacgagaagttctcacgatgttacagcaagaaaagaaagaacaaaagtactcagttgcaaaaatattttatgaccttttctagagcagactccggcaggcctccacatcagatgcttgtgcttccaataagccttgaccggaaggactagcattaacaatcctcattgtgttgtcgaatatagagattcggaaacgatcgtcttcaactttcttaagaacctccaccagcactttgaagtttaaacttccacttaacattaactttcctatgatagcaccgaaattaggtggtgctattggtaaatcaataccaacatcgtccaggagtgatgcatagagcaaacatccagttcctatgtctcttgttgtgatgatcttttcagaagataagtggtctaggagcctcacagtttggtcgacacacggcggacttttttctagagcaagagatatggcctctttcacaacctcggagtggtaacctggagacttgagttcctccacacattgttttgcctcatctaatatcaggatactgaaatattcttccaaaagagaaactgtctttttattaagttctgcaggacttaaccctagaactggagcctgtggtttctctacaactggaggcaaagatgcaggaggaggagcacgtttagcaacttcagcgacagtttctgcagcaaaagatggccgagatggaggggcaccactgccttgtaacagggcactagtcttgccacttatgattccaccactaccctgtggtaacagccttgtattcatcgaagttgatttcccaactaacggagccggccctcgtccagcagcatggaccccagaagcgtccccccttggcatggaacgttgttgcctaagcactacttcccagttgtcattatccattccaatcacaggcatcccaggcattttcctattggcacctggcatcccaggcatcataccccctgcaccaggccttccaccaatagggaagcctccgggacttgtgctcccttgattactagaaacaagaccacggttatttctgatgcttgctgtggcacctggtcgtaacccaagattcttttcggcctccgtatgaatttcagtaatggttttggcttttacctaaaagagcataaaaatatataagaattacaagaccagataatatatcattacttgattgcaccagcatctataccaaaaaagaaataaaaatctacctcttcacgccttggtacccagttgctagagcgcaaatcaagaacgtcacgaaccatgaacctcaaccttggagccaactgaggatttgttgtaagttccttcagtctgccaaagtacatatcatttattcgccttgattttgggctctcatcaagctgcttaccaattgtgataaagaactgacaaattgcctcaacattttcctcggcagggcaagctttaacatcagttcctaaaagttcctgtcataagaaagagttataataattaaaatcaaacagttgactttgaaactaactctgaatgactagtgtgactgggtgaggaataaagtacctgaacaatgtgatggacaatcttttcaggcaccatcttctgcttcagaagctctccaatcaaccgaatgtttccaagtgtacgaagcttgaccattctatctttgtccctgcgctccaattcttgttcaggagcagtcatttgtcttatttcttcccttattttatcagcaccttcaaaagcctcctggcagttatttaggagcacacgcttgaacgtgatttctttgccaccaggttcatcagatgggaacatagggagattctcactaagatcaaaacacaggcgagcatacatggggcaaaatgtgggctcaagcacagccttgtcaaatatcagagatataacatcctgcagttccaaataagaaaaatcttagcaagaatattccaaaaataaaaagttgacagtcatgcaaggattgaagatggatagattacctttaatatgtcagctgatgtaattccagaatcaattagttgacctttaaggacatcaaatttctctggcgtcagcttattcagaattctgttcagaagagatgaaaacaaacaaacaaaaagttccacgttcagcatacagaatatagataccaacataaatataaatatatatagtcagcgtgaaacataagaagttaaacccttaacgcagcctggtaacatattgtatgaaccatgagaaaaataaaaactaactgcaaccatcaaatattttcagtacttatcaagtgcatattattctctcacagaaagaagaagtagaagcaacagtgataaacttcataatagcttttttaatattttcagcaataattcatatgttatatcagcacatttgcaggttcaccatttactctatcaagatgtgaccgtagcttatgtaagtaattattaagaagtaagcaataatccatcaaaaagcatacatacaaaagctaaaatcatactagtttaaggatatctaccctttaatagttttcagaacacgatccttatcagataaagttcctctcctagccgaccatggcacctcggccctgacaagagcaggggtaggtcctccctggaatagaaaaatcgaaacaataaatgagaaccaagtgacggcagttatgcataacaaacaaagaatttgaacataaaagcaagctaactgaaatgaacccaaaacagaaaattgcattctttcaaagccataaaacaaacttgtcaataactaatacactagttgtgtcgagcatcagaaatgtttagagaaaaaaatcaaaaggccaataagagaacatttaaaatatgcagcagataacaaaatacatactaaagtcaaaagcttttgcaaagcaattgcaagtatctagatgtacaaaaatacaaataatagcaaagatgccaactatttaatatttaccccttcattagacctagcgaactgggagttcgattgatcttgacgattgaactgattggcatcctgctgtctggaatcagatcggttaccgacctccctattctctttaagggcatcccaagacctctcgtccccagggggaggagctggtgccgtgcggccacgccaatcacgattgtctggctcagaatagcgaccctgagggggatttggtggctgaaaaaggccaaaataaaaggacacgcataagatttgcaatgaaaaccaaaaactaaaaaatagaataaagaaaagaaaaaactcacagtagtttctgcacgtccccagcttggttcttcaccaagaaattcagcttctatttcccttctaagtttcaaaatttcctctggaacttcaccaacctttaaaaaagtagaatatcaaaagtctattaaaacggtaatgaaaactgtgcacctcatcacattagatacgataaaactaaggaaaaaacagtagcaactaaaactcttcccagccataaaagtatgatcacagtacatgtactaatttaattacatgcaaaaaacaattacctcgcgaagctgcaatagttggtcccgagtgtaccgcacacgttcacgaccctcaaacctcgcgtctccactctacaaaattacaaacaaaaattacataaccatacaaatcagaaataatgtatgagaaacataaaagtaaaacggcttagtatccataggtagggcgctgattggcaaaaaagaaagaactactaccaaaataagctgcataattgacctattctcattgaatttttaaatacaaattgcataaccagctagactgtataaagttcacccattgaaaatgatcaaaatttaggaaatagaatgtttgaaggtcctttatgggcaataaacagctcaatgttgcccatctaaagcctacaagtagctctctgtccatatttacagcaggtacacatgcttcgtggcccaccaagaattaggacaatttctaacgaaaactggttacagcacactcaacacttcctaatctatgactaccaaaacagttatcagcatttatcccaaacaaacaatctatgaagaaaaaaccaacaaacaaacaatcaaataagagaaaggaaaagactttagattgatttatgaataacagattatcaaaaagagcatttatcccagaaaacagagagattaaacaaatcaaaaccctgttaaggattaagcaagtgtattgataccaaaaagatacatactttagcaaccctttaatatgcgagcaaaacaacactcaagatccatatgaaatttaaccacttagcgctacaaataacacaagcgcaatagggatccaacattgatgaaaactatccaatcctacaaataacacaaactaaaaaaaaaaaaaaaaattgtatctttgacagtatcgaactaaattattcactcttaagaaaaaaagttgcatcaatctgaaaatatcaagcaaaaaaacaaaaccagattagaataaaacccacgccacattaacacaaacagatacctaaaaaaaagcataaaaacaaaaacagcgaaaagggcatcaaataaaagtgacgaaacctgtagatccaaaaataaaaagcagagatttgattcggacctttatagaaaatgaaggcggcgagccaccatggggacgcaaaagagggagatcagatgaaagagaaccaaaggctaaagatgaggaagacgacgaagtagaagatgaggactcgaagcgagaaccaccaccaagtctaccacgaccgccaccaggtctcaagctcaacaccgtctgatcagcctgctgcatacctcaatcttcaactcccgagaataatctccgccgtccgatcaaaaaaataataataaaaaaaaaaagtaaaaacagattcagcggccgcgaagaggcttgaatcaagatgcgattggattggaagagagagagagatatagaagagaagatgagagagaaagaaagaagaggtagagagatagggtttgggggattgtaactttggtttatctctctctttctttctgatgagagagagagaaagaaaaaacgcagccgaagagagagaaggaaggaaagaagtacgagaggccggtggagagtctaaaaaaccctttctttggtgggagtgactcactactcacttttttacttttttattttttttataattatatgtattttggaaaatctatatatcatctctctataaaacttctatatataaaggagaaatcatctatgtataaaagaaatagaagtatgatacctaaaatgatttaaaaactatttatctattttttgattttttttaaattatttaaaatctatttatctattttttaattttttctattactttataaatatttaataagtaagtttcaaaaaaaattatctatttatatatttatatacaattaaaaattactcaacataatcttatttaattctcacaattaaaattaatgaaaaaatatttatatcttttttttttaaataaaaatatttatatcttaattatcaataaacttataactgcacgggtttgtttccttgttagaaaggaaataaacaaaataggaaatgaattttttttggctagacatacgttaattttttcaagccaaaaaaaattattttaattttttattgaattttcttactttttaaaagattttcttaggggtttgtaaatacgatattgtccgtatttgttaccattttaggtagatccactattatgttttgacaaatgtacccttatagttttattactcttttacgttattattttccaaaatattttaaaatattcaaatgaaattaattaaattttagatttcaaaaaaaaaaatcataaaaatttgattcaatataatgttttttttgttaaaacaatttattataattttaaattagaatacaccagttactttcactatttaggatttttgtttgatttatgtattattgtatcccaaaatgatcttgtattttccaaaagttattaattggaacttctattttgctaaatgacaaatagactttatattttttaaaatagtaaaaataaaagtctgaactcaatttttaactattttattttttaatataaccaactttaagataatttctaacacgagcacatacaggaaatgtaactaattttattataacatctttaaatcagattattattaagtttnnnnttgacaaaaaatcagtttagagtcctattcgtaaaattttaaaaaatacagggtttattttgtcatttaacaaaacctagggtccaattagtaacttttgcaaaatacagagtccaaaatagtatttacccgcttttttaaaataatcaccaaaatctaacttttttaaaatttattatactttattcatttcaaataaaatagcggtcaaagccttatatattttaatttttatacacttaacaacttatctttttttttttgtgtggaaatatccctttaagtctatttttccttataaatttgagacatcaattaaatatcaccgctaaataccaactagatgaccactatgtacacctgtgtatacctgaaagtaaactttgaaggcaatgcaataataattcaattgatatttaatggtgagatgcagctggcaccttaaatttacaaagaaaaataaacatagaggaatctcgccaccaaaaaaaaaaagataaaaggatttagtgtataaaatcaaaaatataagcaagtttcaacacaaataatcctttcaaatatataatattaatatatacacatatcctcatataaaaataattattaaaagccaaaataattaataaaatatatttagagcaatgaaaagtatcctataaatgtagagcatgaatagtgatttttttttaaaaaaaaaaaaataaaatgaagaaggagtttagagcatctattgtagcgtatttttagaacgattctaattaaattttttaaagttattgtggtaatttgcacacgcaagtgtacttatcgtaacaagtaatagactcactacgagtgaggtcgatcccaca

SEQ ID NO: 18250 - DNA, 5311 bp, Cannabis sativa
tttttgttattttactagtgtgatctccataaactttgggatctagcttgcttcttggaggaaactcctgcaattaattcaaaaacacgatgaatgttacagataaggacttgggatcgtatccacattgattttgttttcaagattgaagagcttgagcgttaatttctttactcctctccaattgcaaagtaaaaagcataaagattaaattattacttggagacgatgaatcatgacaggatttattccagccagcatttcccttgcaaattcttcatcagtatcccatgcagtcttgttctctactccacatcaatgaaattaccaattaactaacacaaagagtatgtaatggtatgtaactgagaatagaaagcacaataaaatataccaaacgtttctgaactaagacataacaaaataagactttataacatttgtaaggggctactatgtacctttgatcacttgaggaaccggaaatttgagaaacctttcgccatcagttctgaaaatctccttgagcatctctgcgggaatattatctctaacactcttaagtaaaccctcgggcacatcaactcctccttcatagagtttaaaaacatcatcaatgctgtcgaactcgtttggagtactattgaagaggtctttaatctcaggtttcaggaactgcccaatggatttcagtgcataagcaagaaaatccgccaacttcaaatgaccaaatctctcatcccttggagcataaatgtttaagctcaaagcaagattcagacgggtctcagtattgcgatctaattattattatagcataaaaacaaaaattaacacctacccagaaaatattttctcaaaaatcaattaattcgaaaaataaaaacctgtatctgttcgttttcgcccagttcttcctctgcgaggataaggatactgaggagagcctccaagaacaggacgagcatatttagcgcctttatcaggattccccaaatcattatagtaatcataatcataaatcctatcccattcctgacgctcacccgttccattgcccctcaaattcgccaattcttcttctctatacttccgtagcgataagggagtttcactgggaagataagtctgcaaattcacccagtgcccatttcagttagccctaatttcgcaaacaatgactcgaattccatttccatacaacgaaaaagagattaaagatttcaaaaaggtggaaaataccttattagcgaagaaaattcgaggggaatggtacttatcagacgggtaaacccaagagttgcagacgaagtggattctgccatggccaggaacattgtcgagagtgagagtcttgaggtaaaactcgctgtgatggtaattttggatgatgaaagctccgggtaccccgatcttctcatcccaatcgaaattaacgtcgaaagcggagtctcctgccgttaagggactgattgttgtaatccagtcttctaaatatgcttcttttccaagtttccctcgcattccatttcctatcaaagcaaaattcaatttcagcaaaaatcaacggctattttgtgtatttttgttttaatttttttttctttaaaaaaaggaaaagaaataatatatattttttctttgtaagagaaataataatcaatttattttgtttgggctcaccgatttattattattattttgcaaagataccgatttttgattattgatatggttgtaaaaataaaatagtcgatattaaattacatatttacatgtaacatgactgatgctgagtatattttattacttaaaagaaaaaatgacactggtaagttttaaagatggcaaaatttatttgttaaaaaaagagcaaaatattgttcggtaaccattaaaaaattaattttttgattaattaatcaaaaattatgaaaaaattacaagattttgttaaataaaattaaaaaaaaataaaaaaaaaacaaaatagttcccaaacaactttataaatataaaaagctaccaaaaactaaacatgaaatcattaggaaaaaacaagagtgaacttgaattttagataaataatgagagcataaccacataatttcatggtttttgtaagactcatttaacttttattttattttttatttaaatggatttaacatttatttttggtattacattattattattgttttaagaggatttttgtcttttatatcatttcaattttttttaatattcaaagcaaacaacccataaatgattctatttatattacagttgatacttcattgtcacataatacaagaagtttagccaattaagatccaaaataaataaatcataaagaaagaaaatgataaatttaacttcttttcgtgtcattttaaatttgttacgagtcacatctaatgtttcttataataagtaaaagtaatccacatgcaatcatcatcatcaccatcaccatcatcatctatttagaaatggtgatgattgatgagtatacctaaccaaacaatatcatagttattactttatcaaagaaaaaaaagaaaaaaactaatagtaatagtaattagtatcaacaaacccatatataataacataaaaaaaagtaaaagtaattacttattacaaaactttagtaaacaaaaatgtcggtgtttcaaccattggttttaaggtgattaaaataccgaaaaaatgaatgaataaagtctgtcgggtctaataattatattaattataaattcagaaataaaaaaagatttacctcaaaaaaaaaaaaaaataaataaataaaaaaagaaaactgaccaggatcaccgtttacagcactgactagttgtagagaaaccctttgaccaaagagctcatgaacccgatcaagaaacgacgcgttaaagtcattaaaatcaagaacgttcttcttcatcaaaacgacattcccttttatcttaccactccctttcgtcgttgtcgttttcccattcccatcttccttttcgatactaattctgttatgagagtgggaccctgtgttacacctcacagacattttctcaccactactactaatactactctcctccctccgatcacaatggccaccaccaaccaacggctgagatcgagtcaggtcgatcaaacacgaactcttcagcactcgatcgtgattttcagaataaaaaccaagtgagtagtggctgcttttgaatactagtgaagtgagagagttcaccccagctccgaatgtaaggagtggagaaggagtgttgaggttcctgtagtgaagcatcttcttagttaccccttctagagcttggtcgaatcttttggatgttgattttgatcgagatcgaatatctacggagatagcactagagagaacagagttatagtgtggtataaatagaatgattgattatctttcttttctttactctttttatagtggtgtcttcataaagaggatttggtgttaattatatttatatagcaaaaaggtagtgatatttgagtattgactaagaagctaatttaatgtgttcagatgggaatttgttcctttatactcaaatttattattttgtattattagaaagaaaaagaaaataaaatacttgggagattaattaaggtatcacccacacccacttcttttttttatatagttatatgtctttgtcctcttacgaagttgacttaggaccccaagtcctctataaaattgaacccttttttttccttctaatttttgggttcattgttttaccatatgaaaggaattaaaatgtgtcatctatataaaatgaaacccctttcttttttatttcttctcatttttgggttcattgttttacaatatgaaaagaattaaaatgttacctttttttttaaccttttaaagtgtgaaaaaaatagatgcttaaatgggcatttgttataaaggaatgtggattgggatgggggtggtgaagaattgtattccaaatgggttttaaaaactacttttgattagaagttgaaggaataaagataacttaagaaggagcaaaggcaaatatgcttcaactaaggatattagattttaatctagaatggtaatctttttatttctatttttttctgtcaagtgtatttaattttaatattttttgaggggaatgtgtattatttactcaaatcccatgaaagttccaagaggaaagtcctttctttttatactttttaataagatttaattacttataggcactccaaatttgttatatctaaagattatagtgggtccgtacaaaatggatcacatgcatacttgtttgtgtataggaggtgcatacaaatattgatatagatagtgagagagagctgacagtcaatactaatttttagtaaatatggtgacattagtatgtaggtatgaacacattaatacacataattattttttattatttttttttgaaaagaaatacacataattattaatgcatatataatatatatataatgccagttgtagttcttgtgcttgccgtttgaacttatccttagatcaatgcctagcatttcttgacttccatcttaataatttattcatataaataaataaaaacatttctatcaactgtgatgtatgcaaatgcaattaagccacctttaaaaaaaatacaacttttcttgttagattataaaagtgtcagcaaattctatggtcagtcatagtccacaagggaaaatacaattagataatgaatagcaataatgaaaacaaaattcttttgttaaacatatatatggtataattcatttaaataaaaagattttcaaaagttgttctcgttatgaaaagttagatgtcttctagaatggtgtttccagaaatctaacttgatcatccagaagaagtcttgtggtatgatagatgtcatccgaaagggcatccccgaatgtctatcgtgtccacttggatggagtctttaggaaagctagtcttcctctgaaaaagatcagttttgaatggctagttgttcctcctggaagggagtttcagataatcaacttcagttgttgcctttcctattcgggaagtcctttcatcgtacgctttgatctttcttccaggaagcgtatgtctcattcgaaagcactttatcttatgctgatgtggagaaactattacgaggagtttgttaagtcataactaacttaacaactcaactcttgcagtcaccgactttaggatctatatcatagacctgcaaatactactaacacttatcattttggtatgaac

SEQ ID NO: 18251 - DNA, 3022 bp, Cannabis sativa
  modified_base (2589)..(2596): a, c, t, g, unknown or other
ataattaatcataaacaactgctaatttccaaattaactaagcgggctttacaaggacggtcccatgctgaggtaagccaaacacgacttcatactgagataggccaaggacaacttcttgctaaggtaggcgaagcacgacttcaaatcaagaaaagtcgcaaacagatcaataccaagataaattaagaacagtgccatatcgagatatatataaaacaaagtaaaccaaaaaaaagtaataaaaatattggacagaacaaattgcactataaactcaacacaaaatgaaactaagttaactaagataaaataaagcttagagagaaattacaggatttaaaagagagaaaatattgaccttaaaataattgaaagcagctagcaaggacgagtgtcaatcgcaagtactaaaaggtaattgaggacgtgtgtcgcctacatacattgaaagatggacaccacaaccatgtatacaaagtacgtaccatactaaaaaagaaaaatctcatgtagaagaggcatgtattataaaatagaagaaaaaaaacccactaaaaaatacttttaactaaaaacttgatcaaaaaggctaccttatttttggtcaaaacaataattattataattcatatcataacatatacatatgggacatatacatcattaattttctataattaattgctaaagtgttgtatatgtctcttattttaattctgtaaatattatacttatacttagtcatgattcgaattaattatcataaattctttatctaattatgccgttaatacttaatacaactatttttttatagcaactatatatatagtcttatacttccatcattatatgaattgtggtataaattcactcaacaaagctttaatagaaaaaaaaaaaaagtttataaaatggaaagtggttctgcctttttgaatttgggaacctttgctttatgaattataaattcccatcgtaagtggtggaggtgtggttttaatataaaggttctattaatattgattatgatctcattttagtgatttttatatgcttacaaaatttgaccttttttaatttatttaatgcaaaagattattttaacataaacgattatataatggttgcaagtgcctaaattcttattagctctttaattagtattttttttttcaaagttcttatctagtaattacttttttacaatcgtcacgtttagatattattgttccttatcgattatagatatgcttaaaagcactaattaatagtttacccttataacttactaattatgtctcattaagtgatgattatatatatataatcgcatgcttacaatttgatatatattatgagaaattaagcataatagcatacattcacgttactatatattaataataattattataataataaagggaaaaataattaataatggtctaatcaatgacgataatagtaaaataaaagttgttggcacatgagaaattttagaattatgcttagtgtgacttactatttttttttaaatcattattttcacaaaataattaaaatatgttaatctttattattatttcaaaaatacctctcttattcatttttcctcattcctctctctaactaaaatttttctctctttctctctacacgatatttgtactccctctccatctctccgattctatttcaaagccaccgactacctaaacccagccaccacaagcatcgaagatcaatcgcctgcgactgcgaagccatagtcattgaagatcaatggcctgctactaaaaatttatttttctagatgtttagactctacttcccagggttctagatccacagctaacagatttgtttttatagaaaaaaaaaagtactcacttaagtttgacaattctaaaagaaaaaggaattgatccattctttcttgtttttttaagaataaaagatcacattcgacttaaatattttaccttgcaaaacatgtttaattataaatattttataaattttaaagtatttcaaactaaacatgtctctcaaaaatgaaaatgggttgtcaaaaaataaatgtttcgtcggttcttcttactttaaaactattgcttttcaaatttgatatttttatagttgttgttctaggtatatgaaaggtgataaagattttcttgtcaatattattcaaatgcaatatggaaaagttattttttggtaacggtctagctaaaacagtcagagcgatggaaactgtaatgaccgcattagtaatttggattagaaaaggcaattagcactaatttttgatattttttataattatttatgaatttaattaattgtgggtactagaaatgagcattagagttataatttctcaatttcggagattttattaaactttaggtatattatttgaattatatgtaaattatgcaatttttacaatttttgctcggcgacaacaacatatgcgatggatggctagtttgatcacatgggtaaatctagaatcttatttcttagtgtgatgtatattgaaaaaaataaaataccgaggttgagcggggttatggnnnnnnnncattttacccctagtcttgaaaatgcttaagttatgagaatgagggcattttagtaatttgggtgttggggagtgtggtggctgccctagattttgacacctagcaaatgaatattcagcctaagattaatgtgattaatctaacttttaattagacaaaaaaaaaacaaagaaaattaagaaattaagaaaaatcaagagaacccttttctctctctctcttcttgtttctgcaccacaaaatcagggggaattcagcagcttttcatcttgttttctgggaattcaaccattaaatcaagagtaattggagtaggtaagctctaaaacttctaaccttgagtttttaaaagctttatattggttttaacttgtgactttagaaattgggagctgctagggtttaggggttgtgtagtctgattt

SEQ ID NO: 18252 - DNA, 4357 bp, Cannabis sativa
  modified_base (2432)..(2445): a, c, t, g, unknown or other
tgttgaactaaattagttggattatcatcccactcattacctggttaactcataatataaatataaaccctaattattaattattaagcttattgggatattacaaaagtggtctttcctgtgtgccatgataaagaaactaggagttcatgagaggtggatttaggtaatttctaaatgcatctcttcctgtacctattcttttattgtgaatagggaggtgtggtgacgtgattcctacccgaggccttagataaggggaatccaagtgccttttcctctttcttatttgtgttgagaggttgtcttctatggttcataaagctagtattgagaaaacccgagaaaacacgagaaaagcttaatataaaggtcacccatatttttattcttaattttagtttcaagcaaactaactaagccaaccctttttgagcaaatcaattacttgatttctctatgtttgagttgactattaatcccccgaacattccaaacgagtattctatccattaaatgagtattaatcctccttctctcattgatccacttctaaaattgagaattggtttgatatagctgcatcctgattccctgcaattgcagagtttttgttgatgctcttttgaagttttttctttttccccacaagctagaaaccttcctcatcaatggttgatccccttgtttttacttccattcttgcgttaggaacccatacttgcttcgtttgggctttgtttctacataaactcgtttcatgtcccataccagaacaattcttgcatacaataggcatctattcatacttcacatctagctcaatgtcatgatcaaattcatctgtaaatgatatcttcataggaaactcttgtgctaaactgacttcaattagaattctcgagcaaagtaatctctctcggtgtttagtgatatcatcaatctaaattggtttcccaatctgccaaaaattttgaagagtgaaaattccccccaatacattatgtcaagacctctaatctgtacccatgcgggaactgaatcaatattttctttggtgaaatcgtccacagtgttccaaggcctcataattatcaaagaagataaaacctccatctaaaaccttgtccccctgttccaggttcctgaatcttatgataacaactccatgtgagagcatacccactttgactacctcctccttccacattctccttccgaaatcatccaatatgttcagtggtggattaactccagccacatatcccacaatcaaaggtttccaatagctcacttcttctgctatatcagctaattcaatctgcattttctccttatcctgtttcactgattcatttgctttaaaaggtacaaaggaggtcttaagattccatactagatgttaagatcgtaacactagcggcctcaacatcttctcccccaattctacatctcgtgccgttttgttcgcaatgtccagctagtcgagaagtcatctttaaaaaaatatttgaagcatatttcgagtagtttaaaaaaatactttttaggagataatttttatatccatatttcgagtagtaatatggtgttgacacgtataatatatctagaatatgaaccagcctgagttacgcaataataaatgcattcagacaacttgcctcgaaaagtacagttggaaaaaatatttgaactcaccctcctaaagataatggcaagagacaaataataactaccgattgatgagaccaacgagccgaatagaggaagtccatctcgggatatatagaatgcactacaaaattttgtagaaagggtaggtaatgagttatgcaatgagctcacagctcattgacccacatacacatgagtatattgaaagactaaacataacaccttcagtgtgattcacctcacaattatcatgctacgataagcgtctcacgtatgcctcactcaatattaatagaagagcgcgaggaatactatgacatatacttagacgatgacttacaataaagtatctagaacagtattattgcattgtgagaatgatgaaacatagttagcataactacctgtagataatgttaaaagtgcggttatggaaagttatttataattatctaatgtgcgtaaatatgaaacgtggagattattcacgtttcacgaacggttactagtgatatgatcacaagagaataactgtcatcctagactcctataaatagggacagaactcagggaataaaggatgactaatttgggaaagaaagagaattacatctgtcattcattctgtaaaacaaattattgtattatgtatacaatttatcaaccccaaaataagatggactcgtggacaatgaagaattgacttcaaaactacgttaaaaatcctcttgccatttattattattattattatnnnnnnnnnnnnnnttattattattattaattactgtctatttagttcctgagtatattaattacaaaatacttatttagtagttaacaaaaatttgtattagcaatatccaaatttgagataatctcatatctacaacaataacaacaacaataatctcagtaatctcaactaaaaaaataataatctcaataatctaaataaagatccaaaaattaaaataaataataaaaaaaatataacattcatatatctttcacctaaaatagagacgaagagggtggcagtggttgacggaggcagtggtggattggtggtgggtcgctagtggtggacggaggaggacgaagggttgttgttggtggtggtggctcggctaccgtttctcggtcgaggtttgttgacaactgaggagggaggaagacggaggtgggtggctctgttgggtctcgttggcggttttggtggtggttggaggtggtccgagagtgagagagatgagggagtttgagaattttagagagagagagagagtgaaatgaaatctaaaaatatttggagttttatatatatatatatatcacgagtgttcctgatggtttaaaactgttagttatactattaatcgacggttttaatccatcgacaatagtattcccggcggttttaaaccgtcagagatacctagttaaaaaatttcactcaattttttcaaaaatcatgctcaatagtatattatttttgacggttttaaatagtcacgtaattttattagtgacggttttcgaaaaaaaaaaaaagaaccaatttaaggaccaatggaaataaactcttttgtagtagtgcatattaaatattatttttttgtaaggttggtattaaatatatattttttgccataggaagaaataattcttagtaaacctactccttatacatacatataaatataatctaacttatactataagtgaatccagtaaagttagtaagacttaatagtattctcaccttcttaaaaacaaacagatactcttcaatctagtcatctaccacaatattagatttaaataaattaggttggaagtttgtttgttgatacttgactttttcaaaagtgtctgtgtttcattattatactttaataaatgtttgaattcaataaaaatatgcttcatatatcagaacattgatgataaactacacctacattattaaccgaaaaaaaaattaagatgggtcagtctccccatgcatttcaactggcccattttaatttcacgggctcccttctacatggcccactagtatctggcccatctgtaaatacaattttttttttcttacagttttatttcaaaaatgtatttttttcaaatataagtagtggtactagatggtgcttctttcatgaatgaaccagatagctctactcaaatgctcatctccaaaaaaaaactaaaaaatatttgagaaatacaacatttactatgattgttttatccaaactctaaatgcatggggtggatgatgagtaagtattgaaatgaaacccgagtaattattaattatttattatcatatatatataataatagtttctttagagattagaatttcacccgtggggatagttatcaacgggtactcactttggatggggtggagattatccgctttaatgggtaatagtgtgggggtagagaaaaattttatatacctaaagcgaatttagaatatcgtcaggggtaatactactcactctatatatgaccccgatatagatttcatataattttataaatatttattggtataatcatactttctatatatctttcttcattatcggcttgagctatctccgatagagtaataggaggtttagttttaccgtgcactgcactcaattcttcccccctaccc

SEQ ID NO: 18253 - DNA, 4109 bp, Cannabis sativa
  modified_base (2702)..(2707): a, c, t, g, unknown or other
acaaacctcgccttgtgtaattttctttgaaaatctcagtaatatatcaccctatgttacgaaagtcttgtaggattctcatgttgtatgcctgtgtatgttgagattatatcttttaccttcgctgatggattatataccgatttcagctttggaagagtggcgtaaacggaagatggaacgagcaaggcttcgtcaactagagaaaaatggaacattatcctcctaagctttacagaagaatatcttactactaatcatcatgttgattctccaaattgtatgaaacttttttttttctttttctttttctttttgaagggttcttttttccttctggtatacatgtaaataaacacatcattgacttgagaaacaagtccttgaaacaattgaaaatgctctacttttttatttcagttacagaatcttcaacttcaagatcaagactcaattttagataagctggtggctttgaatgtcctttcatttgtcaatagtttattaatataataattaagtattaggtcacatatattatcatatattataacataataattattacaaaaattagctaattatttgcaaggtgatgcctcgttgtagtgttaggtaccacttgtgagtagtaattctaatagttaatagtggccttaaaccttcatctcaatatctctaaaacagcaccataagtttctatgaaaaagatataagattgccaaggatgaaacattctagctgtcaagagtatatatatcaagaaatgtatccttcttaacaaaataaattaaacccaaataagtagattgtgtaaatatacataaatttgttcatttcaaggagattggatataccataaacaaccagtgttaagcaaaagtcttggcctattttagtttttcagggcatagggaggacatgcctctcaattactcataatttatagtataattcacaaaaagaggaaaatgcaagtcatcaaaatgagatccttgcttttaacatttcgatgtacatgtaatgaacatcggttactatacaagttttatccgaatttggatttaatatatatacaggctaaaaaaaatactagagtttcatacacagttgagcattcatgacaggcagctagtgcttctcctcatttccttgatgttctggtctggaacatctaaatattgtgcagtagaggcacaactaaggtagaccgacaaaggcgcaaaaaagtagcttcggattgaactgttcaaagttggaagcatctaacttgcaaaaaaaaacgtttgaggacccaaaaaccagaaagccgtgtcaaaaaacttggtacaacatatagtatgagtcccatctgcatgaggtaacaaaaactaatgagtaagaagttcataatattcaaatcaaatgcccctatcaacttttagggttcctacaatttagtgtatacaaacaaatacagaatagtatccaggagattattccttcaatatgtttgaacattcaagttgctttcactttagctatacaaaataaataaaactaaaaacatcatggaaaaggcacacattgtcgtgtatgcaaatgcaaacaaaggttcagttacaacatttttctttgttcctatgtactactacttttcagttttccagaacctcaaaacttataggaaaactaattgaggttaattaagaccacaaagaggttccctataaaaaagtataactagcatcaagttgataggattatgccacataggcaaggcacaaggaatttatcagtgtctatattgagagccgctgctctttaggagagagccaagaattcgagtcttgccacccataataacatactcatatgacttgtgctatgtggcatattacccaaaccagggtcctatcacaaaataattaaagaaagcggaagcctatgttaggtaacgggtcctctttaagatagaacaaatctcctaaaatacactcttcgagtgagtgccaaactccaaatgaaccaaagttctattttctcattctatattcaataatagctacacaattacatatttatagactttctcaccacttacaatttactaaaaagctcctataacattttcatagtcaaacagcctactcaagcaacaacattggtgtttacttgtactcgctcgcttgctcaagcatatatgtgcagtaaagagaaaccaagatgcagaaaagcacaatagacatgtttgtcttaatgaataactgttatacataagcattaaaactgattacaagttaacaaaccttatcagtatagacttagtaattaaataagcaaaactgatgcttatttttcatgcattttcataatagatagatgggtttgattttgatcagtctcccatttaacatttgaaactactaattttagccctttgctccaagttttttaaaatggactgcaaaattcacaagctttccttgcgctgctgcccattgagcaaattctgtattggtttctttctacagaaacttacaactagaatgctgcccataaagccattttacatggcgtttggttggaaggataaatgtataagaataggaatgaaatcaaatttaaaatgtatataaaaaattgataaaaaaaattattaaattttttctcatcttgtattgctatagcctttcctttcattttaaaatagaatagtcatnnnnnnaaaatggtagaaaagtcattccattggaatcacattccaatactttaaaatgcaaccacccaaaggaatggaataaaattagtttcctttgtattccattctatttcattatttacctccaaccaaacgccaccttggtctaaagttgatcaataatcagcttctgcttaaatctaatcaacgtaaaagaacacagagcaaaacctgagttacaaggcgctaaaagctagaattttcaaatgaggttcacatacaacattctaagcccgtaattgttctattctatatgaaacagatgcaggaaattgttcaagagaatgaaagagagataaagcatcaagccactgccatgccactagtagttataggaatcagagatgatgctagtataccttcatcatttaaaaaccactagtacaatacaactacagtaccatacaaaatttaattaattaacattgttgatttataataagtttcttttcaatgttgtccatcccaactttacagaagcaagatgttgaatcagacatgcaactcctttactcgaatagaagagaaaagcacgatcaattgataaacttgcaaacagtctacaattttattaaaactagagcatgattatcacttattttacaagaaactcccacttacggaagaaatgttaatattcaagtcaagtagagatctacagcaaagcacctctctcaatacattaaaagtgagtcagttagctgatgaggcaaaaaaacatttcactcagctcatacttgaaattacactcatagaaaacattacaaaaacatagaccactaatgattctggtagcactatgaatgagagccaaaaaaatgatctctattctagagttagaaagaacaaggccaacaacaatctgaatatagtatactttataaataatatgtaagccttaaagtactttagacatgtaagccttaaagtaggaaaaaaacggtaatgcaagttaaacattatatagttatatcaaatggaaaattataagatcccatcttataatttcatataaacagaagtgtagctagtataaaagttcaaaacaacaaaccaattacatggcataaatttgcaatgctagcaattgtataataattaataatgatatacatcaactcatatatctcacaaaaatttcaataggcctctctctaaagtgtacttgcttctgtgatgtcataaaagaatgttacacagaacaaagcttacatttaagttaagctacaacaaagaatacaaaagacaaaccatcagggaagtttcaacaatgagaaggtaaaaagtgcacacagatttgattgtaacaaagtaattcaactattgtgagatagaaagttgtgtttacctcgttagtcatgtctccata

SEQ ID NO: 18254 - DNA, 6016 bp, Cannabis sativa
gagagagagagagagagtttatatgaagaagaacagcttggttgcagtatacaagactgacctcaaagtcatattgatccttagatgcagcaatagctttgtcaagattttttttgcccacaaagcaccatgggcataccgtgtctgaactaatatcaatttcaataagttttttcccagcagtgtcactaatcactgcctcagccatagtcctttcccttgtgtatatataaactcttctgaatttttcatatcaagttagaccagaattggactaatacttggaatttcaagaatgaggataatcatatgtgtatactagaaacccatcacataataaaagtgccccatgtgagaaattgtatcaaacaaacagtactggtttttgctcaaccttcatgtaatcagaataagcaagaagaacataataatgtttgttaaatcccatttaacctaatgaattgattatctacttaagtctttacttttttttatttaaacccttgaattaagcagctcaagggcttaatctctcataaacatattaaaattcaaacaatatatacaaggttttagaaggtaattaaaaaaacaaagaagatgattcccattaacaagaaattaacttttatccagcaaaagggaagagagaaacacttacattatagagcgaaaagtgtagaaacagaaaatgttttgtggaaaagagagggaccaacaataataacgtgtaatgagattaagaagaatagacaagaaatagtgatcggtggacacgtttttcatttcatgttctcttcttttgcatactaacaaatccaaacccaaaatgtccatttccacccttacctaacaagttactaccctaaaaaaaattaaactttttttttttacaatttttaagaaaatttacataacaaccaacaacaatttaaatcacaattaaaatttacataataatccacgtaaaaattattagagaatctaccgaaataattcaaaccgtaaatttaataaaaaattaaaatatcgtatataataattttctaaaattaaattacaaaaaaatttatttatttctaaaaaaaattagaaataaatttcatattgttttttttttaaaaaaaaaaataaaaagtcatcgtgtttttcttttgggaaaaagaaaaaaaccaataaaaaaagaaaattattatgggttaataatagaccaatactcgcgccattcttgtgtgtctgaacataaaagacggttcaaacgcttctattatccataacaaaacagaaagttgacttttggtaaatggatctgattgaaggcccatgttcttacaggcccaattgccaaactgtacggacaataacgacaaaatatttctattttctctcttcttctcgccttgactttcttttattttttgaagtcaaaatccctaattcgtttcgaccgttactaattgggattaaccgtcttttctctgtttggggtgctaaattaattgttttcttggcgatcatcctccaagctaacgaattatttgtaagtttgttgtttcttgccattatataatgtgtttggaaatatctatttcagtgtatataatgattattatttggtctaaggttgataggtgtgtaaatggatgttgatgacattttcggaacagttcgacctgtaagtcttccaaggaagagtgcaatttacgtttggggttacaatcattcaggacaaactggtaggaaggggaaggagtgtcaattaaggatccctaggcagcttccgccggagctttttggttgcccggccggggctaattcccgctggttggacattgcttgtggtcgggaacatacggccgcagtggcctcagatgggtcgcttttcacttggggtatggctctaatttagatgtaaacacctattttttttttcttttttaccatttaagattcaagtcatgcttgttatgtttggtttggttttactctatttttagaatgaattgagtttagtgatatggaattgtttagtgaattattatctatatatatgcgtactcatttgtgcaggagctaatgactttggtcaattgggagatggaaccgaggagggtagaaagtatccaaagaaagtgaagcaattagaaacagagtttgtgagatctgtatcttgtggagcacattgtactgctgccattgcagaacctcgtgagaatgatggaactatctcaaaaagtaggctttgggtttgggggcaaaatcaggtattgttttaattaagccccttagaataaatatttaccaagtgttagtttgtgacagttgcaatgatgaccaacaaattttctaatacttttgtttccagggatctgattttcctcgtttattctggggagcttttactccaaatacggtatgctgatgctattgatccttttccttttctattgttctatgtgtaaggactgttgagtactcatatttgatcatctctgagattaatatttgatcagaaaaagagaagatacgtttaggaggtttgatatttgctagtttagccttttggtgttattttagttgtagtagacggacagttctgccttttggttttttaattttgggtgctggagaaaaaaataattttcttttgtaagtcttatagtttgtcctttgacatttagaatgatgatggaatggtagctctcttttattcttttggcttcttcttttttttttttaattaaaaaagaaaatagacggttttagaaccactttttgctcaaaaatattcagcagaaaattttgtaatctcccataaattttgagtggcgtcaaaactacgatgcaatgtggtcacacaaaacttttttccggttttagagaaattaggttaattctattgtgctttctttatataataagatcacattgtacaactataaatttttttggagcaatgatgatactgcaaggcacatcggtccggtgcagttagatttatatgatctacttctcatttattctcatattaaggactattatgttctttcacaggtcatccgtcaagtttcttgtggagcagcccacgtggtggctttatcggaagatggcctcttgcaagcttggggtatttgctaattttgtttctttggttgtctttatttataatgacctgtcaaatagaattgtgctgtcagtttggttgagtaattatttggtttacttcttcgtgcttgttcaatttttatgtttgtattttttccatggttttctttgtttactttgtaatagatatactacactaacttggaaaagaataatgtagttgttaacgacttatctcttgccataataataagaatttaattaatgttctgaataaaccaggctacaatgaatatggtcaacttggcagaggggttacatgcgaaggtttgcaaggggctcgtgtaataagtgcttatgctaggttccttgatgaagcccctgaacttgtgaagattacccaagtgtcatgtggagagtaccacacagcagctatatctcaaaatggcgaggtgtaagtgatttgaaggactttgtagttggagactaagttcttcttagtttaggcatgacatgagaatgtggttaaccacatggcatatttcttggaagatttggaaaaatcttttatgggaatctcacatctaaataaagagaggatgtcgaggaaattggatgcatttcaatatgcaagtatttcttggctagtgtgctgtttgtgctgatgcattatagattatactattctatgagcttttttttggtactcttgctattagattgcaccttgctctatgactttccgcaagtaactgaatattaacataaggatttgatttgatttaagtttttttttttgttagtaattagctttctagtatatatatgtaacaccaattgatagccctgtttcttctgcaggtcacattgtttatttaataatttcctactctaaggaattcataatgttaatgtttttctttggacctgtaggtatacttggggtttgggacacatgggtcaactcgggcattgctcccttcagacaggggagaaagagttaataccaaggagagtggttgcacttgatgggatattgattaaagatgttgcatgtggtggtgttcatacatgtgctgtgactgaaaagggagctctttatgcatggggtggtggtcaagtggggcaattaggccttgggccccaatccggattcttttcatgctcagtgaatgacaccgagtcatatctgcgaaacattcctgctttggttgttcccaaaggtgtgcagcttgtggcgtgtggacactcgcacacgcttatctccactaaggatggaagaatacacggatggggctacaatagctatggtcaggcagccaatgagaaatctacctatgcttggtttccatcaccagttgattggtatggcaaaattatatcgttcattagctttatccttaacactgctttttcgttttctatgttcatggagctccctttgcaggtgtgttggcgaggtgcgaaaactggcagctggtggtggccattctgccgtgttaaccgacgcctgttccttaaaggagctctgcgaatttagactggcggatagtctgaatctaagaaacattttcgaggttgaggatgttgcatccagaactggatcggatgctttagcacgcctttgtgaaagattaaggtattgaattctgtaatgcgtcgtgaccgttaccgtaagcatttttacattcccttgctgatctgcagtttcttatatttgtctcagggttgacggtggatatggagatgatgatgagaagtgatcttcaatcattttgtcaagacagaactcatgtctccctccattactaataacgataataaagaattaaaaaaactgtaaattacattattaacttgaacctcttgtaactttacgagtcccaagcagactaacaataaataaaattcattcagtaggttgatggagaaatgtgcaaacattatttaatatcggtttgactgcatcacatagtaatgtctttgctgacctcatgtatgttgtctttgctgacctcatgtatatgtctctgcttttttgaaacctagtgttttgagacttagagcaaatagtaggaaagtccactaacctgtttgcttgaagattatatatgctttaaatgcattgtgagggtcttttcagtatcaaagtagactctataattttttaacatttaatgtgtaaccaattcatataaataaataaaatttcatgtatggataagttataaaaaaaaattcacaaatagagaatgaatacaattgtgaattttagtagtattcatcatctaacaaatgcccacactcgttaaaaataagcctaaaacttccctgaatacacagtcaaacatgattaaatttacaatcatcatctttgatacttaaccttttaataaaaaaagaacatatcatgtggtcaatcaattgttcggtttggtgtagttaaacatatcaagaaaaaagaaattatatcaattatcattttattattgaaaaagtttattaaacatatcttatcaattatcattatgtttcaatggaatttcatctggggaagcatccatggcggcattggagtggtgttgttggaggaaggctgctcatgagattgtctttcattattttcttctgtaagtactctttcctggaaagtctcactgcaccatttatatattcatgtacaatatatatccaatgcctgtattagttttagctcaagctaaccaaagttaataaaaatttaagtaaagaagttgtgttagtttggaggcttttcctgcctcaagggtgttttttttctcaataggaaatcattattgggcactagagattatacttcagtatacttttaaaatcttccaatcaagattatatctatatataaatgcttatggtattgagaaatagtacc

SEQ ID NO: 18255 - DNA, 7858 bp, Cannabis sativa
  modified_base (236)..(246): a, c, t, g, unknown or other
tttcacctggaggatgttccggtggatttgctacctactttggtagctgaatttgatggttaataagattaactcttcttccattcaaaaaaaaaaaaaaggatactctttccaccatttggaatgacattctaatggaatactctttccacccttttgatataatgactattccattttaaaaaaagaaggaaagatcattccaatataataaaagaaaaaatttaatgattttnnnnnnnnnnnttttatgcattttaaattttcttccattcctattcctattctcatccccatttctattcctatattttcattcctcccaatcaaatgccaccttagtatcttaaatttaaaatttttgataaaattttatcaattaaactgtctaaaattttgtaaattctaaagtcaaattcaattatatgattagatataattgataattgttggttaaattaattaataaaactatattgattaaattttattttagggtactaaacatatacagtttaaaaatataaaatatcaattaagtattattaaaaatataaggcaacaaatatgttttttataaaaatacaagctactaaatagtatattctttataaataaacgactaattaaatttttgtctgacttatgtctaattttattaattaataattttaatatctaataaattatgataattttaaaatatgttaaattatgcttcatgaatttttatttataaatttttttttaatgatgttaaaaatttaaaaatttgatttcacacatgtcaaaattggtaacaaaaaaaaaaaaaaaaattagatactgaccgtgatctcaattctcaatctttttttttggggttttttttttctatttgattcgtttgtcgactttgatggattattttattctgtttatataactcaaggttttgtgggttttcaattaagaataataacttcaaacataacaagaccaaggattgtttttgtttgtttgttggtttaatagaaacgttaggattaaattaaatagaaatgaccacgaatggttattacaaaattaaaattacaacccaaagtctgtttttgctgagattgagcataatgaactgatggtgcatggtggttaacttgttcctgcactgcaccaccacatagataggataaacatgaaccaagcaaaacagtttggatgatcgctgctatttgcaatggtgtgttggaatttaataagatgcatgagatttcatcctaaaatcatttgataatgagaagagtaatttatttatgttacatattctattatttttctacatattagtaatgtgctaatattgaaagagtctcttcagggaagtccgaaaagggaggccattagtaaagacgcaccatcacattatcttgtgtctctcacgagttttggcttatgttggtgagagggattcaaggactgttggctcattattaagggaaaggttaggtctttttttttttttttttttactttttcttttatttgaattggttttggaatgaggatttagtttttggattgattggttaagttaagtgtctgttttgttttaatttgggttaggtttgggaaacttgtataaactaattttactaaacttgtaacctagctgattattgatttgctgggatcttaatccaatttggataattatagttaatattgggaaaatattgtgtatgtgtatatgtgtagatacttttaggggtgtgcatagattcatttaatctaatgacaatcaaatcaattgatctaattataaccgactgctaaatattagatatctaatcgagatcggattagatgtaatttaatgttgaatgagtctccaaaaatttaatatatacaacattcaagcaaactaattagtatttttatgtagtttagatgagtaattagatttatattgttatacgtaaaatatatatgtaaatataaaagttaacattagaattttgcttttttttttcttcgatcgggtagatccaatctaatccaatacatattggatttaaagtattagatggatccgatccgttccaaaaatactaagtctaaaatatttgataaactcaaattaaaccaataaatataatatgtaaaatacattcaatagattgaatcaaattcaatctaacactcaatggatgttgaatcgattgaataactgaaattagttagatcgaatcgggtgataaaatctatcatccaatatataattagatcgaatttagatagatctaaaaatattgagaaatgctaaagaacacaagtggtgcctagcaccttcttatgtgtcaataataaaaatatttctcttgggaacagttccttcacactcttaacaattgttacccccatacaataacaattaaatttgtgtgttgtaaaaggtgcaagtagtgtatattataaaggacttaaatgcttgaaaatgtatactaaatgaagtcgtattgtttttttctccactaaaagacattaagttatagctttgattattataaacttactgtacttgaagtagaaaatagagtgaaatctttcctaacccgaaattgagtacactcaactcaacttgagttttggttatttgtatacaataaaaaatttatgaccaatcaaaaaccccattttcaagcactaggaatggatggatccaaactcaaattatcgaattttctttagaatggagtttaatttgcactcatgtagttagtttttggattcaggtgtaatactgctatcatcccggaagtgatgaaatactgctatcatcagctactggtaatgcattcttcactttacttgttcccctttcaactatgactctattttagattaattttgttcgaaaaacctttgcagggaaagctgcaacgaatgatttcgaagatgtaggccacagtgattcagctagagaaatgatgaagaagtactacataagggagattgatgcaacaactattccactaactaaaaccgacctacattccacagcacgaaactccacacaatcccaataaaacgcttcagtttgccatcaaaattttgcaattttagcattcgctgtccgacacttcaccaaccaagaataggttcagatcaaaactatagagaagggcagagtggttactatgcatttcgaagtacacttattttttgcagccattatgtgctcttctaatcaaattgagagtttgtttgagttgattagtttgtgtgttaactcataacttataatcacaactgtgtgctcagtttcattgtttatttttcttctttattatcaatatatatatgtgtgtgtatgtggtgtttgaaaacacatgatatatggttattcttagaagattcagaaagaaatagtaatgatataaatgtgttaatatgtagaatggtagatgaactatttcactagtcattttcaataggagccagaaaaataaataaagaataagatgccatctttatcaactaaattattggacggcaagacttatgtcaatgcccttttggagtgatttgatcattattgttgtaagatatgagatattaagcaggctttatctacacaagtctaaatcattaaatcatctatattcttattattattattattattattactatttcaactaaattattggatggcaagattcatgacttgaaaaagaagaaaagaaaaaaaaaaaaaagataggaagaactagaacttgttatgcattcatttctttacctacatacctaaaagaaagggaaaaaataaacaagaattttgggataaataagaccaagtaattaatggattttctttcatccccataacagcagcctctacatgcccaaaaggcaaatttttaatgtcccaaaaaagatcgttgtatacaagagaaagcagtggaataacaagacatccaaacagatgggattttgttgcatcaaatttttgcctcaacagagcccttgtttgataactctttaagttttcatggcaaaaaaatctgtgacagtcccagctgctaagctaaggcattaggatttttgtttggttctgtttttttgcttatcttatgacccaatctgaattgccccacatagaagaatgaagcaaaagcagagcagaacataagatagaataaagcatagaaattagccaacaaaaaaagataagcagttataatgagagagatgactctatcttgtcatggagggtcaccaccaagtcatgagcatcatctaggagcttccacacatcaagttgtccagacatgctattacactcccttaagatttcatccatgctgctgtacttctctattatcaatttcctcttctgcaacactgatgctgcaattgcaaagagtagcaggtcttctgttggcggggctcgttgccttatcctgctccatgctgattttcctattcctgctcttatggctgcctgatcggcccacattacctcccataggcataaagtctgctcgaatgtcaattctctcctaaacagcaccaccaccatcctataaacaaaaaagcaatcctcggcctgaagtttctccaagtgccggtacaggtgggagtctttgcttttgataattttagaaactgtattgagctgccttcgaattccaacctcgtcaagtctgaagttatgccgagccttcttcatgaaacccacgaaacaccagaaagcctcgtgatcctcggtcatcacagtaattatgggagaaagtagatcactcataccctggcagtaaccaatctctgggtcatagagtgcataagcttcaagaattgcaaccaaccgggcagcatgaaaaatcctgcacggctccaggtgatcataatccttcaaaccaacagcttcagcagaacgtcgtgcacttgcttcagatacagcagcttgagtcgtggaataaggaatccactccgaattagcacgaactgcatcaagacgaatgatccgttgccaagaggaaaaatcttccattgtggggagttttggtttgctttctgtagaaggagaatcatccttggaagtgacttcaggatcaatctcctcctctctactttccgatgccgtgaaagtctgagttacttcagtgtcttcagaagagtctgagtcagatgagtcagtgtttagtgcagaggaatcagcatttgtgatccgcctagaaccttcatctccatccagcaaggtgctggaagcttcccctgaatattccatatctgggctccttccctcactagagagcgattccctggcacttacagcatcctccgagctgggagaccccatttcatgaataaaacccccagtatcaccatcatagctgatttctccattctcatttaatttaaagttctcattgctgcgttttataagccgacggcattgtctgcggagtttatcatattccttcctacacgtattggtaaaagaatgtcatgaaagaatgacagcatcacacgaaaacaaaattaaacaaagcataacacaggtagaataaataaaacaaaatgcctaaataaacaggtataagtaccttttctcggttcttatcgcatccctttcttcctttgagctgtttaattcatatctgttcaaataaccaccatcaaaaagtcaaattatagaagcaggacttcaccattctcaatatacaacataaacacagatgcacctatcctatgtttaagtgcatccaccaaatgtaaatcacagagcataaaaatatcataacaaacactggactacaagttccaacatgcattcaacaatagtgaggataaacacatcccaaaccttcccgtcttatggttttgattgattaacaagtacaattgactaccaaaatagattaaaataaatatcaaaccatataggaaaaaaaaagtgcattactaaattatttaaagaaataggtgaagcttgcttacactccaagaaggaaaggccaaacctcagccctgatacttggatcaacaccctacaattaaaaaggtaaaagataaataaatctagtttgaggccacactgaacatggtcaaaagaataatttttttagagaagcagatatatatgctttgtagcagtaactcactccgcttcgaacttttttcaagaactttactccaccatcccgcagtttcccatctggtgtaaacaaagtcctccactgccgagttgaaagggcgtgttttcttttcctgcgggaccaagatgatttaagacgtcccctgaaagcaaaagagtaccacagttaactatagtaaagacagaagagaacattaatgtagaacatatgagtaaataagtaacagactatcgccaacaagttaataacgtacataaacaagatcaatatactaagatattgatagtttcaacaattgagcacataacaattaagaatgtggaaacaatggtcacgaaaaattgggatgtttcttttccttgactagctcatattgggaaggataatgaatcattgagggtacaatagggtggagaactgggttaacagcaacgataccacagccaaaaatactatcaccatatcaatgtgttcacactattcttgacctaaacaatttggagcaaacccattgctgctttgatgtaacacaaatacgcccaatgatcaccaattaaagttagttactacaacccagtacattccaatttaaggttgtaactcaaggaaaaagctaaagatggcttaatgaactgctgggtccatgtatttcttatcacactccaaatctagcccaatttcagttagcattataattctagcacatgtttagaaaaaaaagaatacagtacattgaagttagtagatcaagtcattcccatgaaccaacaagatcccatgtgaagaagaaaaaagaaaaaaatccaactaacagttacagtgattaactactcacaaaccaacagtgagaaatatggtctaaactagacagaacaactaccaagattcctccaatccaaatccaaaaaaagcaacaatttattttctttaaggaaaaaaaaaagtatatctatctatggcagaatcaaaagcaggatcgattgatgtgaaagaagtggaatgatcccaaaagaaaaaggggaatgaaaaatcggagggaaacccactaaaagaaagtggattgagttacaatttgtagtggaggcatgactaagtatcactccgagatcgagatctgagatgaaatcaaatgaaaactactgaaatacacgaaaaaaaaatatacatatatatattgataattacaactaacaaaagagctaaaatttgatttgatggatagagagactcaccgatcggagtgggaacaataagctggggaagaagaagtaacaacaaatagaaccgaacgcaaatgaatccacgacgacgatgatgacgacgacgatgatgaagaaggagaagaatttgaagacgaagtgtggcttcgtcgaagagctttcatctatatccttaaatactctctagtgtaaaaaaaataaaaatggggaaaaatcaaagaaaccccaaaagaaaaaatcgaaaatggcagtcgaaagcctctttcttttttggttctactggtctagggttttgttcagacaaagcttcaaagatttttggatatggcttcctttcctttttatcttttttttttgtgttgaattaattacgaattagtaattacctactggcggtgtagaacatagccacaaccacagcgaagcccgccaaggccgtgacggcgacggcgacgttcgaaggcgacgccgccctgaaccaaattcctcccccgccac

SEQ ID NO: 18256 - DNA, 7024 bp, Cannabis sativa
  modified_base (1430)..(1430): a, c, t, g, unknown or other
  modified_base (1569)..(1582): a, c, t, g, unknown or other
aaagccaagattagttattaacattttgctcttacaaagaagaaacttcgaaagaggagtaaacttgctgaagttgtcccctggccaagatctaggctaggagaagtttagatgtggtggagtttatgagggatctcccattgagatttctccatatgaaactgagaatggtgttcaaaactcaggtttggacctggtgaagaaactgtgtgcatagggctcctgactccttgcctatggtgatgccttgattggatccaaggctaagaacatcccattgcagaagttagttagccccaagccttcaaatgttattgcccaaagatgctttactaatatctttggggtaacatttcttgtctcctcttgaattaactttattttacttatcatcacctgaattttcttcttgttttcaggcttgtgttggttatgcttacactatggataacaaacacaagaaggtgattgagcttgcttaaaaactctcaattgtagaggagtgtgttgttgttgcacaagatcaagtggctgtcttgaaggaaaacattgattctctagagaaaatcatggacagtctttgagaagtggttgatagtgccaaagctcgagagagtagctttaagaagaacctggatgctgcttggaaagaaagcttcaaaggttgaagattcttctcggctggaacttaatgagcagactttagctgctactcaacttgaagatcaagttaaatgtctgagagagcaagcgaataaactggaggataaggctgttattaatgtcacattttatgatgacttatgttttgatgtcttctatcatgcttggtcatccaatggaggagcacggtcattcaactagtcggcattccttgacacagaagtcctattctttataaggcattgtgagtagagttttaatgaagatgatctccagagaatagactttaactttaatggagatgagccaatagttgaagaagcttaagggtcgaaggctacaatctcgagcatcctgacatccctcctcttgctgatgtgccagttacaaggaatgaggaacaagttgaagttgttattggcatagaaagcttcttggcttcataagacattgtcttagggctcgtttgacacagctttttggaaaagttaaaagttactttttgaaaaatttgtgataaaaatgtgtttggtaaacagtcaaaaaatagctttttgaagaatttttggagaaactatagctaaatgctgaaactgctccaacccaatttttagaaaaagctgttttgtttaaaagactatgataaattttttttgtactaaaaccatatttacttatttattacatattaaaaaaaaattaaaataaattaattataataaaataaataatttttttgaagaaaaaataaataattattaaatctnttatttttttaaaaaaaaataacttgtattttattttattattaacaaacaacatcaacttagaatttttcttatatacagtttctaattttttctaaatttgataaaacataataaaaaaatattataaattattttnnnnnnnnnnnnnnaaatttatatttgaaaaaaaattaaaaatatatataaataaaatattatataaaataagttttacatatttgatactataataaattagattataacattatcattatcattataatagatcttaacaacttacagtactttaaaatttataatttaccaaacactcagctcagctttttttcacagttttgctacagctgctttttctcacagcacggctacaactgctttttcccacagcacagctgtgccaaactagtcgttagtccgtttttttttctttctgtttttaacttttagctttagtgtgttagttggtcgtcccaggcagtcttttaatgtagataagccttagtaaaatattatcaaacttgtttaaattaaattagaaattattttaacttaataaaaactttattccaatatttgttttttaattttactttattcgttaccgcttgactgttaaacacttgcacaatacaccatgtcttaagaaactcaatcactgggagttatgtcattgtttcttaatttaatctttaccatgagagtacttacatagaagtgaaaaaaaaaattgaatgctcatgtaacatatagctctcgtataccataccatagcctctgtgcccccaagtgatcaaagaagtacattcattggtcacttgccataacaaatcctcctgggctttcttaatcatgactcttaggtgactgttacaaatttgaacactctccacttatccaaagattcgtggggtaacagtgttgaactcactaaaaaaaccactgaagttatctcaagaccaaatctacaagctctactcaacgcttgtgagcgtcgccaagtctgtaagttgtaattgattaatttaaataaagtaccaaaaaaatctttgttcaacgttcttattcatcaaattaagtacaattacattactatgagctaagttgacagaaaaagatgtagtagttgcagattttgtttttcgtccaagcttagctaaagattcacactatactaatgccatgtttaacttataagtataggagtcataccttagcaatggacctctttacctaaagacaatttcgtcgtatctcgttagtttaaaaggtgatcgtttgctcttggtaaagtgaattttattgtgaagcgagctattttgaagacaactgtttttattggtagtaccgtcgtagatgtaccccgttccagtatcttgatactgacactacattcaagttgtagttatagcatgccaacttgtatgttgcaagttctagtacttcagtgacgacatatggtcgtaacatttaatataatacaaagttttatccaaacatagtgttccttattatttaatacaatacgacccggcctaccaaaaaagtccttaaaattagacattatttaaataaatcccaatatgtataaactataaatgtctaatgttttgaggttgtaaaattgtttataaactaaacgaatcaactagtgtttcttcttaattgcttccatttattatatgacttactttattttaatgaaaagtaaataacctcaacacaaaattggttaaattttgactaaatgcaatacaaagattacatacaattcactaatgagtcacaaacaatgttacaattgagtaagtatacacagagagcaataacaaagaaaaaaatatagttatatacatgaagctaaggtgaggagtaatgctagggacaaatttaaatcctaggccaccataacaactcagtcaatctaccccaagagaagagaagaatctacttcaatttaaatgcaaggaagaattagaataagaaccacaaagtcacaaaccaaatatggggtcatttgagttgaaaatggcagcactaaactgtcttgtattcaagtcatttccatccaaaggaccaaaccgatcaagccactgagatgggcttgagttgtcactctcttcaacccactctgaagtcatatctatgtcctcgaactgaatcggatccgcttctataggtttcaatcttgtttgtcttgctaacttgagattgtaatttatgtaaacaagatcatttaaagcttctctatcaatcttgttgcgcttctctgagtggatttgctgaaacgcgttccaatgcctctcaaatgtgaaactgctgcaaacttggctaagtattctgattgcaactctttgcagcacaggagcagaatcaccatattgttcccaccatagccctatgaataagaaaaaagtataaacagtgagtttctgaaatagggtgtgaatgcatatctaggattgtaaatttaccaggtgaaaccacatctcttgcctccatagctaggctgcagccgaacatgccagtcgcctttctaaaagtacaaatctgactagtgatatcgcgtctcatttcaggagtagggagtagcttctccagaacattaaagaagtcttcttttatggatgtaaggaactttatctctggattgtactgaatgctcgggttcagaaatgctgcagctgaatgcagaggtgaatggtgttgatctcgccactttctatctacaatgcctagaaatgtcttgcatttgttttcatccattatatagtatgtccttatagattcttttgcccttgtcatcatttcgtatataaaaccaacagcaggctttccaccagaaacttccctcaacacttttagaaaaggctcagagattgccacacattcgtctacagccctccagaactcattatcctcaagaatggcaatacatgacaaactttgttgcttatttaagtatgaggagctcgtacagaactcgggactgttaaacatatgtttcaaccttggcttctgcttccagatcgattgtagtgaaaggaagttcgatacagactttgtgataccagtcctaatgagttcttgtccgccagtgtactttttcatcaaatcaagcatagagacactgttgtatatgaacttcgatatagtttgtgcatgtatgatacatcgattcacccactccactttcgagaactcttcaaggatcaaattcaagcattgagaagcacaaggagacacgaaaatggtcgaataattctgcaagatatggttggcaacaccagtatagttgaaactattgtccattataatctgcacaacattttcaggaccgaaatcctgaatgacagaatcaaataaatcagcaaggcattttgtgttcttgaagtaggaagacacatcaacagacttatggaaaaaggtcctggaaggtgatgaaaccaagaagctaatcaaagctcttgatttgttatcagtccaagtatcagcaatgattgtacaacccgttgtagcccattctttctcaatatctttcgattgtaagctcatttcgcacttgatcctttccaaccatgtagtcttgagagtttcagcagatggacccaaaaaaccaggaccacaccttgtaatggcgtctatcatcatctgatatgatgaagaacgcgcaatactaaagtcgagcttattctcgaaaaagaacaaagctatacttctttctgcattatcttggttatttgaaggaaggttagccataggagtaacagttgggaaaacctttgcgacaggggacgatacatcagtaacaacaagagctttactaccagaaacactcacaggagatttcacttctacaagcttttgcttcttagtgctagatgtttctttaacatcttcctttgaagctataatagctctcactctatcagtaacatcatctcgtaccttgctacatgggtttacacctttacttggtaaccgagatagatgatgcttcaacctactaatcccaccattcaaaactctcatacagaatttacatctaaccttattcccatctaatttttcagcatattcccaacatacatctttttcacgaaccactgccataaacaacaaaagcaaaactcaatcaatatcttctgtctctatgtagtttgcattatcatccctcaacacaaactgcctataatcaagtcaagtattaccaaagcaaccttaattgacaaaacttactgagttactgatcaattgttgaaatctgccccaacctacaacaaagaaaaaggagctatatttaaccattaaggacattacgtatctccaaaacaaataaatgagaacaaaattctgttctttttatatactaactggaaaatcaaccaaactggtctattatcagatcccatcatttcatcccaataatttttttccttcagcaattccaaataatgaatcactgaatataacaaatttagttggaaatataatggcatgagcttcaattttctatatctcattgctttttctagtcacagctttcacatacacgtacattcaatttactgtaattttatgatgctaacaaagcaaataaccttttcttgggcgaaaatgattatccgggaaaatattttccgtcaagacaaacagagacataggtaccattaaatacatttcatagttcaaaattttccccattccaaaatttcatattttctcataaaccaaacaaaaaaatccaaaggaaatgagaaacggattgggagaagtaaaagaaaaattgaaaagagataaagcgagaaatttatgacacttacagcgagagaaagagagagagattggtcttctcgacggagaaaagtacggaagctttcaggatttggggggtttcctacttatcgcgatattttggagtttttagggttatttctattatctgaaagttcgtgtttcttcaaaattctcatctgttttatcttttttaatattattttatttttagtttcttttgacgatatatcgtggacagtttatttatcagtagtactatgatattatcccaatccgactttgccacgtagacaaattaggtaagttacagaaagagaccaaagcgacaagagtatgtaataaaacgacgtcgtttaatagataacaggctgaaaaaattcaggcggaagccactctattttatcagagccaggtttcgatcctgggacctgtgggttatgggcccaccacgcttccgctgcgccactctgatttgtgatattgtatgatataaatattatttaaacattttaattcatataaataacagtgaaaagttaatgaaagtgaaaaaccacttaatttttactctatattttttgttaagacacctactgtatttggttactttaaattttttaacgaattcttttggtaattatgggcctcttcggaggcccatgaagaaagcccatttgaacttaaaaaaacatttatcttaaatgtgattgctatttggtctttttttttagtacaataattatttgttcctggatttaatgttttgtttataataatagtgcgtctagtttaca

SEQ ID NO: 18257 - DNA, 2467 bp, Cannabis sativa
  modified_base (833)..(839): a, c, t, g, unknown or other
gagagagagagagagagatatttagtgattttgaaatgggaggggtattttagggagtaatagatagaaaaatataaatttgaaagagttactagggggagatagttttgttacttttttattttttatttttttttttataaatggtgcctcaaaagagcagccaggataaaacaaaacaaaccacagcagtaaaactccttacacacagaactaaccaaagtagtaaacaacacaaattctgaactcagttatacaatgagagtctaaaaaaggaaaacaacaagagaactttgaagtagaatgataagaagaaacgcatcagccatccacattgccaccatgtgggaagctgtcaaaattggacaatttgattcttccaaactggcctgattggattgcccattgagccacatcatgggccgcacaattatatttcctcgatatccagctagcctcctagaggtcaagcttatgcactagctcatggaacttgatagttacttggaccacatttaagcatgctttgtgaattttccctttaaattatgtgatgtgaaagttttttgagtgttcatcaataaaaaggaaaatactattcacttggaaaagaaagggagggggatgacataatagataacatgacatatttacttaaagagaatgtgaataaattatatggttataattctcatacaattgtttactaaattttagaaagagaaaaagtagtgggacccacacaaattagggagaaaataaagggaaaggttctccttctatttttatagggaatacatttcccattcctaacttaatttattttaattttnnnnnnnttaattaaaaatgaaaaagacaaatatgccctttaaaaatctataaacataaaataattacatgctataataatggtaattttgtcaaattaaagcattctgattacctttcctaattatgtaaataaaataatatgattttggttttctttccggacagtttagtaaacaatataataaaatattgtttttgattattttctattttaaatcgattcatttctcccatttattattctgattccaattacagttcagtaaacgcaccataaattcctactaaaacatccaagggttaagaaagaataaaagtaagtatattaattaaaatgtaagagcactcccataactcctttattttaaaaaattcttcaaaaatttaaagaagctaggaaaataagctctaatgtatattgttctctattttacatcatcattattgactattcattctctacatgtagagaagagatagagatcattcaaataattttttaatatgaatttatttcacttttttttttattttttatctctaaattaattattttgttaataaatttatcttcctctcttattttaattaataaaatatatttaaaaatataatattttaacgatgtgaaagaaaaaaatagagaaacttaaatatttgaggtaaaaataaaaaaaaaagtaaaattttagtagtgtattttgaggataaagtagcgaaactgaatgatagagtagagcatatctaatgcctaatggtacgctcaattttctttaggtaaaaatctaaaatagagaactatttttattgttattactctattcatactccatactttagtaaagtatttgattattttaataatattatataatttgaattcgccaaatataaatttattttataatataataaaaaataatgtttttaattacaatactattaaaaaagtttagcaaaaaaaaaaaaaataataataataataaaaacaataaaaaaaaaataaggagcttcctacctaaagaacatttctagccatgctctctaaatacactccttggctaaattagagagtgggctttaacaaaataagcttaaaccatataatatatgactccttgtaatagagaatggatagtgagctctctattttttttgtaaaattttttaaaattaatttatatttaacaaattcaaattataaattattattaaaataatcatatactaactaaaattgagagcatgattggagtaaaaatatgactccctattttaacattttagctattttatctaaaatttggctgaaaaatagagagtatggtataatggtatccttttttttttagctaaaatagtttaaaaaaactaaaatagagagccatttttattattatgtgttgccctttattttgtccaaaatacgtggaccaaccagattgtgacacgtggattgaagaagcaagagtttgagatgattcgactaagtctccttaatcaaagggatcagcatttaacatgcctcccggagaaggcacgagggttccacatactcccggagagcaaggctataacgaaacacctccgggaggtatcaaatcctatctaaacagtcacctcgcatttaatg

SEQ ID NO: 18258 - DNA, 3680 bp, Cannabis sativa
  modified_base (770)..(778): a, c, t, g, unknown or other
atatatatatattttgaaatataaaaataaaaattacctttattttattaagaaaaaaatctttagagtgatcacaaaactcaaattacagatttatagatgcttttatgtaaatgtgtaatgtgtgtatggaagaatatatatatagtactcctcttaatgcgtggacaccagaaattaaagctagtgtcatacatcaacagattcaaaagtaactctttataagttatatatatatatatatatatacatagatggagaaataacccatggtcatttctaagtaacacccttcaagggaatttttactggtacaattttttcccaagtgatcgttatatatcgatggtgatacttctcaatatcatatcatcagtatatagaaatatagtcgatcctcatcgttatcatatatagaagaagaagaagaagaaacctctgcttctaaaaaagccaaaaccttgaaatgtttggagaataatattataagctatatatttatatatttaaatacagtagtatatatttagctacagatctagctatatatatagcgaacagtatatatatataaattctccgggataaaaattacattaaaaataaagaattggatatcagatctgcaaatatagatatatacacaatatacagagggcacaagtaaacgacaaatgaaaatagtaaataaatgttacaggattcctgtcttcatctgttatcactgacaactacgtatctctctctgtatatatttatatatatatatnnnnnnnnngagagagagagagtgagtgagagacaggggaagagtgagtggtcaaatcgtcattgtaaaagctctaatgccttttgtgtgattgtgttattattgcgataataatttggtgctgaattccctctaaggttgcggaaacagagagaggtccatatgcatatttgtcattacatatttgaccattatggatgaatatctacataataacttgctcatcaccacttgaccaatacagtttattctgttctattcgattataattatattaaatattaattatagctagtctagttcaaattgtacttccttcataacctttttaactctgcagtccagctcgagtagataattgaatatataagttaacaaataattcaaaagtagtcgttaattaaggttacatatatatatatatgaaagggtttgaagaagtacttttaagttttatatatatagtaggaggcaaattaaatataatcacatatatatgatgataaaagtacgtactattggattgggggcaacttaatatgataaataggtaaatctatattgtgatttgatggtataggcatgaagggatctgcatcagaaaatggaattgtagaaaaccgaggaaatggaaggctcttaagtgtgaaagcaacgggtgaatgagccaaagctaatcactcccatgcacacgtccctttctctctctctctctctctctattcaagctactaatataggatcaattcccaccgtacaatacattattattattttctttcctttatgatataacacaagtgacctaaagttcaacctctacaaatctaaaaaattataatttcctttcttagggtgtggggatccataatttcaaatttaacaatctaattaagtctcaattaaaatgtaatgacaataaaattgttattgtggattaataacatagcaggtacgaattaccaaataatatatgtaccggagatattagaggagaggggtaggccatataaaacggaacataaatattaatattaatattataattattagttattgcattttctgtgtctgtgtccatttatttctgatgagctagctagcttgtctcttaactatatgttaccataatagccaggtatttcagctcaagtatcaagaagaagatgagatgagatccaaaagaagtttttttaaagtgtccatcatcaaaatcccaatactacttctgatcgatgatcagtcaatcccatcagtcaaatcaaatcaaacaccaacaaagtgagagaaaaggagagagaaagagaaataaagaaagaaagaaaagcaagaaaactgagatagaataatagataaagagatagatagagagagagagagagtgagagagaaagagagagagaaagagagttatcagaatcaagcaaaagaaaaaatgtcggcctcgtccgctgccttttcaccaccggaccacctctccccttccgaccagctctgttacgtttattgcaatttctgcgatactgtcctcgccgtaagcatatatatatgtataactcatatatatacatatatatatgaacaccattctgtttttctaaattaatattttgttttgattttgtataggttagtgttccttcggagagtttgtacaagattgtgacagtgagatgtggtcactgcagcaaccttctttcggtcaacatgcgtggaccgcttcttcctgctgcccccaatcaactccatttcggccatgctttcttcactgctcctcaacatcttctggtgatgatcaataattaacaatttatgtattattaattgggcttcaattccttgatttgtgtatttataccatttttcaaattatttaattaataaaatattgtgatttgttttttaattatgcacaggaggatattcggagcctcccatcgaataataatcttatgatgatgaataataataataattataatcatcatcatcagccaaaccctaacgatttgcttatgccaattcgcggaagagctgaagagatccctaaacctccggttgttaacagacgtgagatctaataattctatactttttacattaattatctaattttaggttttttttatggtttatatattgtgccgttatatatgcttgatatttgtcgctctaggctccagccttaatttgtttggtcatttattaaatttgaaacaaaatggcattcctgttaaatctaatcaatagccttactgaccgaatatgtgtagaggctatatatataggtagctaccctaatatatatgtatagcttcttttagtcatacagaagaaaaatttattaagcttggatcgaaaacattgaacaacacaagaactatatatatatatcctactcaacagtcaacaccttaagacctaatatgtttaatttttttggtcaacctagctcaactgtcaaaagccgcaagaatccctaaaattatcacaatctatatatattttcccttctctactttttttttttgtgtgttcagtctaactgatctggaaaagttcttggtttcatgattataattaatctcaaaagatctttgaattgatttaagaataagacttttgtactacccggcccctctctctctctctatatgtatatatataatcatggtcgatggcagatgtcacctttcatctaaacaatctagagaaattcaagtatatgtgaatgtaatttttacgatttatataagaaaaaggctggctctctttgagaatatatatacttctaaaaatgctgcttatatatatatatatatgatcatgtttaattcattgggcactatattatacttgacttaattagggaagatagtgtctatatatttgattgcttacatataaatat

SEQ ID NO: 18259 - DNA, 2828 bp, Cannabis sativa
ccattggcccacatatcagatattaaactgataagaacagatactacacttgatcttagccaaaaggccgagaaaggtatgaattgtatacttataggaactctcattttatagctgtgtttaagagctcctcttagtttgtaaccaatgtgggactattatatggttttctaagtagaccatagggaacttgaactaaaaccaaatgtctcaattttcctttttctcaattatttaaaacaggtgaatactacatctaaaaggcataatcaaagtaagccatcaaaatcccattaaccagtcaaagtgaatctgaagctctaaatgagcccttcaacgccaataatgcagctccataggcagcttcagtttgagttgctcgattcacaggcaaaccaagaactctctctcttatcttagtccatttctcatttttcgaaccaccacctgctgtgaacacttcatctaccttacttgctcctaaatccttcagcaaattgtatgctttggcctaaaatagcataacacaataaaatcagggtcaagttttttcttatctttatgtttaataacttttacacatacctctattcgcgcaatggattcaagaatcccgtgcaagaattcaacatcgctttctggtcgaggatgtagcctgaacaagaaagaacgaatgcagcaattgaaaaaattagtacgacgaaaaaagtaaaaaattgaatagcatacatgctttgcttacctaggagccatttttggatctgccacgggaaatctctcaccagctgttttaagaggatagtagtctagaggagaggattccatgggattaatttgctcactaagtttcaccaattgctcatcagtgaaaagttgtctaagaacagctccaccagtatttgaagcacctccaacgagccacttatcgtctagacgatgactatacaccccaaaacgcgcatcatcaacccttgtagtactcattagttttattgcaagtgttgaccccaatgaagttacctatataagaacttgaaacattttaattaggagcatactcttcaccatgaaacttttaaaacaaatgaagaaaattcttacagctttccctggttccgtggctcgagcagcaaggaaggccgctatactatcagtagtgcctgcacatacagaacaatcttttgcaaagcctgcaaagataatttatacaagaacattgtgttaaaactctatactaaaatactcatctgtataattgttatactgatctaatgaaacataccaaattgtgatataatttcttctttcaaatgaccaattgaagttccaggagctttaactgaaggtagaagttcagaataaggctgagataacaaccatgatggataagcatcaagctcgggatcatatccgacctacgaaacagacaacattgaaatttaatgaactgaaaattaagtaaaatgcaaatgacttgtataagattaccttaagagcattattgtagtcagacactcccatttttccatggagaagccacagcaaccaatctgcttgatgtaacaaaaccgcagattttttgttcgaaccagcttctctctcccaccaagaaacaagcttgcacaaagtagaggaactcgagcaaacggtatgattttccggggcaatagacttaactgcaggtaaagcatcagggcagctctcattgtagagaaaaggtctccataatggttctcctgtattgctgcagcatcgaatttcggttttcaaacttaaatgcaatcttgacatgaataattgaacatgtcattatctattaagacatatttacctgtctataataagagtagttgcagaagtcccatcaatggaaatggcagctatagtttcgcgaagatgagacggaacatcttctagcaacaaaaagagagttgttttccatgacagtgcccaatccattgtttcttcactctttctagtcaatggaaatgtggccctcaaattattcagtgttgttatagactcagtcattatagcaaaagcaatttcgaacttttaatatgtaatcctttgcaaaaacaaactcagtcattattaacttgaaattttgttttcatatttggcaaaatgaaacaattcatataatgacatctcgtgttcatttcaaaactcaaaattcatgctttgttattataaaatgattagtaattacatggaaaaagaacattaattatctaaaaatactcaatttcttgttcttataaagttaataaacacatcaaatttcataattactcctaattacactcaattacaattattaaaggcaccccaaatcacaaaagaagctcaaatttgcataattctagggctaaaatactaatcataattctaattggtgtactcaactcaagtagtgatttgagcccaaaataaattcatacttttgagatgagagtgagagtgttactgttaccatgtagagagggtactctctctttccctcagcatgaattgtgccttgcttatcaatgagagcaaatcttgcaccagatgttccaaaatccattccaagataaagcctttccccaacagaagaaggacccaatttcaaatcaactttactgctgccaatgccatcactcattgctctgaaccttggtcttagcttactcacacccaagttcttaaaggacccagtttctgaaacaacataataatcattctgggttttcagtttactagaagaaaaagtgaacaaaagctaaagaaaaacataacccattattgaaatttaagaaccatgtttaggagtgaatcttaaggtt

SEQ ID NO: 18260 - DNA, 2656 bp, Cannabis sativa
aaaaaaaaaaaaaagaactaaatatatatatattaaaaaaaaaaggacttttttaaagaaatttgagggagcttaaatataagttttcttaatttagagagttgtttttttaattttgggagacttgaaatttggaattttcataacataaattttattaaaaaataaaaattatgtggaggcttactttacatgcctcatgcatgtatggtgggtttctttaatttaatttatttatttttaaaaaatatatattttttttaacgaattgctcaatgttttaggactatcattcaattattattattttgttgtgtagtatttaactatcatgtaagtattaaatattcatttaaaaaatacttgagcaaaaaaatatgcactaatttttattttaaaaagcacactataaacatgacatattttttaattatatcgattttattttaaaattttaaacaaatataattgagagaaaaatattatcacttagattttttttttttttttaaaacaaattacagatatgcttttagatcatctttatgtttgagttgattggaaatgaagtagttatcaaatctgaaagatgcttatagatattattgatgatgttatatgtctccccaaaaaagttgataattaattaagtttcacaattcttaattagatttgcttaagctttcgctagcttccatatatcagttcattaattacaccgtacaataaaaacataacaaaaacagctaatacattacctttcaaaaaaaaaaaaacagctaataaattacatacatgattacatccataatacgtataactaaatctaaataagtaaaaaatataaaatatatatatatatggtatatatattcctatatagtttcaactggtctaatgaattttttattcgtgcttataaataagagactttattatttaaaaataactacaaattcttgaccaattgaaattttgtcacaatacattactgacatacatagcacgaagaagggaaaaaattatgtaaactaacagagttacaatataaaagttaaaatacaaatttattattaaactaatcaacaatatgatatataagtttctactagctatcttcttaattattttcttgtaatacgtatgtaataataatttggcttaattatcataatagttctgcgaggaaaattgtttaaaataaggaatgttcataaaatatttaatttaattcaatttatacaatttaatctaatctaatttgtaaaatgtaaaaatttatatttgtgcatattggattattagaaatttaaaatttaaaatgtaaaatttaaaattatcataatgttgattgacatgtaaaagtaactaatcaaattcaatctacacatatttataaatatattaaaatattaaaattaatattttaatgtaaaatatagtaatttaaaaatctaatacatattatatataaaagtatatttcaaaacatactagatataagtatattccattcttatttataacaaaaatatatctgatacaagtttatatttcaataaaatgtatatttctttcttatttataaagaaatataatctaaatcaaaatcaaaatcaaatatttatttatacatataatttttttcttcttcctttagatttgttattttttattttatttattttaagttgttgttagagacataaaataacaataatttgagttatttcttgttagttatgtaaaaaaaaaaaaatttaacaaatattaaataattcaatattaaaaagtaaataatttaaaataactgattgctatagattttctattcaatggcccacactacaagaaatgttgcttttgtcagcacatttctaaataagttgatttttgtggttaagtgttaaaaaattagaatattggcggctaaaccagctgaactttaaattttttaacacttaaccacaaaaatcaatttttttggggcaaaactacatgaactctcattccgttttgctctgtatctctccgtccaaaaacacagttaagtatcatagtggactgtccacgtgtatacacttgtacacatggcaaatttttagtgacccacgtaatattaattttaaaaataattataaatatttaaaaaattaaaaatttgaaaaaaaattaattttaaaaatattttctttttgggatattgtcaactaaaccatctgaactttaaattttttaacacttaaccacaaaaatcaattttttgggcgtaaaactacctgaactcccatccgttttaacacttttcttttttcttttcttcttcttcttcttaactgaaaaaactcgagcacctagtcgcctaccccacgacccaaccttctccgactccactctctctcacgttgcacaacgccagccttctccgaccatcccatgtcagacgggccacagaactgaaccccacgatccgaaaaatcccaacctcgatctgccttcttctctctctcctttgatctttctctgacctccctttgtttttttttttgttcagtccgaccccccaccaacgatcaccacggagagagagagagagagagagagagaagagacgagaaagagagggtttgggaaggagaagatcaggagagagaaa

SEQ ID NO: 18261 - DNA, 2519 bp, Cannabis sativa
ttacctaatgtaattagttagtgcacacgatggcaagatgtaagagcccttaaagaccctcttttattgttttcttggtcaatcttatgtaggaatggtgtacagcagaggaggaactcatggcaagatggagtgtatggtacaaactgccccattccaccaggacagaatttcacttatgttcttcaagttaaggaccagattggcagctatttctacttcccttctcttgccttacacaaagccgcaggaggctatggcggtatcagaattcttagccgcccgagaattccggtgcctttccctcctcctgctggtgatttcaccctactagctggtgactggtttaagcaaaatcacacagtgagtaacctacctaattttatagatgatgccaaatctcatataagagaaaattatcaaggcttctaataatgtactttttcttaaacttatacaggatttaaaggccattttggatggtgggcatgatctccctttccctgatgggcttcttatcaatggtcgtggatcaaatgggaacacattcacagttgaccaaggtaaacaaataataacatgtcaccagttcaacttgaaaatatacattttgttaagctacacctatacaaggtcatttggtcatggtgttgatggttttttttttctcttgtaaaacttgctaaaacaggcaagacttacaggttccgtatatctaacgtggggcttacaacttccattaacttcagaatccagggccacaaattgcttcttgttgaggtagaaggcactcactctctccagaacacctatgattctcttgacattcatctggggcaatccttatctgtcttggtcacagccgatcaaccacctcaagattacataatggtcttttcaacccgtttcacctctcaaattctcacgtcgaccgccactcttcattacagcaactctgcaggaagtgtttctggtgctattcccggtggcccaacaactcagattgattggtcccttgagcaagcccgatcattcaggtactgttttccttattcaaattatcatgagagtctaaaatctttgcagggatacttagaatattttttctttgtaccaaaccaggcggaatttgacagcaagcggaccaaggcctaatccacaagggtcataccattatggattgatcaatgtgacacacacaatgaggctagcgaattctgctccaataatcaatggaaagcagagatatgcagtcaacagtgtgtcgtttattccagctgatacaccactcaagctagctgactacttcaaaatctctggagtgttttcgcttggaagcatccaagacagccccactggcggcggggcttatctccaaacttctgtcatggctgctgatttcagaggctatgctgaggttgtgtttgagaatgaagaagactctgtacagtcatggcatattgatggccataacttctttgttgtggggtaagctcatatcatgaactttgtttcttcaaagaaaaaatcaatgcaaaattgtctgattagttcgagttttttgatatggcagtatggatggagggcaatggtcccctgaggctagattaagatacaatttgagggacacaatttctcgttgtactgttcaggtacttaaattaatgttgctttgccttgttaatcttcacaaatatgattaatgtttttatatctatgttaatgttttgtgcgtgttttttcaggtttatcccaaatcatggactgcagtttacatgcctttggataatgtgggaatgtggaacataaggtctgaaaactgggctaggcagtacttggggcaacaactctatcttcgagtgtattcacctgcaaattcatggagagatgagtatccaatcccaaagaatactcttctttgtgggagagcattaggtcgtaggaccaggcctttgtaaaaacagcatttcttcatcaacaaaaagagtacaaatgtcacgagtgggtgacaaggtttagaggattttaatcctatagaagagaatatgtagcaatggtttatggtgagcattcttttgctttgtagtagcgttgttttgaactgttccaagtgggactgataggatataattgttagagtaccactcgtattcttttttcctttcctatttcttcccttttctctattaatgttaaaaattagtatttttaaatcaatttaaatttaacacatcaattaattttttatttatttaaaaaattaaaattttaattgagtcaagaaaaatagttaacatatttaatataaattaaattagttgatatttaaggttcataagcctactaagatgtctaaatttcggcctattagtctatgtatagtagtttacaaagtggtgtcgaagtgccttgctaaccgtatgaagtagagtttgaacactgcgatttcggctaaccaaattgcctttattggtggtcgaatcatccaagacaatgctattttaggggatgaaagcctt

SEQ ID NO: 18262 - DNA, 1974 bp, Cannabis sativa
atgcatttaggatgcttaatgtgatgtgtttgcatataggttttgtattttgaaggtcaaaaaaatggatgaaattgaaaatgagagttactcaccttctaccttagatccatctatagaccttactgatactgaaactgaagaggggaacaatagtaaaaaacagaaagttaggctacaatccgatatttggaaacattttactatgattgaagggggtaatccggtggatcctagggctgcttgtaattactgtgggaaggattatgctgctgaccataggaaacatggcactagtagcttgtggaatcactacaaccatcagtgtgaacaaaattcaaataagggtgatggaggtgaagagaaagaatctgaaccaaaggaagaagagggtgatttggttgatacgccattgactgaagaagcttgcaggcatgctattgcgaggtatatagtatcggagaagttgccatatagtattgttgagagtgagggatttaggcagttcattcaggctttcttacccaatttcgagctctcaagcgctacacttgcaagagatatttgccagttgaatttggataaggggaaagataagaaaggttctgaagaataaaagggataccacttatagataacacatgtatcttctttaaaatgttattttacatgcgtatcatttcatactggctagatagtgagtgcaagttgtagaagatatttatcattctctattacttttttattttttattttctatgatagggcattttggttgattttggtagtaatactgaaatggtacattctgtgagtttgtcttccaccgggctcctcatatttggcttcagaactcaaacaagagctttgtatggaaagtctggagatttcactttacgatcctcaccagggcgttttcgtgttagagctgtgcaagaaaatgaagggcctaggagactagtagatatcatcagaattgtgcctgagctctcaagaaactattttcgaagtccttctcgaaggaccctcttcgggggtatctctttgttgggtggtttttatgttgcacagacaatttctctgtcttttggagctttaggagtcaatgatgtgatagctgcagttttgtgtgttcttctcacagagtatgctacaaagttttattacagccgcccgaaaattacatttcctcttgctcttcttaacaatttcaagatgggatttacttatggtcttttcattgatgcttttaagctggccagttagctactctaaggcaaatcattccacaagaagcatctgtgattctgtataagctcacgacacttgtgtgtgtgattgaatcattattgtattcttggtttttaagaagtcacctatatgtaaaattgaactaatcaagatgccatttgtaactgtcattgaatagttatggtgttcatagttttaaaaaatttgtgttgataaatggtgagatgtttaatgtttatgattactataacatatactattatatgaaaaatttagagtcctaaacaaatatatatttaccaaaattggtaatggagtggaaagatttccaaagtgctaatataatggtaaaacaaaaaaggtgggagtgattgtgattgatcttatatgtattgtacactttacagtgcagagagaaaatatcccacttgggtcaggcgcaatgaagtagagaaatccattacgaattgaatatcataatcacaaattaaggatgaaagtgacattgtaaaccacttggaccaataacaatatatatgaagttaagtacatttatctaaattagtaaagggttttttacaaaaatattgaattttgggtaaaatttatatttcattgtaatacgatttttttttacaaaaatactattttttttttttataaaacaaccgtaaaataataaaacggaacaattaaaataacaataaaacaactaaaaaataa

SEQ ID NO: 18263 - DNA, 4715 bp, Cannabis sativa
aatagtctaatcggtaactttggttcaaaaatattatttagagtaatattatataatggttaaaaagatatatggtagtgaaagcttttcctccaccctgtcaagtgtttgacatttaaacacttcctccaactagctagttttgctcatcccctttttattttaactatttatttatttctcgttatagtgtcgatcgattggaccactttctcacacgaacaagtaatgaaatggcaatacattttttaattccaaattttctcttccaccccatgatgtgaccacgtgaatgcaacaatgatcctaagaaatctcacaaagtttcccatttgtaaccataacaaatatttcccactttttttttcgctttcccacttaagaaaaaaagttacaaagtaaataaataaaggtcaaatcttgatctggaaaatgaatatatattcacatctctttgtcaagaagtggtatcagcaattaaattgtaggtggagagttatctgtgggttctagatatgattgtgaacccaactcaatttaacaaacgagaaaacgaattataaaaaaataaaggcaaacttttactaacatttccttcaagtacattaattctaatataaaaaacagaaataaaaaatcccaacaaagagacgataggactaaaatctaatcgtcaactaccacaagaacaataatttaagacaaaaaagaaaaagaaaaaaaatctaagataagttgatacatcaataacttcagtgataaaccatctctcattcaccttagcaaatagcaaaccttctagaaactttcagctccaattataaaaagtttcttttcactttcctactcaattgctcttacggaagaagatagtgacattgaaaaagaagggtccttttttatttatttatttatttatttttctttttatgcaaggattgagagtttgaaaaagaaaagagttccaaatcattgagatttccagtacttggcattttcaaatccattcttggagtagtaatagtcctcgatagtttgatcaatctcagcttgtgtgttcatcacaaaaggaccatgctgaaccactggttcattcagaggctgccctccaaccaaaacaaacctcagtggctttgaggacctattccacacactcaggccatctccagggcccaaaaccaggacatggtgagctgaaatgggtgaagagtttttggttccaaaaacaccttctccttcaataatatatacaaatgagttccatgcttcagggatgttttggtgaacttgtgctcttggttgtagagtaaagtcaaggtacattgttggggttttggtatagactggggatctgattcccattgattctcctgctataactttgacctcaactccatcattctctgtacttggtatgtcatcacttgtgagttcttgatatcttggttccatcctgaattcaaacaatgaagatggtaaaataaaaattagtcaaatggacttgttttttttaatggggttactgtattgaatttttagaaattggcatatttggattgaaataattgtcaatgtgaattcatttatatgacatgtccatatgcaattggctcaatcatgattcctgaaacacgggggaaatagggacatatattttgattgcaaaaagaaaaacatagagaattggtcaaataatttatgggatgttaattttgtctcttctgagttgtgtaagagaagacagaaaaattgtcttatacattttgtcgtttgaggaaagattgatccatagctgcaaccccatttgaggtccttctcctgctggcatttcagagtggattatacctctacctgctgtcatccactgtccccaaaaaaagaaaaaaacataacatgagaagacaaaaaaaaaatcacaattcaatatttgtactagtcaaaggtctattgtttgggctagaaaaagattattcataataaaccatttacctggacatcccctgttctgattgtgcccttatgtccagaaaagtcttggtgagttatagctccctgaatttttcaattaacaacaattaagaaaaaaaaaaattactacgattcagccttccatttccaataagatttttttgtttttttatctttacctgtaacatatatgtaacagtctcaaaacctgaaagacaagtccacatcaaaatataagaaaattatagcatataaagcagaaaagaacaaaactataaaaaaaatggtattaaattaaagtataaatgagaggatagaacctctgtgtggatggtcaggaaacccagcaggtggactcactgcaagattagcatgccattagccattataacattaacacagatcatataataataataataataataaaagctttcttgtacctgaaaaatcatccagcatgagaaatggatccaaattcctcaaatcattcctgaaaagtcaaagaacccacaaaccaaatcattaaaccagagagaagaaactaaagctaaaacaacgtatcaaacataatgaaagatattgttccccaaatcacccgataaagaaaagaaaagaaagaatgaaaattcatgagcccatatggataactagaaaagaaaattgcaagacccaaatgaaaatctacctgccaatgcctcttctaacaacagctccatcaccttcatgttgaagcttggccaaaaccttcttcactaccaatctgggtgagttgaattgaggggtatgatctgattcagacatggtatttctgataaaggaagggactttggtttcgatggatggaaaagatcttgttggtttcgatatcaaactgaaaaaaaacttttgtgtcaaacttaacataagaaggaaaacaataagttgttgtatatttctttttgttttggttggatgttgtgtttaaatgaagttgctctgtatctgtatatatatatataagaaagtttgatgaaaaatgtggtagacaataatagaagaagaatttttttgaataagaagaagaataggaaggaaggaaggggttggggttagttggttgaattgatactgacacgggggtgttggaagcgtggggaaatttttgtgtgggctccttttcctttcttggcccaatcatcacaataatcatgacgtaaaccttttgtcatcgtgatgagataccgctacaacctctgttcctacaaaataaaaagattttttcaaacaaaaacactattaccagcgtgtccaatatcactaaatgacctaaatacttgctaatttcttttagaattttttctggcaaaatctttttttagtgtcgtttcacttacaattaatactcaaagctcaaattttaacggtaaattccttcgaactagtaataaatttaaggtatcattcggttagttgtcactataggctgcttatgttatggtgtataacttcttaacaccatgaccacatttatattgttatacataatattattatttaaatattatttaaaaattatttaaaaattattttaaaattattttaaaattattttaaaaatattttaaaaattttttaaaaatttatttaatttattttaaaattataaaaaataaaaataaaatatttttaaaaataaaaaatattataaattttgaaataatttatatatacttttaaaataataatattaggtgtaccactataaaatttaacacgtgtacaaaatgtacatataaacagtctatattgacaattaactgtaaaaaaaacagatgacaccttaaatttgcaagcagttcagtagtttagagagttttactgtcaaaatttaaacttagagggttaagtgcaagtagaataatagttgagagggtttaactgcaaaaaaactctttcttttatagggatgcataggatacgtctataaattcatatctgtttttgtatgttaaaaaaaaaatagtctaattttttcatagtctcatatattgtaggtattttttaggactacttattttttaaaaaattctaaataatttagttataaaattaaaacccttatttaatattacacgtttttaaaaaaataattatatgtgtaataaaagatttaaattttatttttagtactgtaaattatttaaaatttcttaaaacacaaataattttatgtaagtacaacgtacacactcataaaaaataatgaaactaaaaagtgttttttgatatccaaatttatatggatatacattatttaggtgtaccatacaattactattttttttacataataaattatataagcaagcaccccaatattaaaaagaaaatcaacttaaattaatttttaaaatttattcttaatatattcttttacagtattctgtgttaattttaataatttttttttcttttttctttttctaaatttcttaaataatattttttttattcttagaaatttgtatatttcttttttttttttaatatttaaaatatattttatttttattttaaatatgtactttttttaaaaaaataaataagaagaaagtatttttcttttttaagaaaaaagagattttataaatttaatttaattttttttataataattattaatagtattataatatgtcatgataagacttagtgtccttaatttcactttgtaagcaaaaaatatttatatgatatataatcag

SEQ ID NO: 18264 - DNA, 6871 bp, Cannabis sativa
ttacacaattagaactaaaaagtacaagaacacaacgatttttatagaggtttgacccccttagttagcgagtaatgacctactccccttttaattgtattgatactaagagataacactatttagatcactataggtgggatctgatatagctctcttgaggttacaaagtaggaaccaaatatgccaaatctcaagtgttgagagatgctataatgagcgtgagagagagagagagggagaaagtgaattatctgacttagagatttacggcctaaagtgagacttagagttttggggttgagttaaggttctttatataagagagcttaaaccctaattatcaagtaaaataagatatattcacatattaaattggtaaaatacaaaatattacaatgccccttaaaaataggttttttctatttactttcgtgggatgttaaggcccaatttgcagtgtagcttgcagtccatgtgtaaggctatgcaccaaagtcccaccaagtccaatcttggccagccatgtaccttcaagatacaggctggatggtcgtagggctagttggctagcccccttgaagtggctggtgtgtcgctcattgtcgagacccccattcgctaaggtgctgacttgaactccttattggtgagttgtactgccatgtgaccctgatattttccacgtaatcatgccacattaggtgggcaaaaattgggataacattttcccccccaagtccctatgtggacatctgtatggatagggacttactagctaagtttgaattgatgtagcctttactgaataaatgctgcttcaattttagtctttgaaatatctactcttgactatctaatctcatttgttgcagtaaattaactgcattatacttctacatgtcttttaattgagtaatacgtggcaagtaaaagagtggccccacaaaatctatttaagtcttttggggggaaacctctcttcactttacacttctaattatttctctagaaatagaaactttgaagaagctcctccttctctctataggcttaacccacattgctccattcccttgggatttttgtgtcattttgacgatccaagctttccatcttcttcatcaatagtttcttgttatgggtaaggtttttattcatgctatttacttgatttagtttatttttccatgaatgtatgaaccttgttctttgctttgaatgtcttttaattctcacattagattgtaatcctttaggtattttgatctgcatggtagtcttaggatttgtaatgtgtaatttctagacaaaaaagatctgatttgacctttgtttgtgattcttgactccttgagtcatgaagaacgtgtttgagttgaaaaaacacgtgtacagatcctatacatttcttgaccgaccaaggaggtcttgttagagacctagctgaccatgggtggtcacaattgggttcggtcagtcgtggggggataccctataggcttgttgacctatgcctggaagtgaagttcttggctggccctatgctgggtgtcatgggacctggtcggccttctagggcttaggaaccctggccgaccaaggccaaggttccaagtaagcggccaatcttttgtcctctattgacctcaactagggtctcgtgatagccttggaggtaatacaactatagtcttatgcgtggttccccttgggaacactatctaggacttgatagtgagtccattatagtcgagtgcacaacttaggactcactatttatctaagtagatgtacttaagatggtacttcgctgacacccagccttgtacaatgtgatttacctggaaggtacccttgggtattgttaattggaattttgtttgtagctttgtcaggttgctcacctccctcctatatctcttctatgaaggtgattttaagtgttgatttgtaaggtgacaactgttgtgtcataggtcctgttagccttgcttttcagagagagcatttagtttgtccccttgctccttttgtgtgattctagactgacagtcatggccaaaacaaaataatcatgtcatagagcacctatgatcctcatgtttctagggtggcaacaatgggtagagtcagagttgtagaggaggcgacacagacttgtgaggatatagatcaagaggttggtcaggcagaggggcttgaggtcgaccaagaggtcaagagttttgactctaaatctgaagtggaggatgtgcttgttaggagaaggacctacaaaacttgttttgtccttcgcagttgtcctttgggtggatatgatgtcgacagggagccgttgaacaggcttggtcagccttcagtgatgggtctaggccatgtcttgatttagccttctgagcctaagatattggatgctagatcacatggagataggtaagtttctcccgcatctgtcctctctatttagacttttgacgagatactggctagtggtctagtgaggggtgttcattgtgacatatcttccactagagactagagggcacaccgacttgcccttgtttggatggcatggtcagagcgtcatatacagcaggggtggtgttaccactacacccatactttagagacattgatgcttattttgggatttgtccaacacaaatcgccccgaaaagtataaagtaccttttgacaatgtttattttgtatgcagagctaggttggccttagcttactctgtatgagattggatattactttgatctgaagtctgcctcaaagcagaactagactaggtacatctactttagtcaggttggccatcagtggttgggtgacaccaacaacacaactatgtgaaatgttggtgggtatgtttagaactacttcattgcttgggacatccatgagattcgacaccaccagttccagcggatgccgctttacaagcgctccatccctacattgtagatgagggatagggcaaatcacatcctatccctcctcacagagaagaagaatataattatattggctagtgtggccaactttaacaggtatgccatataccctcctgcctctagagttatgggggcccatgtccatcagttggtgtggatggagccctagctataaagttctgtagatggatgatgatgttcctctatctcggatagctcaaggtttgaagaagagagagggccctccgccagcacttggcttgtggggaacagttggtgatgcttctcttctaaccaagctaagaggccaaagctccataggacctacttgcccttgcttgcatctagaggcaagggcaaggcggttgttgaggattcaaatgattcctcttctgaggacaatggtatttgataactaattgtaccatcttttatattcttgtcttgcattgaatatttgtaacttgcattctaactttcctactttctttctgtagatatgacttccaagttgagaggtcttgttgagatggaccatcagaggagcctttaggtcgtctgagtgccaaggtggctcagaccacccgtgccaaagatgctactggatcatttctcccctccttctctagggcctgcaccagtcgggcaactcgtgatggatgaccctccagctaagagggaacggccttcgggcaaaggttgcctgaggcctagtctgggagcatgctcagccacgaggtagagagccatggatgcagctcacatgcatctaaagagagcctttccttctgtagatgattagcatgaagagctcgatgatagcaaccctgacatgctctattctactagccttctggatttatccgcggtgagttgtacacttaactttgctcatttttttggcattattataggttgttcagccatagtgattgttgcatggagttggttagccaatgttgtgtctttaaggggctcgccaactttggcaacttttggggaagggctggttggctagttttgtcttttgacactgattttgatcttgttttgctttcaggcctttatgaagctgagcttatcatgtgacagctccagggggtcttcgatcgctctttgtgagctgataaagatcttggaggctgctttcataacaaaggaggctaatctcctggtgaagggccatgctttatctgagatagaggctcttagcctacaaaaccagagcatgatttctggtttggaggccatgcttggcaccaggaatcaagagaataacatgtaagttgctaacatttggagactaagctcatggtgtgtgaagctaaggacaacccttgatggccagcatgcgataagggacgagtatgtcagcttgtctttagaaatcatctatgagttcaagttgcgcaactccaatgctgatctttcctatatgggcgacttggctttcttagagagcacactggcctaaggcaaagtactattcgagagcaggttggaagcagcaaaaccaccatcaagctagaggggtcttctttggggaaatttgatgaagagatggtcggcccatctgttgaggaggtggccagctagggccatgatcaagtggccagccagcctatggaggctatgttcggcccacacaaaggtgatccagactttgtagctttcgattcagtcccacctgcacctacacacatgtagattcagcttattagttttcagcattatggttttatagtatagacaatgttttcatgttttgtatgcttttactttttgaacactactgtttttcaaccctagggccttcatgtttgtacttttggcctataggcactctatttttgaacattactattgtttagccctgttgctttttatcatggattgtgcaaccgaacgggcggtctttaatcctggctatcttcttatgggcttgacgtgtaagtatccaaatttacttttctttttgtcaagttgaagtatgtcggcacctgaattagaggcaggtttagtagcttatcctaagcattaaaatttctctgcataagttctctatgctagttcattgtacagtttgggtgccctccaagtgagcacacagacttgcaatctcttggtcacttgcaattcaccaagtttcatagaccttgcctgggaattttcttggggggctacctattgtacgcatgtggaactgaaaaaggaataactttaagaagttaatcttgttagcaagtagtttaaacatgataatttgaacataaatattgtattctattcattaattggtctttattgatgtgcaacttacataaatttaatctacacgcttacataacaaagttttgcttctagatatcaaatggctacccctggttgacttgcataagagaggtcaccgttgaagaacggtgggaagccacgctaaaaaggtcgtgggtactaactcttttacaatctaatgttgagttggtagaactgctactttatggtagtgttctgtaagctggttattgatagtatttgcaaaggtgctctccattccaatatcttggtaggagaacaagctccattgtctcattgtaccttcccagcttgtacgctcccttactagttatctttgtcacttgataggggctttcctaattgggtttgaacactcctactactgaatctttggtattcatgaacactcttcgaagcactaggtctcctatgaagaatttcttatccttaacttgcttgttgaagttccttgctaccttttactggtaggcttccaactttacgttagcttgatctcttctttcttctacttcgtcaagggattctaccatcaatatgttgtttgtatcttggtcataggttgtcctcctgtgagacggtggcaccagctctacagacaacatcgcctcatagccataagctagagcgaatggagtttgctcggtgatcatcttctcgatagtcttgtgcaaccataggacctctgggagcaattcaatctagttgcctttttcttcctcaaggaattttttcagggtgtccttgagggttttgttgatagcttctacctgctcattttcttgaggattgaccacgacagagaagtttttgatgatgccatgtatgttgtagaaattagtgaacatgtcactgtcaaactgctttcccttgtctaacacaatcttttgtggaagtccaaattaacatatgatgttcttgacaataaagtcaaggactttcttggaggtgattgttgtcaggggttcagcttctgcccacttgtctactatgactacaataaattgtacaccttcttttccctacgggaattaaccaatcaggtctatcccccatactgcaaagggccaaggagactacatcatcgtgagctcattgggtagagctcttagaatttttgagaatttatggcacttgtcacatcttttgaaatagtccattgagtcttcgatcattgttggccaaaagtacccctattagagtatccttttggataggctttgcccccccgcatggttaccacagaagccttcatgcacttttgtcattagtcgcttggcctgagccttggtgacacaccttaagagcagcattgagaagctccatctgtacattactccatctaggattggatacctaacaacttttcttcttatcttttttgcttcattcttgccttctagcaaagctccagtttgaaggcaagctataataggtgtcatccatgttggactctcgtccaacatttcaatttctttagggatggtaatgcttggttctttcatgagctatattggcactaggtttgccttgtcagcaatggtgctaattgtcggacgggcaagtacatcttttgtagcattctgttctct

SEQ ID NO: 18265 - DNA, 5311 bp, Cannabis sativa
atgtgatccctcataaagtagccgtcactagccttattaatcatagcgtaatagctgcaaaagaggggttacgccgtcacacatattgcttataacagttccaatacgttttctcccatgcggcattaaatgagaggtgagtgttcaaataaggtccagtacctcccggagataccttagcattcccttggtttccgaaagtacgtggagccttcacctctcctccgggaggcatattctcgttgacactcctgatgcaaaaagacttagtcgatttatctaatagtcgtacttcttagatccacgtgtcgttgtcatattgattcacgtattttgggcaaaattaagagcaacaatactaaaataattttgtaaatttccaataaagattttacacttataatgaactttgttcaattgagctactaatcataaatatattttccattacttctaaaaaaaaaaaaaaaatcctttaattcaaaaccacttcattctccaaaagctgtcgttgtctgatattaatgtcgtcgatctatttaatgtcgttttattgttgttgtcgaatgaaacccactgcagaacacctatattcttctgatcactttaaaatcacagaaacaccaatgagatttgtcgtttgtttatacacgcgtagttatgaattatgatccatgtgattggaaggacaagcttcaccatatctgagctttccttttctgtcgatttcattggtaagaagaaaccgcaaatatgaacactatttactagcaaaaatattacataaaattgtccgcagaagaaaacccatcactccccgactcagatttctagacctagtttcgttctctcatcctatttttcttcacgggtcttacactttatctcaattaggggataatttatggtaatgggtcgaaccccccatccgttataatgcttccattatcaatttatggtgtgtttcattattgggtatggttagctttttgtcttacattttgaattatataggcttgaatcttatgtaagatgggttttatgtccttagttttgtctggtagtaacattttgcttcagcatattctttaggtatctttataataaaatcctcttgcttagatttcatcattgaaaagtcttatgtagagtgcttgaaatctgggtcattgggaaacagtaggaacatatatgttcttttattcttatcagtttggattttgatcacagtttactgcaagctgtattaattattttcttcctaatttattgcagattgctttatatgtgggtcttgtctggcaaggttatggctttaaattaatttgttagatatagtacaatggagaagaaacgaatagatgattatgaacccggtccagttccatctccaagggcattggacagatttgggtttgtgaaacaggaacacaataactcatctgatgcttttactaagagtagatcagccagtgaacacgaaaggtgtgttttttttttattttttttacttgaatcatttatgagtgatttagtttaaatgattattagatgttctagtgaagagagatttcacaataagatgtatcaactcgtgattacttttgatgtttcttagagatgaaaggagggttagaaaatggagaaagatgattggggtaggaggcagtgattggaagcattatgtcagaagaaaacctcatgttgttaaaaggcgtattaggaaagggattcctgattgtttaaggggtcttgtttggcagttgatctcaggaagtcgtgaccttttgctgatgaatccaggagtatatgaggtaatattcatattcttagcttgtctgaatagatatttaaattatctgacttttgatgaattttgatcctaatggtgatcctggattgtagtcttttaaagtagtgttttgacagatggtaagtttggaacgtgtatgcttttgcagaagctttaaatttttatttctttaaatttctgaatctacatacctctacttgatggcacagaagctttacgtagtctgctcatgatgcatttctgagtcatctaaaataaaagtacccaaacttgcttttgttatgggcagaggttttcttaggtagtttaaacttcatcaatttcttgtagcagatagatcaattgagtaaatacttatagtggatcactttttcgaaaatcctggttgttttattgaagctgcattgattcatttttctaaaaatagaatcttttgtggagtgaagtttatgatatcatacttctgggtactttcattttttgctctgtttgatgataattggtgccaaatttttacatcttctatagtttagtagcatcaatattactttcgattgtgattaaggttactgccaaagtatgttcccataatgcttttcttgattcacggtgattctcttcaaatactatcagttcttttgctccctcgtattcatacagtagtgctcaagaagcttaatttttatgcagcaattagtgatatacgagacttcagcttcagaactggatataattcgagatatttctcgtactttcccttcgcatgttttcttccagcaaagacatggccctggtcaaaggtccctctataatgttctgaaggcgtactctgtctatgacagagatgttggatatgttcaggtttgttattttcagccttctctcttatttaccttttttcaagtggaatgctgaataaagtcattttgtttaaaaaaaaatgcagggaatgggtttcctggctgggctgttgcttctttatatgagtgaagaagatgcattttggttgttggttgcactacttaaaggagctgtgcatgctccaatggaaggattgtatctggtacttcaatcttatttttgtcacattatcctagtgtttgtgcttccacacatcttggaccttggcttgcaatactaatataatgtgcttaaggctccctaattagtagaagttcctatttgaattatgtagacattttaagcttttcctaggtatctcttatgatctgacaattctatttgttgtctttgcattccttgcttaattagagggtttctttgtgtgtatgtgtatgtgcatgcatgtagccatttaaatatatatgaaacctttttttatattcacatttttgtggacaaagaacagtatttttagtatcctgaggctgttaagtttgttcttgctgagtaggtagggttacctctggtacagcaatacctttttcagtttgaacagttggtgagggagtttctgccaaagcttggggagcattttactcaagaaatgatcaatcctagtatgtatgccagtcaatggttcataactgttttctcttattcattcccgttccacttagctctacgaatttgggatgtatttctctctgaggttggtttactatatcgctgtatctagtttctttgaactactactttcggttataaactcattatgcctatgccttttgaaacatttttgacagggtgttaagattgtgtttaaagttggtttggccctgttaaagtattgccatgatgatttggtgagcatgtcaagaatctttgtatgcttcagacccatttagctagtgtttcaatgcttacagatgcttgtctgtaacttttgacaggtgaagttaccctttgagaaactcatacaagctttgcgcaacttccccgaggacgcaatggaccctgatacattattacctatggcttactcaattaaggtaatattctgtttagctttctcaatcaaattatgttaaaatattcaatgctttacttctttaggaaattaaccttggtaggtaaaacaaaacaaacagagttatttattcaatcaagtttggaggaccatttgatatgtgcattaagctttgacttatatgagatgtattttggttaattcttacataggtatccaagcgtttagaggagttgaagctggagtatgagaagaacaacggaaagctcgttcgatctacagaattaggtcggaaataggaactttgctaggaaggcttgtattcgaagtggagttgcgcttaatcacgaacacacaataaaccaattctttcattctttgtcatgtaaattcatgcagtcatggcagctttacccggatcaacgtcttttcagaactctcatatttcttctgccaaaattgacttgtaatagtagaatagaatagtatagtctaaccatgttgcatagtggggcaatcttctattccatggtatgtcttaaaactcgaaacacaagtgtctctgtttcgttcggagtcaacatttgaaaatttctctatgaaacaaaacaaaaacatgaccaatgtttttgaaaattctaccaaggacagtgacaaattccatttgtgacccatgtcatcactttttcttgaagtgtgattattattattattattagtcaattaattaatgaagtgtgaaatgtcctgtgttgatattttgggttgttggaatgtattgaatgagctcatacgtgactcgtgcttagttataccttagaaaacagaacagatttttttctttttcttactcttttcttaagagttaagcagctctcgtatttcccgttgaagcttcctcacttgataacttatctactaagttatccctcctaaatgttctcgtctaatttgttttcttttttctttttcaatcaagtttccaaagtcttttggtcacaattataagtaagtaatttgactaaataaataaaatatcatactcttttttaaatttaaaagtaatctcgaatgacaactaccagcacataaataagattatgctaatctgggctttcttatccaacaattctggttctttattgatatagtaaagccttgtcagcacataaatgctttgttctttcctatcctgttcctgtgtgaccaaagggattcttttataaaaaaatatatattatttatcttctctcttatatatctaaccatattaaatatggttatctaaaaaaaattattagtttaatgaatttttatttttgttaaaataaatagttaaaattagagtaatttatggtataaatacttaattttaatttttgacggtaataatatttaagttacatttctgaatctctcgtaaatactagatacctagttgttaggtgtaagtcaaacagtcaaaggtcacgtggtagtccataatttgtccaagtcattaaatttttatttttatttaaaattaatttaaatatatcaataagaaaataaaacgtagataatgattt

SEQ ID NO: 18266 - DNA, 8790 bp, Cannabis sativa
gtgatctcgactaagacaattgtgggcatgagatagggtctcttcaaagtttgagagatttgattattcaagcacactcttggctctgtaactgttgtttgataatttgattctgtgttgctttccctgcacataaatttcacaaaatgataagtttgcatgagtataattgtttattaaaccttgctttgatagttccactaatccttgttcaccaatgtgccccattcgagcatgctataactgagtttctgatacacatttgtgtatagatgctgcataagcaggcatgactgtttggccatttagaaatacaagccatgcctcttagtgcctttcaataccagcataaatcctttggtgattctcatgactccattgcttgtcttgtattcacatccctcatcatcaagagtgccaaggaatatcagatttttttttaaaatttggtatgtgcctgactttaataagggttattatagttccatcaaagcttctaatagcaatagatccaatgcctgttacttggcacttgtgatcatttcccatgaccacatttcctctatttatctcctcataatcagtaaaccaatctctgttaggactcatatggtaagtgcagccactatccaagatccattcatcatagtttttctagttgtaggttgttgcagacatttccatctgtctggcttgcacaacaatcattcattacagcaaaaaaatcaccatctgagctatatgcatcatctaccactgcattagagtcatttgacttttcttcttcgtctttgtgcttctttttcttgttcttgatctcccaacagttcttgattagatgtccaactttgcaaaatgatgacatttcctagtttctttaggcctggatttttatcttgaatttcctctgaaccttgacttattccttcttagatttcttcctcgagcaaatagactttcatcctgtcttgattcttgtctgccagccttttgccaattcagttctgcatctctaaacctgagagtactcatgacatcttccagagttagagtgtctcgattgtacattattacagtcctcatctctttgagttgatcaggaagaccatttaacagaatcacagcttggtcttcttccttaattgtttcacccatgttagtaagagacaaaataattttatttaattcatcaagattttgttctaaagaattaacaacattcattttaaagccatagaacctccctttcaagaaaatcttggttgcagtagacttggccatgtagagatgatttaattttgtccagattccaagagctattgtctctccaatgacttgtctcagtacattgtcagccatgttcatgatgattgctgaccttgcttgcttcattatagtttcaacatcttctttcttggaaccatcagttcccttttctagtttttcagttttatcacttttctccgatcaatcttcaagagctctgcatctaattttcggtagattaaaatggccatcatcttttccttccataaactgaaatctccagtaccatcgaacctctccagatcaaatcttgttatgatgaagccattgctgtctgtttcttgagttcttgaatctttgatgttcttcagctgttgaatttgaagacttcttcttcttcctacaaatccgaagctctgataccagtgttgtaattcaacaacaaacaattcgataaaacatcacattaataattaacaaaaaacatgaagtttaaagcaaagagaaaagaacagagtttttatccagcttcggccaagaacagttacctacttcctgctacccctttaggtattcatttcattcattccatgatcaatgttacaatcatactggtatgaacacagcttcagagaaatacaagagaaacccaactctctcactcgagtactccaagaacacagcttgaacagtactcctcactctcttccactctgtttcttcactctctaaccagactaattacttctctatgtcacaatgagtaatagctaacatgtctttatatataggcttacatcacaacaaaaagcagaaagagtaacaaacttaactacccaagctctagagagtgtgaacataacaaaaataactaactgtccaagaaacttggaaccagttataacaatctgtttctattaccagaaatctacaaaattattacaggtgcaatttaatatcgaatctcacatttttttaatttaataaataatatataaattgttaattattcataatgcgtcacattagtacggtattaggtacatgaagtaccgcctaatagcaatgctcattttatattgtgtacatttttttttaaaaataattatgaaattgttcaaaacttttatttatttattaatttttaatatattgtattcttttcaagtttgtttgaaattttacatatgcccaccttccaaaaaaaaagaaaaaacatatgcccaacctaagttatgcttctagtttttcgcaaactcctaaattatgcctccagctttgtccaattaccgcctaactttgacagcacaacaagcaaaacaaattccttatatttaacatagtaaaactcaactcaactcaactgtgtttatttgatcatcaaacaagagaaatgggaagtaagagcataagtgaggtaggagtggacgacttggttcaggctggtctaaccactgaggaagccactggcttccaaagggtccttaaagactcactcagctgcaccaaagggtccgactccagtgaggtctggaggcacctggtggctcgaagagcgctcaagccttggcacccacatgggctacaccagctggtttactactctgtttatgctcattgggatgtctcctccaaaggccctccaccttattggtttccttctttgtaatttctcaacttgaaatgcatttttcattttatatgtctaaactaatgatttagtcacaaaattctaactattttagaatgaaacgtacttgctatatatatgattatgacatatcatcactcattttggttagtaaaataatgttacatttcaaaattgttatcatcagtaagttctgtttatatgtatcttaagtttggtgtacaccaaccgcttaagaaatatactatattttggatatgtcatcagcttgtactttcactttatttttaactgagtttagtgttgtcttcttctaagatatgagtctaaacatacaaacatgggaggcatcatggagaagcatggttcaagccttcttggccctttatataaggatcctataacaagttatagcctcttccagaagttctctgctcagcaccctgaggtaaatttgaagttttatttatctaagccttatgctgatgagagtgtttgttttacttttcagaaagaaaaaacaacgaaaaatactaattgtcttaacttaaaaatggttggtaggcttattggtctattgttctgaaagagctttcagtttcattccaagaagaaccaaaatgcattctagacagatctgatcttaaatcgaagcatggcggatcatggcttcctggctcagttttgaacattgctgaatgttgtttgctgcctactgcatatccaagaaaagatgatgatagtttggctattgtatggagagatgaaggttgtgatgattctggtataaacataattacactaaagcaactccgggagcaagtaatgtatgctctcacttccttaaccttggttcaggtcttgttaaatggaagaaatcattgataattgagttgctatgaacatatgtttcgctctacttctcatgactttgatcaattttgagtctcaggattctatttttaagagtaaaacacttacactaactcatcttgatggtgatgatttcctttgatggtgtttctatgatgttattcgcagctcggttgccaaggcgcttgatgccatgttttccaagggcgatgcaattgcaatagacatgccaatgacagctaatgcagttataatatacttagcaattatattatcaggtcttgttgttgtatcaatagctgacagctttgctccaaaggaaatttcaattcgattgcgtgtctcacaagccaaggctatctttacccaggtcaatatttttccttcagaagtttactttaacatttagaaaactaactccaatgaaagataatcccacttctccaagaaaagtctatctgcaaatatgacattagtttagcagccttagtttcattacagcataatgaaaagagaaacagataatgctgctgaaaataccacctattgtaatagcatccgaatgagtcacacacatataacaggtgtaatagtttagttttatcgtaatttggcaatgccatgatattttctgcatttgtttcaaactagttgagactgtagagttcaatccagcccaatcatatagtcatacaaaaatcaatttttcatcatagtaagtgatcaagcattggagaagcttttatttggcctgtatcatgctttcagttacagattatttttagttctttttatgcacagtatttgttttcttaaacaaaaattaaatttcaggatttcatactaagaggcagtcgaaagtttcctctatacaggtaagacaaactttgaatgtgccagaacttagctctttcttctgtacttaaaagtttaggtggtggagatacaaatacttgtgctaatagaattcaagaacagagagacaaaaaggtagtttaattggaaaaaaatttaaacaaagatatatatgaatgaagacaatggttctaaccttcaatgcacttcatgcaattttgcaaaacactaccagtaatctacagtttgtcttagctacaaaacaaatgatcaaacaattccaaaagaaaaggactactgaaaaaaatgttttctgatattgggttagtgattcttgtaatttactcattgcagtcgagttgtggaagctgcaccagataaagttattgtcctccctgcaattgggagcaatgtaggcattcagctaagagaacaggatatgtcatggggagacttcctctccagtgttggcactcgttcaaggtaataacgcaaatgaaagattcattatttattttaggaaaaattggaggataagtcccaaaaacttcaacttgatccagataagttcccaacttcgaaaattgatggtaatagtccccaagctcactatttttgtaagttcattagtctttttctatcagatccgtttactaattaaaaatgacacatgtcgataattattagtccaaaccatatttttaatttaaaataatttataatgaaaaaaaaaaaaactaaacaaattattttagttttatttcttcttcttcttattgctgctaagaatccacccagtttgggaactattaccgctaattttcgaggttaaagacttatctgcatcaagttgaaatttttgaggacttatgacgcaattttccctttattttattagaacatttaaatgatgttacccaaacatatcctagattacatttaaagtttttcatgctgtcatgtttccctttgattgcagaaattactcgccatgctatcaaccagttgacactttgatcaatatactattttcatctggaacaactggtaaataattttttttcaaggatcataattagtgctaactaacacacagttaacaggaattccattacttatttttcatgttcatcaggagaaccaaaagctattccatggacgcaactttctcccattaggtgtgcagcggagtcatgggctcatatggatatgcaagttggagatgttttctgttggcctacaaatttaggatgggtgatgggtccaattctaattttctcaagctttctgtctggtgcaacacttgctctctatcatggatctcctctaggctatggctttggcaaatttgttcaggtaacaccattaataatatcttttactgccattcttatctttattgtttttagatggtttagtaatggcgggaaaaagttggcaaaagtttgataagaaacatgtcatgcattgaacagattgttctagcgatacagatagaaagaaagcttttttgtgatcattaattctatacaagctttaggataattacttttctgttaatgagaactagcttatctctgcacttgtgatggagtttgaacataaaacagctacaagagaaaaagacaatacaagcattgtaatagacctgaaaagactttctgtatttcgggaagtggtttccataggcattggaattgacagagttggaggcctctcgaactatcttcacatttgtaactgaatactaacttcaataaataattctttctattcaaagttatgtactcattctctaattgttctaacttctcctctaattatttataattatcttggctactgtcatatctagatttaggatatagtaataatttttgctagatatcacatccaatcactcatctactcatattcttctgtgatacttttccaggatgcaggtgtgactaaattaggtacagtgccaagcctggtgaaagcttggaagaatacgcagtgtatgaatggcctagattggacaaaaataaagtaatcttctttttgaatgtttgctaagcttcgttgcatgctacttggaagaccagtaactaaagaatgaatttatgcaggtgctttgcttccacaggagaaacatctaatgtcgatgatgacctttggctatcttcgcgagcatattacaagcccgttattgaatgttgtggagggacagaactttcatcatcttacatacaaggaagtctactgcaacctcaagcttttggtgcattcagcacaacatcaatgacaacaagccttgtcatacttgatgaacatggaaatccttttgtaagaacttattcaatattctttattttttattggatttcaacttcaataatttggtagacagcagttttttttttctatgtaatagaagtcccaatatgtgtttgcaaagtcaattaactcacgaatttgtttgcttttttctttcttttctttgaccgagatgcagccagatgatcaagcttgtataggtgaggtggggttattccctctatatctaggtgcgactgataggttgcttaacgctgatcatgaagaagtttactttaagggaatgccattatacaaaggaatggtatgcttagaaatattctatttcaatgcacccagctctttaattgtgtgcagaaaattacatagttgaaacttatcatttgaaacacaagtaatactttgttgagtttattctatgaagtctttttatgccactcactcaaatgtgagaattctttgtcaagtttcatcttggatttgctttccaataagcacagtaaagatgtttctgtaaaaaaattgttacaacttcagctgtgaatttgcagcgcctcaggagacatggagatattatcaagagaactgttggaggctatttcattgttcagggcagagctgatgacaccatgaaccttgggggcattaaggtctggcattcaataagctccttacaaactcttttgcatggggtagttttatgagcttaaactattggtcattgctgacgtgaatactgttcttgatatgtagacaagttctgttgaaattgagcgtgtatgtgaccgagctgatgaaagcattgtagagacagcggcagttagcgtgtctccagttgatggtggtccagaacagctggttatgtttgtggtattaaagaatggatataactctgaagctgaaaatcttaggactaaattctcaaaagccattcaaagtaatcttaatccattattcaaggttagaatttcaccactttgtcttaatttaacagacactatagtactgcaatttcataaaaccataacaagatttggtttgtttgcacacaatacattttcatcattctttagctcaccattgatatgatttttccaacactcaaaattgttaaacaggttagatttgtgaagattgttccagagtttcctcgaacagcatcgaacaagttactaaggagagtattgagggatcaaataaagcatgaattgtcggctcgtagtagaatttaatggaattcactagcttttggtatgtatggagaaaacaaatatgtagtttggtgaagaaggggttcacgaagatcaaaattattaataatgatttttagttgtaagttgatactgagttattagtgtctgttaacatctcgaccaagtgtgggttttgttagtagtatacaactattgggtaccctcctcttttagactagcttttgggagtgagttctactcaagtagttgtatcaagtgatattagagctatgcatgatgcaccctcaagtgggattgatgttgcggatgtggggacgtcggcttcaaagggggtgtattgttaggatctcacattgaacaagtatgagattggttagtagtatataattatttaagcactctcctctcttatgctagctgttggggtgagttctatctgagtggttgaattactcctaaaggaattggggttctttagtgatttgtttatttatatgtaatagaaaataagaaatctaaatctaaaaaaataaatatcattttggattttatgttttgcaaaaattatagattggaccatctattttgttaaatgacaaaatagacactgta

SEQ ID NO: 18267 - DNA, 4472 bp, Cannabis sativa
agtttgaaatgccatcttaacaaatataatcaaggtcaggtaagctaacatacagcatcttggaacataccttttcgggtctgttcgctcaatggatatcttctttgcttttgaggggaggggaggctcacctcctaagaggggtttgacaaaatcaaggtccacagatgtttgggctatggcaattgtaacacctagatcgttggaacttgatgcaacacgttctatgcactcgctcgaacttggaaaatcaggaccataatgttctcgtccatgtcttccattcggcagatctttctctcccgggaatggctttgaaatattttcatctttacatgatagagaatctagagcatgaagttaattcttagtccagcaaacacttaaaatacttgatctttacattattgaatgaaaatacatacacacatatatatattgaacaatacttaacagttgtcaatatttactcaataatggttacatagatttcagctgttagatctttattcaatagttatgatcaatttgaaaataaccatacgaatttcaaatttttgaaaaccactataaagactccatatacatatacacgtataaagtaaaaaaactgggtttctcataagtacatctacagctctatcaaaacagatccaacattttaattgttttattactatgtaagatatttagtttataggaaacccaacccaatctagtttcaaccactagttgtgtaacacaatcttcacaaatgattttgaccttacgtctgtcgtgacatatagtgggaacaataaacactgaaattatcacgagaacataatatcctcaatggatttcatattctcagcagaactcaaacagatgcaagacaaacagacaatgcacaatattcaagaacagcagaatttgaaattgtgatgtttccagattacattgaggtttttgatgtaattgagaggacaccttgttctcatttatttcgtattctaaatagttattaacaccacatcctctgtttctttaagaaaagaatgtcagaaatgcggacggcagcaacttttgttaataagtgtgacacaatagcaatttgtttagctactaggaatgaacttgagacatctgcaaaagtcaggcttactcaagtccatccttgttgctataccaatgcccttggggcatgctgcagtctcatgtcaatatgaaatagggattcataccaaaaaaaaattgttttcattttctggttgaaagcctagaaaactaccttcttgttacctagttttcccaaggggaaaaccatagtgttaaggaataaaaaattaaattccatcatagtttttaaattaataattacacataagcacacacacaccaaaaaaaaaaaacatacttggaatattcattcttagaatgtaactaaacaagtaaaaaatagtcaatactggaaagacaattggaaaacctgctccaaggagaataatcttttttttttttcaaaagaggttataaatgaacttatatgcgaaattctgaaatgggatatgagttcttaagatttggagtatataattttattttatttttgtcaatatatgttatgctatcttttgcataaaataatatcaagccaaatgatttttcaatgcaataactcagaggttatgagattgttaacatcaaagttaggatcccaccctaattagatttgcatcagtaaagaacataccatcatccttctccaaagcacccgtttgtacattttcactaggtgagtccaactccaagaattgcacattaacattattttcattctgaacaaggttccttcgccgacaccttcttcgttttgagctggacaaacaatttttttcaccttctaaactctcaatattttttaaaaagtataataagttataatctaaagtagtaagttgtacccaaggatttcaaaccgaccagaagaagaatgtttgtagctgtggcactgccctatctgctatggtctgcatggaaagcatattaccaaggtagtataagcagatatcttgaaaagtaagaagagaaaaatatatacatgtcagtgcttttcaattactaaagtagaactgttgctatgttttcaaatgtttgacaaggcacaaatcagtgggaaaagaatcaatagaagcatacattcaagatacagtatgatgttattaagataatgtgatgcctgttcgaatatattagctgtgttaattgtatttgggtagtttcctatttactctatttagttagtttcgtatttactctctctaattttgtatatatatacatactattctattaaataaaacacgcaattcattcactattttttacatggtatcagaacaaaatttgaaatttgaaatttgacattagggtttaacccaaaattgaggtttgcaattagggtttgttcttcatctatcttaaggttcattttttgggaaacacatttagagagcatgtgagctctcaccgtcgccaccaacggacaacccaacctacaatcggctagtcgcaggagtttggtgcccaaaaggcctacgagtgggccccacgcgccgcaccattacgttgccactgttcccgggcgtcgtcgtgtggggccacatggcactttccaaatcactgtttttcttctcgtcgttctcctcgacctcccatatggtttcgttgtccatttttgttagtacgccttatatgcttccctgatttgtgcttgtgaaggtttgagttctcctattttggttgtgagatttggattgttggctcattagctcattttgttctggcttgtctcaatttgtttgctcttttatcgaattttttggttggtttattgttttgagttactttgattggatggacataatatttgtaatggcttctagaagaccagttcttgtttctgcagttgaatatgccaaattcttacagtatcaggagtctcataagtattcattttcttctatcactactattgttgattcaggtatatcaaattcgtgtcttctttcctcgtcttcccaattggtcattgattctggtgctatagaccatatgacaggtaattttagattcttttctaatcttcaacctcatgcttccacttctactattaccttagccgattgtttttaggtctagtacaattactcctgctccaatgattcctttgtcgtttgtcttacatttgcctactttttcttttaatttgatctctgtcagttaacttactcgtgatcttaattattgtatcttcttttttcttattgcttatttcaagatcttatgacgaagcaaattattggtaaagggcgtgaatctggaggcctctacattcttgatacaccaataccaaaatcagttacttgttctggtgtacaatccccccttcgaggcacattgtaggttgggtcacccatctcttcctctgcttaaaaacctttgtcgacaatatagtaagttgtcttcatttgattgtgaaccatgtcagtttactaaacatcatcgccttagttcaagtcctagagtcaataaacgtgctagtgttccttttgaattagtctattctaatgtttggagttcttctcctatcttgtctaaacctaattttccttattttgttacttttgtcagtggttattcttgtttcacttggttgtttttgatgaagaatcgttctgaattgatctctatttttcgtgccttttgtgctgaaattcaaaatcaatttaatgtgtctattcgtactttgagaagtaataatgccaaaaggtacaaatctattttatttcaatcttatatggctcaaaacgacatgcttcatgaaacatcttgtgttgatactccatctcaaaatggtgtaggagaacgaaaacatagacatctccttgaaacagctagagctctcttatttcaaacgcatgttcctaaaacgttttgggtcgatgctgtttctactgcattttttttaattaattgcatgccatcttttgttcttcatggtgaaattccttaaaaaattatttttcccaataagccactatttcatattgagccaagaatttttggtagcacttgcattgttcgtgatgttcgtttacaggtaactaaattagatcccaagtcattaaagtgtgtattccttggttattctcgtcttcaaaatgggtataggtgttattgtcccgatcttaataaatatcttgtttctatcgatgttacttttatggaaaatactacttatttttcatcttcacctactcctactcgtcaggaggaggatgatgatttgttggtatattctatcacatcttttgcactagacacatgttctgacgagtctcttgttcccccacctgacttggtcacagctcctgacatgcttacacctccgcctcctccacctccgcctcctattatagtgtactctaggc

SEQ ID NO: 18268 - DNA, 4634 bp, Cannabis sativa
  modified_base (4576)..(4579): a, c, t, g, unknown or other
aactaagtgttagtttactgaaatttatttacaagaaacgaagtgttgggataaaatatattaagagataaaatagtaattttatccatactcaatataaaccgtctaagaagataatttattaatgtgattaaaacaatgaatatttatactgtatctatattatatatatacaacgttttataaaatcaagagtactgaattccaagtttatagtggattcataaagaattaataaattataaagttgatttccagagactaaatttaggcccacaaaataaatttaacaaataagtttagcgaccaatttttcacaataaaatttagatactaaaacaaaaaatagacacaaactgttcatcattaaaagccataaggcaaggaaatacaaacaccaatcaatatacataagaaacaaagctggactatattatttatttatatagatatatagatatatagatataagtacatagctatgtactttcatgcatggagcccagtcttgatatatatagatagatagtttcttatatatatatatttgtcacacactacttaattaataattgatatgagaggatgatgagtagtttcatcatcattcttcttaggaaataaggcgtttaagacttgatttcttgggacacaataaccagagcccatagcattgcatagataagggtaacaacactcgtttgacataatgttgcacttagaaccggctggtaaacatcccggaataggcacacattttcgactcgcaccgattatgggaccttcacattgtagtcctttacaacaaatcttcatttctgcgatgtgacagtattccccggccaccatgcaacgatctgcgccgtagctaccctgcaccatcatcatcatcatcacaaaaaacattattattgttccaataaacttcttcatcctgatttttttagatatattatatatgttatatattttatgtgtaaatatatataatgatgatgatgattatgaatccctcttttcctttgcttttctatttataggaaaatttaaacaactgttcatgattgaacatgtaccggccaactactacaacaacattattgattattaattggatcaccccaaataaaatatatatcatcaataattcaaaatcatataatcaatattaaataaacgtaagtatattgagaagttataactcaatatgtaacatattgcaaacatgaataattcaattaattagttgtccatagcttgctacttctagtttcatcaagctataaattagataacaactactaggtagtctttttcacatgcttataaggggcgtctttaggtgtcaaacacactacaaaggtgacatactgctattgatataatttattatcgggtctccaaatgtatatactgtatatattattactaaacttcagcaccaaaaatagcctgcaccccattacattttacttccatcaacccttataaattcccaacccgatatttgtctatctgtgtagtatttttaggaattacaaaaatgatactattctttacattagttttgattttatagcctcctttagagcattggtttcacaaaatttcatttcggttctaccttagttgatacaccaaggctgctatggcaacagcacaaacgtgtttattgaatatcccaatgttgcaactgttgaagcttgagtcctccatcgcagctagtttttaatctccacaaaatatagtcactgtaaaaaaatcttacttttagtcattttttgtgactataagtgaaaaagttgtgactaattataaatcatcattaatatttcttatgttgtgattaaaaagtctgtgactaaaagtattagtaaaaaaaaatcaaaatttgttgtgactaaatgtacatttttagttacaatatttgctgcgacttaaactaaattagtgacaacttgtatctaaatatgttttaatcacacataatttttattgtgactaaaaggttatcactgaaggtaatttttgttttttttttctttttttgtagtaagtatcatcgatggtcccacacattttcattaaataaaggataattttttgtaaaactatatgaattttaaggtttcatacgttaacccctttactaaattttttggggataaactatctaaactttatagttttgtcatcataatatcgatctattttggtctattaagtgtcaagatagactactactatatacacgtgaaaaattttcatttgttcatatgatataattaattattaaaaattacaaaaaatatttaatttttctttataaaaaaattaaatagataaaatattttttcctatttcttttcttttctttctttcttcttcctctttgtgtctaatttccaccatcgcactactactgctatctccactaaaccataccattgttaccaccactaccacaaccactattaccctaaatcaacacaaaaatcaaaaaaatagggaaataacataatcgaaaaactccttcaaaccagctaaaaaataatctcccttcacaaatttgaacccctaaacagaaccaaaaacctacaatcaagtctagatctaaaatcgcaaaacgaaacacaaaatcgacaataaaaatcaaatattaggataaattaatctcaaaataaaatttgaatacttgttaaaggttggactaaattgctgaaacagaagcagatacaaaatccttgctaatgattctaaaataaaatcaaaagtaaccaaaatgaatttaattttaactcttcaatatttaaacaagcagatcaatactcatactttctcaacaaattgcagcaatatacacaaaattgaacaaaggaattaactctacctactcaaaagctagcttaaaaataaaaataccttgtagagattcatgatagagaggccaaagtagcgtggtgccaactgtcgaggaaggaggagttgtgtggtgccgactgtcaagagaaatgaagagattgattgagggtgagaggcgcagagaaagaaggaatcatggttaagaggagagtgaggaagagagagggggacgatggggagaaagaaaaatgaatgtgagattgatatgaaagtgagaggctaatcgagagacttagacaagagaaaaggagtatggaggccgaggagttgggatgttttagatttttttattagggattcgctggggttcacctgagcaatcaatggatgcagttagttgcagttagtggttcggggtcgggttagaagaaaagaaaagaaaaaaaaaacaaagagaggtcgagagagagaagacatagagagatagagcaagttggggtttggagggttgcctaaccacttacaacgtgtcacatcaatatagttgttagaatgtgtgtgtcttgaaatatgtacatgtccatttaagtgtactactagttattaagttgtaagtacgtacaactgatttaaattgctttttcgacagttaagacagttagtactttaattttagttagctaacagagtgacatacttagattttaaagtattacacaattaataaaacaaaggaatttcgataatattgtatgtgtagtttggttctgtggaatatttttgtgtgttcttttgaaatctcttgctttgtgagatagaaacagtttcttacaatagtgctggaaaccttgagatgcctaataataatacttgtaaatatggatatcacttattttatcattgattaaagttgtatccttatctaatggtgtgttactggtgatctactgttgttttgagtgattttactttgtgttttaatggtgctttataaaaatacagtatttttgaaaaaaaattcatatgacattaattttgtaaaagttaatttaaattttagtatttttgtaagtttccctaacaataatctaattataggtaatttacaagatttgaaattatttggtgttaattgttttatagcaagatacaaacatatatttattaacttttattattaattattattaatatttaaaaaaatttaaatatcttaaatatcaaacatttcctaaaaatagttgattataaatgagtatgtactttctagatctaatataaaatataagattaagtgaatcacgtggttcaagatccaagaaccaattacgacaacatttattattttttttattgaatgaacaccatttgttaccggcattgcttttagatatcagtggtatttagcattttctcaacatgttgtattgtgattggttagcgatttttcttaaaaattattatattaaattatatgagactatgcgatatttaattgaactaatagcaatattgatatataggaaagtgctaagcactactagtgccttttagaatttctcatttgttattacttcatctaattgtatattaattaagaggattgttattaaatatggtgtatagttctatatatttatataaattttgatatttattattagtaatataatatttaagatggtaataggtcactacaaaaaactgttacttnnnntgacaactttttagtcacaacatattttttttttgtgactaaatgcgacttttag

SEQ ID NO: 18269 - DNA, 2361 bp, Cannabis sativa
ccttaatatatatcctcttattccttcacgtcaaaagttgaacttcttttttaaggggaaaaaaagttggaactttttattttccctaattaatataaaaagatcttaactttcaaacaacgaaaggtaatatctctttcttcaaattttcttctctttcctttaaagtgtgcaaattattaataaagattcgatattatttggttgattaattataattattaacaataaatatatttatagcagtgattaaaagaatggagaaattaaacaaataattccataaaaaatcaaataattaatcggccggtataattcaaagagaaaaaaaaaaaatccaatgatcagttctctaaatatgaacatgagtaatgcaataaaataaaattaatcaataaataaattaactataaaaatccgcaactacgtcgatgactcgatcccgatcctatatcaacacaaggctaaataattttatatatatatatatatatctatagaaaacattccaaggtgggaggagccttgaactgcatctttaaatcataataattcccgggaggagccaaatgcaaatccaagtccaaatccgcgcaaactctcttgctgctattcgatttcttcaacactggaacaggaggcgcgtgatgttcacgaccattatcggtcgccgcagcttgtctatgtctcctcatatgaccgccaagtgcttgtccaattgcaaactcaagcccacagatagagcactcgtgggtcttgggcttcggcggtggctgtgggatgccttggagagcttcggagagcttcggtttcttatggctggctctatggccacccagcgcttgaaacgacgggaatgttctgttacaagtcttgcaagtgaacacacgctccgacaacgactgctgtggtgacgattctaatttattggtgtcgacatcggagtcagtttcgcctattttggacaataacatcaaacaattagccatatccaagcttgactcaatccgacgatagctatgaatattatcatcatcaccaaaagtatggtctctttctctcttcaacaccatgattctaatttatgttttgggtttcaaaaaaaaataagaataaggagaattcggaaagttttttttttttttttcttatttgggggctatggacggcgaagtagttttagaagaaagagaaaatgaatattgaatggaatgaaatggtgttgaagtgagtttggggggactatatatagggatgggtttggtttggagctgaagaagtttgacttgatgatgagataaagaaagggaaagaaaaagggtattgtcggaaacggggttgcgtgttttcttgaggtctaagaaagcgtatagtaaggggttttaggtaaatttaagaaacatatggtttagagtgattaccgctttgtttcattggtacgtgcgtcaccgcgttgatcaataaggaatatatctttggaatgaagtagtcgtttgcggtgagctaatggaagttgcaacctttgttcttctctattatagtgctcttttcctattctatgctctatgttctcttgactattctagaaatattctactccccaactcgcatttcacttccgcacctcacgcgctattctttagtttccttttgttttatcttatcctaattgttatgagtttctatttttttaatattattattttaacatctttatcttgcagatacccgattctttgaaattaattttttaaacaaattcagtttgcttttttaggcaaacaaaatattaatgtaggtgaatgtggttagtaaaatttcatttttcaccttctattattattagtttctttatttcacggttgtcaataataggaaaaaaataatcaatataaacatgcaaactaatttttaatcaatctgtttttctaaaatatatttttatcccattttatcaaaatttaattctttcaataacatgtattataccttcacttttcaagtaaaacttgaaactatattccatgtaaccaattttctgaaatgtttcactaattttactaatattgattttttattaatttcgaaataaataaaagtatgaaaaatggattaaaataaaacaaagataaaataaatttattaatttaggttaaactttaacctggctaattaggatttttttctctaaaactttaacatgtactaaatcatgtcccttttgttagatttaaggatttttgtcatttcattcaattttactctttcagtgatggttccccgaactttaatatctaccaaatcatgccccttaaactttgatatgtactaaattatacctctgaactttcatccatgtta

SEQ ID NO: 18270 - DNA, 2933 bp, Cannabis sativa
attattattattatcatttgtactattatctatatttgtggaagtaaatgcagttttggggggtgttctgcttttttagctactgtttataaaggttccctttttttctgttttgggttttaaggctattaacctctttttttcccctttcagtgagtttggtctagtattgtacttctagtacttaatctattctactctttttggatttctggctctaatttgatgttgattatgttctttgatgtacaaattataattgaccatttttctttttgttcaaaagctgggatttttttttctttggctaatgaactttagtcttcaactgtcacaagatcttatgttcttgttttgttttgtatctttttcccctttggctgggatttttatgaaagattttgagttttataactctattacatatgcaattttctatagtggaaaaaaaaaataggaatcttaaatgacttgggactattggtaagttatttttttatgtcataaggcttgaaaatttcagggctttggatttcccattttagttcatttgctttgaatggaaggccattattaatggaataaaaaggaacaaaaaattggtctttagagttaattactgaaaaggaaagtgttttttgctgttaggaaaatgaggatttggagtttgtttcttctgtttttgagttattttcccattaatattagctatagattagatccatacttttactgaagatttttgctatagtcagactaacccttttctcaaaattaagtgtatgtatgttgctttgcttttttacatgtttaattttgccttttccttttgtatgacactttctttctaaaaccaaaagttacattttttatgaaatataactggactttatgctttgttcttattcatcatctgtttattgacaatttagtctaaatgttggttcttgtaatgttgttcttttcatcctcaaattggtctaatctaatcatagaaatccaagtgattagatgctctgcaaaattcatttgcaaggacacaaagggctcaattgatttagtggtttggcttatgattcacatagtaacttcacttgttgtacctcatggtgttggtggctgaatgaaccctattaaagtctgtcttttaggccataaatttattaactttgcatcatagacatgttccactattcccatacatatgatagagggcaccatagggtgtatttattatcatgttctgctgtagtttttgaactgaggtgaacaagttgagaaaattaggcaatcatttcgtttcggtctaatagaagtttctgctaatgagacatttttttttgtgagagtgcttagacatgaagttgttgtacccaattgaatcttagattattgctttgttgataatacttttgagtgaatagaacatgtctaaattggtcttgaatccacttgttttaacaggaaagtgataagtttggatcaaatatgctatatagtacaaatacactaactgaatagtgaaagcattttttatgtctctatatactgtagtaatgctttatgacatgtattaagtgctccacttgttcaagtttttcctctttatttctctcactctctagtttcacatgaacataactgattctgtttcggtatgcagggagagaattagctaacgattagccgttgatcttcggttcttgttgtgattactcaactactaaccgagcttaaacatgttaacaccagacatcaacttagaatgtgaaaatgattcagatgtgagcagccaagtagcttctaacgcggcttttcatgactcgtcccctaatgtgtcaaaggacagcaccgctggctcgtcctgtcttaccaatattgttaaacttcaagaagattcgaggcctgtttccctcgatttatcgctgcagttcagctccaacaacactagtactgatgttgagttgataaaaggagggaggggtgagagtagtagcaacgatgttgctactactcacacttcagtaacaacaattccaagagtcttctcttgtaattactgcaggcgcaagttttacagctcacaagcgctcggggggcatcaaaatgctcacaagagggagaggacaatggctaaaagagcaatgaggatgggaattttctctggcaggtacactagcttagcatctttaccacttcatggttctgcttttcgatcactaggagttgaagctcattcggctgtgcaccaaagagttatgccatcttctgagaggatccccgaaattgcaagaggtggagctaagtttcaacaaggttactatggaatgccaatgttcatggaagacgacgaggttgatctgttttggcctggaagttttcgacaggtagatgagggcgtcgggagcagtttggaagttcaatttggccaaaattccaataacaatatcgcgacaaagctgccacgagcaagaacaccaccgagaacagattcaacctcgcctgatcttactctaaagctctaagattagatgatatttttaagagtttaattttagaaagtgttgccagttatgatgtaaactttgtacagtgagattgcatttgtaaggaaaggctgcattttcctttttacttagtatctgttgtactttttctgattcattagcttatgttcttccctattattatatgtataagaagttttgaaattgattattattaaggattgtgataatgttccaatcaatggtatgatgtttgaattttgatattggtatatgagtgatttgttgtgatcatcctatgttgttatgcttatgagatgtcaaaacatcattttagttattacttttatatggctaatttgagaactcaaatgtatgtgacataaggggaaattttaatttctaaatatgacaattttttgcctt

SEQ ID NO: 18271 - DNA, 3390 bp, Cannabis sativa
taagcacatcaatgaaaatattacttattcacattccaattaaaagtataaacaaaacacaaaattatcattgaagaaccataaagttataattgatatgatcaaatagaaatttatactacatttttctttcacttactttgaaatgcaaaagtgaagtttctaataaaatccttacatttttttattgtgcactaaagaaaagattaaaaacttgcacaagcatatatcatcaacattgtgcaaaaatagctaatgtacaagcaatgaatagaacatttctgtactcacattgggactatactcaaatgaaaatgtacacacataccattcaaactaatccaattttgttaaaaaaaaaacaacaatattgctgctatcccttttcgggttttcaagttcctctcattttctcaacgatttgcttactcttttcttctatgtgtcgccttttttcttccaatttctcgcccatcttcttaccgagatcaagcatccttgtccttcttcccaacctcttaggcctcgagtcatcctcttcgacggatgatgacatactcacagacctagaagagaattgagaatcggggatcttatcgtccttgcctttctctgttccatttgtttcgtcaatcctcaacaacggggttgtcaactcgttcatagtcctattggatggattagtgggagtcgatggatgtgatacaatatctaatgattcattggtacatggaacgctttcaacagtctttagagtttgattattgcccggagaatgccccttgaaggatccccgattagcttctgtcttgagtttttcttcgggagattgatcgttaagtacatcattagcattagcagaatcatttccagattcttgattaagccatacgaaaggagatacctttctcggcacccaatcatccttttctgccaacatccaaggaatacatacactttcacagtttggaagcactagagtatcatggattgatccctgtaatcaaattccataagaagagttcatatcaattgaaattaacaatcgaaatggcttttgagtttctcaccttaagccggctgattaagaacaaagcaatatgcccatttgaaattttatgttccccgacagatgaatccaacttaaaatcaatttcaggcatggatgtaaacccgaaccataattgatccgaaggtggtggctttatatgtacccgcagtgttcctcgaagggatgctacccttatcgccaaagatatgggcaccttagtaaatttaaacagttagcaaacgaaagagcgcacatgtgagtgtgtgtttgtgtgagaaaagagcgatcgaaagagagaaagagagatttattacaaacctcggaaacctgtttagcaatagaatttacaatagatttccacctggaaccataagttgtagctgaaagagaacttttagagcttttcaatttatctgcattgcattcaatcaattgaaaactgtgataacttatcattactgaaacagatttcaaatcacttaatatgacacaagacatgtttacttttgtagcaagaaacagatagtcagatgcaaatattgaacagaatcatatacagataatttatgcatgtctttgcatgcatatcatagcatgaagggtaaaagcgaaaaatgaacatgctaagagtgtgttcggttacattggcctttgtaatttgtgatacatcacgatgttgaatctataacagttgtggagcaaactagaacaatacgaaatattcaaatgaatcgatcctaggacaatcacaaagtttctatgacaaccaaatcttcctttaattatcctattactcaatcgttcagtcaattactcgcttcttacgtttaacataagtgtaacaaatttgtacagtgaatgacttttgtccaattctgttcagttttactaacgtagtgattgttcatgtaccaaatcgtgtccctgaactttgacatgtagaattttaaatccaacaatctcaatagttcgggaaattttttttaacagattgaaaaagttcgaggagcatgatttagtatatgtcaaagttagccaaaaattattcatatgtttacaaggagttaatacaaacctggtttaggatcactatcctctttattctctgcagcatcaacagtcccttcagcaagatttaactgctttccataatactcgaaaccttcaagaagatctggcgatacatcaccaacagagtttgaatccaccgtgctcttttcaggatctagttcacgaacttcgagtcttgtttcaatgcctaatatcgcaccaccagaatattcaatgtcgacttcaaaggcccacacctcgctcatctccgtgggaagaaccctcataccgtgaatataaggtgggatattcccaggattaacattggtacagatgacttcaccaatgtaagcgggtgttcgcatattagacagtgtcctctgttatacaaaaacaacattatatcaatgatgcatctttaaaaccagacaagacattgtatacaatgcaaaaatatatctacacaataatggtaaccagcaaacaatccatgagatttgctaggttgatcataccccccgaatatgatgcataggcgataattaatctaatgagcgttcatacctgaatacgtgcttgcagggatttaatcattgcttcattttttctagcatcaaaaaagagccgcgagattaacaaattccaacacagagttccctcatcgatacaaagtctttcatcaatgtccgcctcagatacagcagaattttgattttggctactggaatgagataatgttgatgatgtactattagtatcttctgtcgaatgcttaactgtatcaaccggaggagcgttctttacgaagctagtgccaagaactgaatcctgatacgaatgaaatttctcccaagctgacttattttctagaccactgcccttagacgcctttttcgcaatcttcttccacaatgtgcgaaccttcgaggatgcaccttcagttttaggcgtcctatccactaaatcagcagcataaaaccccgctgatggtttcatgaacgaagggtaccccacatttaaggaagtcagataattgcgaaactctttttgcaacatcacgagtctatcgattttacttttatcatcacatgatgccaggcgaagagctctacaccatgattctttttcccaggaagtgtcgaggtaaatgtagacgattttagaatccttgtaaatagcagactccttgttttccaatttgatcggaaatcgtttggccctgaaaaacacaatgtaaaataactatgtacattaacaattacatatttaagaacataaaataaatccta

SEQ ID NO: 18272 - DNA, 7188 bp, Cannabis sativa
aaatagactaaaaaattcttttagatgtgccgaaataagttaagaatgcatcagtgcatctattttaaggaggttcatggtataatcactcttaaagaataataataaaaaaaattaatttgtaatgatgattgacagtttgatttgacggttattgggacaaacaaaatactataacctccctctctttctcctgaccctctttctcactcttatttttcatttctgtgcatttgaaatggtagttctttctcaatttatctcttcttcataaaaaaaaaaaaaaaacattttgtgtcatttttttacaattatgttccactgactcatattcattaaggttgttcgtacttcagaatgagttgaaaatactaattcggcacgtaaagttagttcttgaaagacttggttgtgatgggggaactcttgaatgttaatatatgtatttttttttgctgatgagttactttaaatgagattgagtagctgatgatgagtttaatctgtttcaaatgtgaataaatttagagagtaaaatattttgtcattgaatatttggttaatttggttgcttatcatatatcttactataagtattgttgtacgtgaggctatagactttgtttatttttggacatccaagctagatttatcgtatgatacttatagaactagtttgttcttcaaatctgatcataaacttgctttttcatattatgttgaagtatagatgaatgagaatttaataatactatatgattttgctcgtacatgatcttttgtaaatcacgttctctaataattgattaaataccaaacttatttagttttgtcaaatgatttatttttacatatatagtagtacaatctggtgtaattgatttggtggtacttaaaaattgtataaaattttatgataaagatgtgctacataatttgaatcaagttttggatggtgagattctacatgagccaccattcattttgtatttggcatcattctgaaattcattataatgtgctgtggggatttatgaaataatgcaaatataattacattaaaaagttcttaattgttttattttcttattgcataatgttgttgtaactgaagaagtaaaatggtttgcataagattttcttctctttcatttcattttcatctttttcattttattccgcagtactctctcatttcaagttgaaacacagactaactaagaaaagactctcaaatatcaaacaacctgttaatgagttgttacttccctcttgcatgcgaggtacattttttatttttatttttctatcacacattttttaggttgtcattttttttatatatatatataaaattagtatatgttatttatttggttgtgttttctttcattttgtagggtataacgttcctaatccctccaaagttaaattaatattgtcatcctcggcaatgtttatgattttgtttctatttctcagagtgcaactccaatgcagttggttgatttattaatgttctaattaaaaaataaaaaaataaacccgctaacgtagctagcgttggagcgcctcatattgacaatgaatttgtttttctttttcttttgttgacttttaattgtggaaactgatgagattaattacttataaggtgtttgaagaacattaagctagctactaacgatggtctcactcaacaaacttgtgttcttgtcttcttatttatccttcattggattccatatggacgtcttatgctgggaaaatacaaattacacgtttgaaaaaagtttggattatgacattccactactgggattgtataggtgtcttcattttgttacaatttattaaagatctcaactgtggaatcttttacttggggggtgctctttgtataatacgtcattatttttatgatgattttttgtttaatctgatgtattttatgtcttttttagatgcagatttattctcatttgttgagtatcttcttaacgggaaggagactccaagacttgatttttatgtagaatgtcatatatatagacttatttatttactatatatatatatatatatatatatattcatatgcaatgaaaaagtaggtgtgtggatattagagtaaataagagttctatattgataatagggtgttgtttgtaaagtttagtacatgtagctttgtcataaatattttcttttctttttggttaaaagtaaagcatctagccgttgatatacaagcagtggttatgtacccctaaacctaaacaatatgttgaatgaaattctgaattcaatttaatcttgtattacctttcttatattccttaatcgatgattttgaagaataatttaattaattgtaatacatcacagttttaaaagagaataaataagcatgccaaattaatacggtagatacgttgttgatattgaaaagtattgaaaattgcaaccaatattagtaactctgacagcaatcttttcaataactccatgtaaaaataacaaagaaggaaatagagaaatcataatccttaccacaatcataacaacactttaaacttgttaaggagaatgtcagttaggttgtttgaactagttagttgtgttagttatttttctgttatgttttgtgtccttgctgtcctatgtggcttatgacagctttgtatatatataccttgtactcttctctaaatcaattaatagattcaattctctgttttctgttcttgtctctctcgttcttactctttctatagaacttaacatggtatcagagctgtaattcgttcaacaatggaagcttcagcaaccggcaatggaggagcatcaagattgaaccatgccttcctccctcgttccaatcctgtttcgttctcacattctttatcgattaaacttgatgaacacaattacgtgccatggaaacatcaagttcttgcatcaataaaaggaagtcgcctacaaatgttcttggacgccaccaaaattcctcctaaatttctcaacacagatgatgaagacaacaatattgtgaactctgccttcgaagactaggagcaacaagataacttactggtttcttggtttctctcatccatgttcgagaaaataaccaatcgtatgatctgttgtgagactactgctcaaatctgggaagccttgagtgagtattacactgccctgaattctgctaacattggtctttacaagactcaactcaggaacaccaagatgactggttctttgaatgattaccttctaaagatcaaaggcataattgatcttcttgctactattggtcataagcaatctttaatggtttgcctcctgaatacgatgtatttgttacttctgtaacaacaaaaaaagagtcttactctgttgctgaaatagaagctcttttaatggcacaatcggttcacattgagaaaaacaccaaagccctggatatcaacaaaagtgaagccaatttagcccacacaaaaccagctcagaggagttttgccaacagaaatcactttccaaactctcaaataccaacaggttatagtcgtggaactccctacaggtatcttgatcccaattctcagatgcaatccatgcatcgaaacaactactctaatggtcgtgcccaaacctctcacagtggtcgaggaaactccacatctggtcgtggtgcttcccaatcctggacacagaaacattagtgccaattatgtcacaaattgggacacacggccaagcaatgtttctacaggtttgacaaatcattcactggtcctaagtgctttggacaattccctgctactgctaacattgctgaaagtcaagcatatattgccacacccgaaactgtccaagatgacagttggtatcctaactctggggcttctcaccatcttacaccaaatgcagccaatattgcttccagcagcaactacaatggtcaagaacaagtgtttgtgggcaatgggactggtctaggcattgaaaatattggtaaccctatccttatctcccctttcacatctaaggctttatctttaactaatcttctccatgttccttcgattacaaaaaatcttctaagtgtttcacaatttgctaaagacaattctgttttctttgaattttacccctctatttgctatgtcaaagaaatggattccaagaagatatttttggttgggaagcttgagaatagattgtacaaattctcctccacacaactatctcatctacctactagtatcagtcctactcaagaaccgtctcctcctcactattttacaaatcatgtgtctaatgttgattctcaatttgctttatggcacagtaggcttggccaccctactgctagaattgtaaaacaggctttataatattgtaatatcacaatagatcataaaactaatgctgatttctgcaatgcctgttgtcttggtaaacaccacaaaatgccctttactttttccactactgtttatcatgctcctttacaactcttacattcggatctatggggaccagcccctactaactcttccaatggctatagatactacattagttttgtggatgcttactctagatacacatggatttacttgtgaagaactaaagatgaggccttacccacttttaccaaattcaaaactcaagttgagttacaattgggacacaaaatcaagacttcacagtctgtaagggaggtgaattcagatcattcaccaaccttcttgagcaatgtggcattgttcataggcttgcttgccctcatactcatgaacaaaatggtgtagttgagagaaagcatcgacatatagtggaaactggtttgacactacttgctcatgcctctctacccttaactttatgggatgaagcctttcgaactgccacttttctcatatttcgaatgcccattgctgtcattcaaaatatatcaccactgcagaaactttttcactccccacccgattattccctactcaaaacctttggatgtcaatgctatccaaatcttaggccatacaatagaaataagatgcaatataggtccacaccttgtgtgtttcttggttatagcatgtctcacaaaggttataaatgcatgtctaaagacaaaagaatttacatctctcgagatgtaatcttcaatgaatatcaatttccctatgctgtgtctcacaaacaaaccattgacaccaattttcaagtcaacacacctggtttaccacctttatcctctcttctttccactcatcaccctccacctgatactcccatgccaccacacttcccaccctctgaatctaccattgcttctcctattacttcagctcctgcctctgtccctaatcccaaccaactgcttgatatagcagtacagtccactgctaatttacctcatcttactaccatatctaatgttcctgtaactatattacctgttgctactaatgtttctaatgcagatcctctcaggcccacaactactgccactgcagcaagctcacaccccatgattactcgtctaaaagcaggcattagaaagcctaaagcctttcttgcatcatgtgaaccaagaacagtaaaagctgctctccaaatgcccaaatggaatggtgctatgacacaagaattcagggctctcaccaacaacaatacttgggttctcgtaagacttcctcccaacaaaaaacctattggatgcaaatggattctaagagttaaatacaacaaagatggttctgttgagagattcaaagcaagattagttgccaagggatttcatcaacaagctggctttgactttgatgagacattcagtcctgttgtaaaaccaatcactattcgagtagtcttgactattgctatcacccgagtttggtcaattaggcaattggatgtcaacaatgccttcttgaatggtgagttacaagaagaaatctacatgcaacaaccacttggttttgtaagtgaagaacatctagattatgtgtgcaaactcaacaaggctatctatggtcttaaacaagctccaagagcttggtttgcaaagctctctacagttctaataacaatgggatttcactcatcacaagcagatccttcactcttcatcaaaatcacaaacacctactgtatctacatattggtttatgtagatgacatattagtcatgggcagcaatgacaaggccatcaacaccaccatcactgatcttaacaacacatttgctctcaaggatctcgggttggtagattattttttaggcattcaagtaactaaaactgaacaggggcttcatctcacacaaactacatatctccaagacttacttacaagggctgacatgcagaatgctaagactcaaaacacacatatgaacagtggattaaaactatccaactatggaactgagccaatggaagatgtcacactctatcgatccatagttgggggactacaatatgctactatcactagacccgaattggcatactgtgttaacaaggtatgccaattcatgcaaactccattgcaacaacattcgatggctgtaaaaagaatacttcgatatatagcaggtacactagactatggacttcatctccaaccagctcccgacttttctattgaggcattttgtgatgccgattgggttgttgaccctgacgatcgaaggtctacaacaggatatttcatttacttaggtggaaatttggttgcctagaagtcccaaaagcaagtaaccatctcgcgatcatcatctgaggctgaattctgaagttttgcaagcactgtcagtgaaataagctggattcaaagcctacttactgagctccacatcaaccaaaccagtgtgcctactgtgtggtgtgacaaccaaagcacagtccttctcgctgcaaaccctgttctacatgcccgcacaaaacacatagaaattgacttagactttgttcgtgacaaagtgttgcaacaccaacttcaagtgtgccatgttcctgctgttgctcaaattgtcgactgcttaaccaaacctatttctagttcaaagtttcctgatctaagagccaaactcaatgttgtttctcaacacaccttgagtttgaagggggctgttaaggagaatgtcagttaggttgttagaactagtta

SEQ ID NO: 18273 - DNA, 3639 bp, Cannabis sativa
atataaaatagatatatatatattatgagaaaaatatatctttgtaactttgagactttgaaattgtatttttgaaaaattaaatttgtaatataaaatagaataaaagtatagattttaaaaatataaataaaatataagaaatacttatttatggaaaaaccctagaaagacatccaaattttcattctcaaatactaaataccactagtaattaatagcaatactggtactaaaatgttcacctatttataattagtatccaattctatataagttagtataataaataaatattactaaccaattataattaagttataattgatggtaggccccactatttcccatatattatcgtctacagaactataaatttcactcggtttgaccaaaatttctttgaccaaattgaaaaatctaatcttaaatatataagaaagaaaataaaataaattaaaaaataaaattgaccaagactttatttggtatataactatatacattcacacaagaagagcttacattaggaaaatatgaaccaataaagaaagcattatttggattttgaagctccatttaacatttccacttttggaaaataactattgctaaatagcaactattggcaagctccgagtaaaatttgcatatataacattagaggagagaagaagataatgatgataaagctactaatcagtttgttaatggtttcggccattattataatcgtcccaacatcagtagaatcagctagaatccgccattacaaatgggatgtaaagaacgaattcaaatctcccgattgcttcaaaaaactggtcatcactatcaatggcagaagccccggccccactattttggctcaacagggtgacaccatcatcgttgagcttaaaaatagcttgattacagaaaatttggccatccattggcatggaatcagacaggtatatatacacttctttattagtattatataattttgtacaaaacaaggcaaggatttaactcagcattcaaatcttagaattgggttttggctgggtttgaatatatagttgtttatttttaatgatctgtgtgcagattggttcaccatggtttgatggaaccgaaggagttactcagtgcccaatacagcctggagaaaccttcaagtatcaattcgtagttgacagggtaactaattgtttttattttttttaaaacatataatccaataatgaattaagaaagctttattaacttctcattttttttattatgtagcctgggacatatttatatcatgcccattatgggatgcaaagagatgcagggctatatgggtcaattcgagtagcacttccagatggagagttagaaccctttgcttatgattacgatagaagtgttatattaaatgattggtatcataaaagcacaaatgaattatccactgggttatcctccatacctttccaatgggttggtgaacctcaggtactccaattactatattcttcatccataaatatataaaatgatcattacgacagcttttctaattggggttacttttctttgcagtcacttctaatacaaggaagaggaaaattcgattgctctagtttgacttctccaagttcaacagatcctaaagtctgtaactcatcaaatcctgagtgctctccttatgtccttactgtaatcccaggaaagacctatagactcagggtgtccagtttaacttctctatctgccctcagtttccaaattgaggtaactttttttttatttaatttattttggtttcatttttggaacatattttagttgaaccgttattaaaatcatggttttccttttaatatttgcagggtcacaatatgacagttgtagaagcagatgggcactatgtggagccctttgtggtaaaaaatctcttcatatactccggcgaaacatactctgtcctaataaaaacagatcaaaacccaacaagaaactattggatgcagacaaacatagtaagccggtcttcaaatacatccgccggcttagccattctcaactactacccaaaccatcccaagaggagcccaccttcgagcccatctgaaggcccaaagtgggacgatgtcgatccacgtttggcccaaagtctctccattaaggcccgtaaagaaatgggccgggccccaccccagacctcagacagagtcattgttctcttgaacactcagaatgaagtcaatggattccgaagatggtccgtaaataatgtctccttccaacacccaaaaacaccgtacctcatttcgctgaaacacaaattaacaggccaattcgatgaaaaaccacctccagatgggtacgatttcgccaattacaacatctatgtgaagcaaaataactctaatgcgacgacgagtaatgggatctacaggctcaagttcaatacgactgtggatattattctacagaacgccaacaccatgaacccgaacaacagtgagacccacccatggcatctccacggccatgatttctgggttctcggatacgggtctggtaagtttgacatcgacaatgacccgaaaaagtacaatttggttgacccgattgaaaagaatacggtacccgttcatccatatgggtggacggctctgaggtttgtggctaataacccgggaacttgggctttccattgccatattgagtctcatttctacatgggtatgggaatagttttggaggaagggattgaaagggttggaaaattgccttgccttcgtcgatatgatattggggtgtggtgctagcaagggtctccgagtaccatgataatgtctaaatttgatcaacaaaaaagttcaaaattgagatgaaaaatcaccagatattctttattgtagttagttgttaaatgcataattacgcatctattcatcgatgatcaacgacgacaattttttttcttttttcgtttgagagaggcaacgatgattctcttgagcaaataaaactctaggcaagaagttactgaatattaagtttaatttttagcaataataataattttgaattgtataggtacttaatgattattaagtgttaagtaaattgtcatgtgagaattcttaattagttcaagtctttaaattttttacttcttaacaaaattaatttaaatatactaataagaaaatgacacgtgaataataacttaatatttatttaacaatcaatactatagaattataaaaatataatttaagtattatatattattttcaaaaattaaattaaatatttatttacaactgatagataattaagtatttataccgcgtattattttttttttcatatttgggaatacatatattttttttaaggagattgcattagaggagtgttcataacaatccaatctataatgcatggactatattgaattaaaaaatctattgtgagttaattcacatataaaaataatcaatccaatctaataaatgggttgcgatgggaaataggaaatggttttgtaatgatccatggatttatgggcataatgagtttccacctatcttgtatacaacaaagttgaatgtggcttatattattactgcataaagggaatgtgaaaaa

SEQ ID NO: 18274 - DNA, 2745 bp, Cannabis sativa
  modified_base (2379)..(2382): a, c, t, g, unknown or other
ttcataataactataaataaattattataagagccaaataaacaatttattatttttactaaaaatatatttttataaataaaaaaattccatcataatgtatttttataagttttttcaaacttgagttctattatctaaactttttaacaataagttataggtgaaagtggtagagcatatactacttgttgtgattcccaccagcaaccaaccaagtgggttatgattgaattgaggtttatattataacgttacagatgttcaagttacaagatcatccactgttgctgaacttaaaaaggcggtagaggcagtcttcagtcacctgccccagaaaggaccagaaaagatctcatggtactacattcacacacctctaacattttacactaccccaataagtttttggggtcaaacaaaatgacatggtgattttttttttctttttgtaaaatgtgtaccttgattttaatgcctagtttaactcgaatattgcttacattacatggttttaaaaaaaggggggaggtaacaattaacaaatctgattaattatgcctcattttatttggtttttacttcttcaaatttggttcttttttttaggccgcacatatggggacatttttgcttgtgctacaatggtcgaaagctaatcttagatacagatcaagtcaaaaatcatggcatcaaagatggtgatcaggtctgtacgtgacaagtttctcattttagctaaaaatatctcctaaattgaactgaactcctccttgaatctttgtaactgagtttattatatagttttgatataaagtattattaatcacagtaaattgcttagattatagtaagaagaatctagttctgcaaggactataatttcaacaaccaacaaatattccccttttgggtaggtttggttggaatgaataggaaagagaatatgaatgaaatagaattaaatttgatatgtttttttttttcatttttgattccaattaacggtggaaatttcatttccttagaatactttaaaatgtaaccaaacacacccttgatttccaacacaaacatttttttctctacaatgtataaaattgctctctgatatgctccttattgcatgcagcttcattttgtgcggcatgtctcaatcagctataatctcgtgaagaagagacctaataagaaaggatatgttacttcaaagcagacaaataagtaaggatcaagatgagttctttctagcacatatttctttttctttttctttttgtaagactgttattgagtaatgtttgcagaacgcagtcgccatcgagtagctgtggcgaggaagaacaaagtgagcaagaacagcagtacatgtacgagcacaaggtgcagcagtgtagtgatgaaggttgtttcatgggacatcatgaaaccaggctgagtcgcttgtttggagagtggttctcgcattgcaagtgcagcaacacatcaacaacaacatcctcagttgggaaaaaaaggaggctcaatattatggagggcttggtctcccctgcttcaagactcacatctggttttatggcaagtttcaagaaagttatacaacgttgcggtgaaaaatgctatcccctgaggaggaggaggactctttcctcaaactcaaagagatatttagtcaaataataattaacttggttgagattgagagacaccattttgtctgtgtttacttaaattcgtctgtttctgtttctgttctgttcttcaatcttgatgatgttatagtagttttcagggcacaaccaccctactccaactaagtcttgttgcttaagaagaaaaaagagaataatgatactgtatgcttattattcgtatttatgaactattaatttttatctcatgtcatgcctactagtgtgttattttcttggtacaaatccaaaatatgataaattagctaatttgttcaaaagtaaaaagcgaaaaaatgattgtgagatacttaaagtatgtaaaatcatgtctaattaatgctacaattgaatatacataattgtgtttaaaatttgtgtacaaagtgtctcgagctcagctctactatataaaatttgtgcaaacgaccttgatgcactatgttaagcgactagagtttagagatatgatcgttaactgtatatattattgactatggaagaatcagctggccaacacaaatacgcgagagtatcactcactatcacatatttgccatataagtaataacacgagagaaagtttacaattttacaactcatatcagtgatatttacaaaaatactgaattttaggttaaagtttaccattttcctgtcacacggatttttttacaaaaatactgtnnnnttataaaacaaccgtaaaataacaaaacaggacaattaaaaacaacagtaaaacaactaaaaacaaccgtaaaataatagtaaaaattgaacaaaatatacagtatgaaatttacataatattttttaaaaaaattctaccccacagtaatttttttttaatctgaaatttcagtatgtaatgtaaaaactcatcatattattgcagattttttaaaatataggttgggcctaagagcttcatgatgtttgacaaacttataccgtagaacttctatctaagaatatacttaggaccaagtaaattatattctaattgagagattataactaaatagagttatactagaaaaaaattcaaaac

SEQ ID NO: 18275 - DNA, 5738 bp, Cannabis sativa
  modified_base (5682)..(5685): a, c, t, g, unknown or other
agcaacaataatgggccacatggggcccacttatgaagagatgatagataaaccacacaaggaactttgcaagtcaagaaacccacataagcaccctgagcccacacactttccttggcccgtttatgcagaagaaattgggcttgctaaagaactaatgggcccggctccaatagacaaatttgagcctacacccactctcttccatgacccattagatgtattgaacttaatccatgaatgcccacaacagaggaagaggaaggcaggcttaacactggtcccatatgttcaaagaacggaagacaacatcatggaattttctcaggaaattcctaatttacctgagtttgctccaggaccgatagagacccctttcaaaatgggttcgggggcttcaacctcatcaacttctcggggtgtcactaaaagaaggagaggaacagggtcaaaatcaactccaagaacaagatcaaagaatccaccaaagaaggagagaagcctgaatgaggaaactacaaagaatctcgaagaaattctgaatttgattgaagttcatgtagatagtgaacaaaacattgtgacgggcgaggaggcgacccttatcaagcccccaacatcaaaatgaggttcctttcgtagaactgtcggggcctcgcaagggacccgacaaaccaagctttaagagcttgggtgaggagacacaatctagattgtgttttcctcatggagactaaggtggataaaggaaagatggattggatggctagaagtttgggatttgatgaggcggtggtaattcctacaattggcttggctgggggtttttgtttcctctggaaaagtgatgcgcaggtcatggttttggaccaggaaaataatatttttgatgtagcaatttatgatgttcaacgtaatattacttggagatgttttgcaacttacgacccgccctatgataaagacaaaaagttttgttgggaaaggttgactcaaaaagtgaggaattgtagtgatccctgggtagtcatgggagatctcaattgcttacttaataacgaagaaaagatgggaggcaagaaagtttcttcaagagatactcattggctagaggaatttcttcagaatactggaggagtcgacttaagcttcaaaggttgccaatttactaggcagaacaaaagatttaagggcgggcttattcttgaaagattggatcgttgtgttggtttggttgattggactacagaattcccagcagcgggggttttaaattttccaattacgatatcagatcatgctccaattatgcttgacaccttcatgtttaagtgtaagggatacattccttttcggttttatgaatcctggtctaaggaagaatcttgtcgtgaagaaatatgcaaggtgtggcggcaggagtatcatgagggtacatcaagccttttaaggaatttcagtaatattagaagagctttgcagctttggaaaaaagagaatgtgggagatttagaccaaagtatcagaaatttggaaaaaaggattcagtggattcaacaacaacagatttctgatgagcttagcaaggaagagtctcacattcaagttcaacttcaagagacttggcaaaagaaggattctatgtggcggcaaaaatctcgagagctttggctaaagctaggtgatagaagcacaaggttttttcatgcgactgcatcagttagaaggagaagaaatcaagtgtggcaccttcaaggcaaagatgggcagatgaaagataatcatcgagaagtatcagttattattaatgagtattttaaagatcttttcaaatcggatcatccccaaatatctctggccttggaagaattgtttgatcagaaagtggatgaggaaaaaaaccaggaactatctaagattccatcttatgaagaaattagagagactgttttcagtatacaccctctaaaatctcctggcccagatggtctcccgggttgtttctttagaaagtattgggatgtggttggaggcaacgtatgtgcggctgttcaagaagcgtttatatcaggagaagttcatccgaaactgaattataccttcatttgtctcattccaaaggtaaatcatccaacaaaaatggagcaatttaggccaatcagtttatgtaactttccttataagatcattgcaaagatcctagctaataggatgaggccttatatggaaagtttaatctctcctttccaatcagcttttattccgggtcgctggatcactgagtcatcaattttaactcaagagctagtgcatacaataaggaaaaaagaggattgggagggttaatggcgatcaaattggatatgcacaaggcatatgatagaatggaatggaattttgttcgacgggttcttcaagcaaacagttttgatgaatgggtttgtggtctcttaatgtcgtgtataagggaagtgtcctactcggttattctaaatggttctcctctgaagaaatttaagcctcaaaggggtcttagacaaggagaccccttatccccttacatattccttttgtgtcaagaagtcctttcgaagattatcctaagtcaagaaagaagaggaaagatccatggagtaaagattgcaagagctgctataccaatctcccatctcatgtttgcagatgacacaattttatttgcaagagctaacaaggaagaggcatcaaacttaatgcagtgccttaatttgtatgagagttggtcaggccaagtttgcggcaaagctaagtcaagtgtgcttttctcaaacaatttgggaaccgaaaagaaaaaagaagttttgggaagactcaccatcaagcaatcagatggagaagaaagacatctaggtaatccctttgtctttaaaagaagggaaaagagagttttttgaagttgaaagagagcatgcttcgaaagttagagggttggaagatgcgtcttttgtcttatgccgggagactgactctaattaaaacggtggcatcatcaatgccaatctacactatgtcaacaaatagagttccaatctcaacctgcagggaattagatgctttgatgaggaaatattggtggcaaggaaaagtgaggcaagggaagttcttggctctcaaagcttgggacacaatatgtcagccgaaagcttcaggaggcctggggataagaagattcgaagactccaacagagctcttttggcaaagctgacttggaacattgctcaaggaaggaataagccttaaatttattgtctcctaggcaagtattgcagaaatgaaaatttctggtgtgtaaaaaagaagagcagcgattcctatatttggaagtgtattcttgatgttcgaaacataattctgaagggttctatggctattccggcagatgggaagaagattgatatttggaatcaaccttggataccttggttggatttcaaggactttaaggagttaatgaatagactaagaacaagaggatttacggctaggacagtagcatatctatctatagggaatgcttggaatgaggaagtggtgttacaattttttggaaaggaagtgggagataaggttcttgagattcctaggctcccccatcctaacattaatatggttatttggaaaggaaaacaagatggaaatttctcagtcaaaagttcctacatagttgatcagaatttcagatttagagacaatcagttggtttggaagtggctttggaattcggggttacatccaagaatttcaattttactttggagagtcctgaataatgcaattccggttaaggaaagactgccttttctagtggataaggagtgttccttctgcagccaacacttggaaaattgcatccatattttcagagattgcagcctggcaagatctctttggtttttaagcaggtttcctttgagaatagagcagattccttgggaaaacatgctttgtttaattcagaacttggttcaggaagtggatgcggcagagatcgataaaaaggagatcttgacttatttaggttgtgtcattgatcaaatttagatgagcaggaatcaatacaattgacaagggacgagagtgaatatagaagagttattaatgagagtgtcgaaggcttttgaagactactcaagattcactagagaagaaaatgcagagatagattgttacaagttggaccgaggagtacagaggatggacacaagctactaggcaacagaatggataatgatcacagatgcatcttggttcaaaggtgaggcaggattagctgcagttgggataaatagaagaacaggggtttgggcttcaaagactaaattcttgaagactagttctgctcttgaggcagagatcagtgcgatttctatggcattggagtgggctctacaggaagaaggaaaagagattatggtagtttcggactgtcaaatcgcagtccaagctttggcaaggaatcaatgcctaaaggattggaaacttcttcacaagtctttggaaattttagattatagtagtaagttcagtacttgtaagtttctttatattaaccgtaatcaaatccaatttgtggatggcttagctagagatgctagagtctctagacaatctgctgttgtgattcaaggggagggtgatccccaattttctctttacttaatgaacaacagttcttctaaaaaaaaaaaattgtcaccatctaatatataatttcttttgcatgtagaactatttcaatcaccaaaactactttctccattattttttatataaataattaatacctaaagaatgtgtttggtacaacgtgttgaattgtatatatatataatattattttaataatctaatattatattttgtattgatttttttctttgataaaatcacatcaaacatagcatttatctaatcatcaaaactatatcatgagtgaaaatatatttggtattgacttaaattcataggatgtgttaaattatactagttggtggggaatagtattgtattatgttatatatatatttatatattttgaaaaaatatatattttaaattataacaacatggacctcagacctcgcacccacaataataatagtacccagatccgtattcagactctagccttgatttctaaccccagaccatgaacgctagccccaacccactcttgaaccccgacccctggcctcgtctcaaaccccaaaccctgatctctacctagaccctgactctgactttgacgtcgacctgggccccaaacccagcttcaaccccaactgcggagcatagtactaaccccaacctcgactctcactttacaataaaacccatttataacatgccaaacgaacccaaagattctaacaaaatgatttgacaaagcttttgtagataagatgctatatcataattgttgggttttgggccctaaataaaattctatttcaatgtaatattttttattcaattatcaataaaaatacatatttatttttattacttgtttaatgtattatatggttcatgtgatcattatatgtttatttgatttataaattcatccaaatccatatcacattgatattcttgtttattgtgtcattagtatagtgaaaaataatcaagattgtgtgatnnnntgtattcctatgatttatcaatacacagggtttaactgataggataatctaca

SEQ ID NO: 18276 - DNA, 5271 bp, Cannabis sativa
  modified_base (4388)..(4390): a, c, t, g, unknown or other
  modified_base (5180)..(5181): a, c, t, g, unknown or other
ctctctctctctctctcttgatacactacacacaaacaaatcaaagccaatcttatcttcctctcatcaagcttcttttctattctgcagcaatgaaatgttctctacaaatgaaaaaacataacacaagtcttatacatgtactcatttatcttctgatatcactattaagtgaacaatacttgctcacttcagctgaccctaaaagcaatgttagtatgaccctttacacaactcttttctactttttcttcttcttttttgggtgtgttaaagcttaacttttttggcaaattaaataaacaggtttacatcattcatatggggaaaaatcaacatgaagatctaaagctactcaagaaaactcatcatgaggtgcttactacagttcttggaaggtactacaacatgggaaagttaactaacttttttataatttgaacttcgctaagtttaaaactaatgatctcttgtgcagtaaagaagaatctgtgaaatccatggtgtacagttacaagcatggattctctggttttgcagccaagcttacaaaaactcaagcacaaaccatttcaggtatatcatcatgaggcaaagttaagactccatttactaaagaggaccccatctcctccattatggcaaaccatgtgcttattattgttgactctctaataataaagcccataagttgttgggagaagaacacaacacatgaccccccatactttgacaaactaaaccaactttttcaaaaaggttttgagtttttgggaagtggggttctcaatttaaacacttgagtaatcattacattgtgcaaaaaacaaagaaaactgtaccctttgaagttaagtcataagttatattccatgacacagtaaaaaaaaaaaactcatagaacacctcaaattcaaagctttgtatagtaaggacattgtcatgtatccaaatatagtaaaagtaatcaataataatggaaaataaatcaaattgagaagagttttgaagcttgatattattaatcattgaaggacaaaatttaactatataagaagacaaattttcaatcattacaaatttcattttcttttttcttggttttattgtagagttacctggtgtggctcaagtcatacctaatcaactttttaaggtgcaaacaactagaagttgggactatcttcaactctcatctcgttatcaaacccattatgatcagatttcaaaacttggtgatggtgctatcattggtctcctagatacaggtttattctctctctttacatatacatatactaattaggatattttgtaactacaataaaatctatttgaatatataaaactaagtttaggtcctaattggctaggcttttaaaaattgcttttgagcttctgaagctccaaaaaaacacttttgttgttgattggttaaccagtaagattcagttttcaactctaaagaaaccgttttaagagatgccaactttagtaactttctcactaagatccctaagaagttaaaattagaagtccaacaaaacacacctatttggttgggtttttgcttttagaattagcttctcaagaagcttatcctgagaaagatattaaagctagcttcaagctttctagagctaaaagctaaaactcactagttatccaaccaaagtatttatggagcttccaaagccgaaaagcaactttaaaatctttaggtggcatttggttggagggaatgaaaatatatgaataagaatgagaataagaataagaatggaatcaaatttaaaatgtataaaaaaaattatttaattatttctcatcttacatttgaatagtctttccttctattttaaaatagaatagccattccattaaaataatagaaaaatccctctattgaaatgacatttcaatactttgaaattcaactaaacaaaggaatggaataaaatttatttcctttccattttattccatttcatttcattacctccaaccaaacacaacttgtctcggtagcgttctatcgagcacatagtgtgtttgagtaaatttgataagagtgtaaagactgaatcagaaaatactttctagtaaagaatctaagctcacatctttgactgcatatacatatactatttaggatatctttaactgcaataaaatctctctaaatatataaaactaagtttagtttaggcattttatcgagcacataggttctgtttagctgtatttctgcttttattcacaaagctaaaaactaaaatttactagttaccaaacatagcagacatagtgtaattcagtaaatttgataagagtgtaaagaatctaagctcacctgtttgaatcacgagcaggaatatggccagaatctgaaacgttcagcgataaaggcttgggacccatcccatccagatggaaaggagtatgcaaatcaggagaaaacttcaacggaaccaaacactgcaacaaaaagctaatcggagcacgttacttcatcaaagcactcgaagccgaattcggaaagccattcaattccaccgaatcaggggaatttctctctcctagggattcaagtggccacggtactcacacatcgacgatcgcagctggatcttccatggccaacacgagttacaacggattaggtaccggaaccctaagaggcggcgccacccaagctcgaatcgccatgtacaaggtctgttggagccttctcagcggcggaatatgcgccggagccgatatactcaaagcgttcgacgaagcgattcgagatggagtggatgtgatttcggtgtcgatcgccgctgatattccgtcgtttccggaggtggatgaccggaatgcgatcgccattggggcgtttcatgcggtggcgaaaggtgttgttgtggtttgctcggcgggaaatgcggggcctagtcctcagactgtgcaaaatgcttcgccatggatattgaccgttggagctagtagcgttgaccggtcttttccaactgtcgttactctgggaaataactggtcaacaacggtaataactaactttctattctctctaaacaagaagatgaagaatagtattttaaattcaattatttcttatttatttaatttttaaaaaaaaattgaaaaaaaaaatattttttattcgagaattttatttgcaatcaataaaattataagtacgtacgtactaacattaaattaaattataaggaattttgttgccaataaacaaaatatttttatattaatttatcttaattttaataattatttaaaatttttttcatatacttttttaactcatgtataatattttttaattttttctatcaaaatttcatatactttcttatttatcttttttatcttaatatataaaataagaaaatagaattttatttgcacctccaaatttaataatttaaacaattaatgatgtatattttttttaatatgtttgtaaaacaattacttgttaaaattattttttcaacacatatcaaaactcattattattattattattattattattattatattaatgaaagaaattaataataaaattgcaggggcaagccatgtttacaggaaataaaacagggtttatcagattagcttatccagaggtctctgatctccaatatcctcggtaactatataccttattattaaacatcatcttctatatattatttagctaattaaatacatattatatagatttttatatgttttttaaatttcataaagacccacaaagatatattttattcatctttattttttaataatattttatttcatcttaaattttctcaaagtattcgaatataataattagtagaataataatattaaatctttatatctgtatacagtgactgtaaaagtctaagaagaaatgatacatgggttagaggaaaagtagtgctatgctttacttcatcattcaaagaaggttatatagaagacagtgcatattgggtcaagaaagctggtgggctgggcctaatcgtggcccaaaacccgacccgatctctctattcatgcgatgatgacttcccttgtgttcaacttagctatgacgtagccatgaagattctctactacattcgtactaccaagtaagtatatatcaacaacaacaatatatattatatacatgtaaatgtacatgtatgcattatatatgatatatatactaaagtattgtgtatattaataggtctcctaaggtgagaataagtcctacaaaaactcatgatggaagaccagtttccactaaactggcttacttttcttctcgagggcctagctctgttgccccagctatattgaaggtatatatatatttatatatnnntatatatatatgtatatattattaccattgggtattgattatctaataatcttgttttttaatggttatttacaatttttagtctcgaacaagaactttttaaccagttaaaaatgattataaattgatcattctatcaaattttactacacgagataaataaaatgataatttgattgtttagttaattaccacctcagtattatgtcaatgctaagtgtgtaattaatttaaaaaaataattttaaatttttttatttagttttaagtaattttcttaattatcaattgatttttaaaaatatataatttttatttttctattattaaattatacacgagatattggtgtagcaattgattaaacaacaatattattatttggtttgctacgtgtgataaaacttgatagaatgactaatttacaatactgtgaaagttcagggataattgtagttgaaaagtttaaaggccacaataatacatatgtcatattttggggacaaaaatctatcctttttaattggttggcccaatctgtaaaagcttatcttgttagtttgtttttacagactcctcataactattaggcaccttaacgtatctaatattttactaacatggcatgttataagcaccacaagatatgacatattattattagtgcaattcaatatatcgtctcacacattttaatttaaaaataatataaaaaactactaactattcacaacgcgctacatcacatgtggtgttggatctcttaatattaggaggcgtttggttgggnngaataaaaatataggaataggaattggaatgggaataggaataggaatggaatggaataaaattttaaatgcataaaaaaaattgataaa

SEQ ID NO: 18277 - DNA, 4657 bp, Cannabis sativa
  modified_base (4626)..(4631): a, c, t, g, unknown or other
ttttttttttgtaattttacaaaaatctacatagcaacccacttagcaaccactggagcaatccaaaccataaaaattaaaaataatatatgggatgattcccctaattaatatggtagatcttaacttttttaattattttaattaattatagatatatattattatacagttaatttttataatatatgtatttcttttaaatcaattaaattgaaatacaaaaaaagattataattattgatgattcaacagaaagcttattatatgattttaaaactattgtcatcacaccatcttatttgtagtcatcactattgaaagattctgtaaaaaaaaacagagtaattgaacaagagaacaataaagaggaaagatggagaagtgaaaaaatggaatgcctaatctcttccctaattggcattacatttatatatatacatacatacatgaataggattacaagagatagaagccataacagaaaaacagaaataacaaaccaacggtaaaatagttggaacgtcaaacttgtcatttaactaacgtaactaactatcatggtaacataataactatattcaaagtcgttgtcattaataactgtatttttcaatagatttgctctatacataaaataaatcaaacaataagtttatcacttatcacttttatctataaaatgaatctaaaatatatttctttttttaaaaaaaaaatgaaaatactaaataaaataaaaatctattaattaataataaaaaaatagataaaattgtatctaataatcaaatttaaattcaaataatatgctttaaatatctttaattaactcatttaattttaattttttataatcattatcttcaaatgttatagtaaataaaacattaaaaattgaaattgaaagatataattatcatatgattacaaaatcagtttcattaccgtatctcacttgtagtcgtcactacattcaaagtaacaatttgatagaaaacataaaaattaataaaattaagttaaaatgacaaaaagaatagcaactacagaaaattatatgtgtaagacaattttataatttactttaataaattgtttgataaatctcttccataaaaatttgataaattagaacacaaacactattcataatcaagagttatttattttttttaaaaaaaaaagttaataatcatataatataaatttaaaatatctctataaaagctcaaaccagctagctacccatgagtatacttaagaactttaaaattaattattcaatctaaaagagagttattgtttgaattttcatcggttattggttggtaattaattacattttttttaatagttatggatctgtaagaaaaaggatagtttttgttgattaatgtttgtttgtatttgtatgtgtgtttcaatgtcacgtttaaggaaccggacttagtttaagccaacgcacactgcaaaactggccttgtcttattcactggtcctcactcttgcgcccacgtcttcacaccctctaacccccctactctcccaataaaatacatatattttaatcacttcatttattatttagactcctcatgttccaacaactataaatattacatatccatctaaaaataaaataaaataaaataaaaaccctattatttaaaagtcatgttactattgttaccaaaaaaaaacctttttaaactatttttattatttgcaactctttaattataagtaatgaagatgatgaggatgatactaatacacatacgctaattttttttataataataagttccattttgaataaatataattggatgaaagaaaaatgtcatttggaatatgtacaatcattacttttcgaagacattaatatttgaatgaatggaagtaagtactgcgagcacatttgagtactatcatttaattattttgtcatttttcttttatttttttataaaatatatggttgtattatttttattaaatattatatttataatcgtaactttttaaatatttacaatatatatagtaggacctttgtgtcatgatcgatagaatatgtataagtaaaagtttatatataataaaaagaaataaaaaaggataggggttttaagagagggatcaccctttccaagggaaaagtagtaaaatccaaaatagggttacctgtaaatcccaggcagctttggctctatctatggaactatttgttaaatacgccttgcctgccgtcttctcttcgacctgtactgctctctctctctctctccctcttgttttggctaccttcattcatagctttcatctttctacactagctaccactcttttgttatatatatattgtatttaactattttttctttcctttttcttttttctaaatctaccactactatagtattagtataccttagttccaaacccaagaactagctatatactaattaagtaaaattattaattaagctctcatcagagagagagagagatcatgtatggtaatttttcttagctagtcagctcctcattttctggataagaagcatatgatgtctagatattgaagctggagtagttgctgtttaaatcacatttgatatggtacgtacgccgtagtaagttaatttataactgcttataattttactcttatgtatatatatatatatatgttctttcatgtcaaattaattattaattagtgaatatatatgttaatttatgaatattattgtggatgacgttagacgttcttgcctggctccctgaatgccatataggaagtttgtcaaaatgaattggcgaattccctacttggcattgagggagtcatgcaggtgatcctactctatacataataattaataaatatattattatcattgcagccacatcatatataattaatcatatatatgaaaatgaaagtacattttctagtacatataaattaatactaatcacgtactttgttgatattatatgttgtttagaacctttaattaataatatgctatgcaaaattaagcagttttgtttcttactttggcatatatatatatatacgtacacctatatatatctataggcttgatcatatatatctatatataaacataaatatatatagtgcaggacagctgcttgaataataaagaaaaaaatatattgtcgattgtgtgaaaatgatggcaagaagagctatatatatatatggttgatgagttcagaatcataataaatacatatgattgagatggcctaattctgatcatgatgacacccttcagagagatgtatggctgtgaagtaatccttctgaaccggggcgtttaatattgtggaccgctcatcaacatttttctattctcatattaatactcttcagctgtcaaatagttacacacatatatatatacatattcaaaatactagtccatcatagaaatttaatttcctgaattatatattaatttgctttacaatagatcgacttaacacctgaaattatttttgggtactgctatacgtaagaattaataaatagtaggaacactgtagtacataacatatatagtatactataaagtatcatgtcgtgtattttgttattttactataatttccatgttatattattagtattataagtatttacaaaagagtagcagtagttaggaattaggtaacttccagcattaatattatattcgatcttgatctttcttttttcggtttttattttatttaatttgttaattatatatatagagagagtatagctagtaaatgtgtttgtacacgtatgcacggtttcagaagccagagaaactatagatataaaattatgatcagattgagattgaagttataaaaaaattctttgtttaattttatgcacaggcatctctatgtttaataaactactgctataaatagatatatgtattatgtcctattcctatatgtaagtataattggttttttttttcataatgtaagatagtttaatttacataattattgcacttggtggaaattatgcgactagtttaattgtatgagtcatgcatgtctcatgcatcatgcatgaatcatgataattaagtttccaccttattggacaattgccatgacaatgacctatataattaataactttatatttaaacatgtatacaaacattaaaagatacaaattagaagagaataaaaatagaacttaattttatttttaaatagagatcgttaaaaatagcagatatatatatctctattttcaattcgattggtaataagaattattcatattcttaactagttttttgtagaacactgagatgactatttttgttcgtagattctaaatatttattatataaataactcgctgttgaatattctttgtacaatatatataatcaaacttcactataagaaaaaaagatatactcacgattaaattagtgacaaccaacttagtagtgtcaagtcgtagttagtgtagaagtaagaatgatggatatctattctatataaagtgtgcctatataacagaaattattggtttatgagaaattcatgagtgactttttattnnnnnnaaaaataaaatggtttatgaaaaatt

SEQ ID NO: 18278 - DNA, 9515 bp, Cannabis sativa
aacataaatgacttctaatcttttattgataacatcagattagattgtaatgagttttatttagggcataaagccccaacagtgtacacgtggcattattgacattgagtgatggtgctgaagccactctaaaaactctggtataggcttcttccaacctaatatatccttgggcccttgtcaaaaaatctgattgagtatcagacctttgtgtttgcgattcattccagaataaggaccctactgcaactccagattgtagggccactaacttcatatcgtcatttacattagtttttgttgtcaccttcatcattcgatgggtgtaagccttgaggctttctctgggttgctgtttgatgttgttcagcgagctattcatatcgaagtccttggaatccataaattgcttttggaacatggactataagtacttccaactttaaatggagttggacggtaatcccttccaccaatccttgacagatttggacaatgtcaaagaaaaacacaaacacttcgcatattcgctgacttgaactacttgatcatcctattgtgcttggataggtgggccctagggtcctttttcccttgtacaattcaatttaaggcattcaaaaaaatttcggcagttgtgcatcgatgattctcttcacggatggttctggatcctcatctttcgagtcagatacggctccactttgtttccaaaccaaacggtctgtgagctttgttaatccagctatctgatcttctagccatcttatatgatcatttaggagctcgcgtcctcagactctatcattgatgttatttctcaaatcgcctccattaggccttgctttctcacccttcgcttttttctacttcgcatttaagtgagccccaaggtccgtcattgacatgctatcttttgggtctaggtcctccacctaaacgctctagttaatagaattattgtggcagtttttccatccccaaatgttaggaccgtgtacataagcactgacccattgtactgcatgaatctaccctgggaattgattggttggcttggccctggcactttattctccctttctctcagttggggttggtcagctacatttctgttgtttagtggatcattatttgtgggtcttcccagaggggtacccattatgcccttccctttgtcattcattaggggaagagggcccagttccaagatggttacactttttattaggagggtttttgctggggaggatatcttgagcttgtaagcatgcaagagcttcttgcatttaacgtggaaacttcctcttacttgctaacatcctttgggtgtttgcaagtttttactgaagctgtattacttcgagatcttgctcgtaatactcttcttcatacacttggttatagtttttgttgtggtcatccttagagccatctacatggccatcccgctcatcttcctcaataggatcatttacgagttgattctcgtgatgttagtcttctaggtgtgaatgattacctgcctctatcgtttccccttcccccgtggcacccacctgagtgtttgttagggggagctagttctcattgtcgtcggcaacaccgtccttaccatcttgagcaagaggcttgaacactacttttcatgttgcaaccatcgttgtagatgacaattttggtaattgtttcctcaactctcaatggaagtaccaaaatatttaccaagattttgaaaatagattataaataaataagattaagaaagcaataaattaaagaagaagaaagaagaatttttatgtggttcgactgttaataaactctagtccacgagtcaatattattgagctagaaaattttcaacgtatttcttacaagtattttttctctagaggatgaaccctaattcttaggacttgatcccagaaattgcttttctacttttgcttgattgggtaatgttctatttataggtgagatccgggtatgggaaaacccatacccattagggtttaaaggtgtcaactacgtccactatgaggtaaaatacaatatattgattttgggtcaattaagtgaggcccaatccatgaggcacgattttttgcacgagagaggaccatttgaggtgtcatgcgtagccatgcccataatgagaatatcaaataatatatcttggagaaaaaggtgatctcttcttttagtggtgcgcacactccccaggtcagacgtagggaaaaaaactctaacactgtggggccctgtgtctgtagggctccacgtaaggtgatgttcgaaagctttttgagtgcttcttcgattgcccatctccgaatagccccatgagggtatcgagactggtcctaatggagtctttgtcttctaggttgaacgacatctcttggaccgaagcggttcgaccttgttaggttggtgcgactttgctagtgggttgaattgctatcctgattgggcccaggtttgggtctgccttgacggatgttcgacttttgaattgtacacatcatcactccaaaaatacagataacactaacaaaattatataccactattatacattacaaaatagcaaataaaatatcatctaagaataaaaatatatcttaaataataaatctatattttgcaacaaaatatatataagaaaaatccataaaaaataaaaataaaacggtataactttcaaatatttttattttaacaaaactaataaagacataacatgatattttagggatatatttgtaaatcttaaaaaaatataggaaatatgaaaattttatgtggcaaaaaataatttaaacaataaatagtgtaaacaaattatttctttttattaatttataaataaagacatttacttacataatgtttttaggccatttactaagtccatttggcatgcaagattggattaaattatgctcaatgtaatttgtgttttagaatggagtgaattattcttttaataaacacaaatctaatttaaaatatatttaatttaatagctaataattataacataaattttaaaattaaataataaaatttgaatcataaagttaaataataagcttttgtaataaatattaatataacatatataaataaatatatatgacaattaaattaaataatgtatcatgctttaatataataaaaaaatacaaaaagacataataatgtatttcaataatatttttttcataatattttaaactaattatttaattaatctaataaaactattacattattagcatgagaatttttagttatatacaagtaaattaattataaaacaaaaaaatgtaaaaaaaaaaatacaattacataattttatatagttttgtaaatatttacatgtaaatactcatattatataataaaaataaacataaatatttacgattttaacatgttgattatttttacttaattttttttttatataataaaacacataaagctaaatataaaaaatcataagtcaatattatattttaatatattactaaaatcatatgtttattaaaaatttaatacaaaattaaaaaaatatatacaaacatatttacaaattttatttatgttttataaacaagtataaatgttcattaaatatttaattattattattattattatttattattaatctaatatatttattatgaaatttttttagtagaatcaatataatttatttactaaaaattcataaataaatttaaaaattaaacatttatgtttattttttgaagaaacacttatgtttataagttatccagaaatatgtttaaaaaatgaaactataactaaatgtaatattatgtataaacaatatgtttatatttatattaataatgtttataaattattagtctaatatatttattatgataatgtttgtgataatattgttgatataatgtatttattaaaatttaataatagttttataaatcaaatatgcatatttattttttatttttataagacttaggaaatatttattaccttatatagattttatagaaaaataaaattatgtttgggtatctaatatagaatttataattaaatataaataatatttttttttgtattatatagtgtaaaaaagtgatataatgtatgcaaaactatacattcctgttattaaaattttaatataaatatttttaataattcaaagagaatacactatatagtactatattgtttgtattagaataaaaatacatattatttaattaatattattttaaaattttgatagcatatatgataactcaaaattatatatttttactaatttttatatataaattttgaaaataaatttataaataaatttttcattctttcactaaattatttctaaatctaaaatatatttacaaaatttaaaaaattaaaaaagatggataaaaagataatcatgaattatttatcttacattattggatgagataaataatgtctcacaaataagattaattagattagtgcatgactttagtaatattgtctagactagtctaattttggacaaataatttcatgcaaatgagattaattagattaattatggaattggagattgggtagagccatagaggagctctagagaaaagaatattgaaagtgactaaaaactgagaccaaaaaaaaatctgttggctttatatttattaaagcatttaagtgaccatgaaatcccccatagattatcctaaaccattatgtggagatcttcccaaaaatagccaatagcccaatttgccatgacaactgctcttcagttctccatcaatttttcaccttgccaattgcacaccttgcatggtgacacataccgaaagcccattactttcagagccacaaaagtttgtactttacatcatagcaagtttaaattgagagtttacaaggagaaatggtctttcttggtagaagaaaggtggaaagatgagatttttctgaggaaaaacaggaagaggaggggggttcttgtgaggtttaatgagggttttggtttaaatggtggtgagaatggtggaggtggaggtggcggtgggaaagacgatggtgccactgctagaattctgggtaatctagctttggctatcgggttgacctatctttccatgactggacaacttggttggctgtttgataccattgtttccattggggtactctttcttgctcttgcctttaagctgtttgattatttgactctgaatatttacttaatattcttgtatttcttaatttgaaaaatattcactgatttatccttattcatgctcagcttcttgcagttgttgtacccatagttggtattggagctttcctctggtgggcaggacgggatatagttcaggacactgtaagaccctttctattttcctttctttatctttttcgttgaacaagtctaaaagaattatggttgtgaaatgatgttacttgtgcattcttactctatatttgcttgcctaattgactggtaactttccagtgcccaaactgtggaaatgagtttcagatcttcaagtaagacttgtttgtagcctcatattcctgtacatcacatccacgaaatttttcttgtattgatttatattttttactttttacaggtctactatgcaaagtgatttgcagttttgccctttctgcacccaacctttctccagtaagagtttattcttgacccttttgcctctttgcattccaattttttagttcatcactctttctactattagactatagatgtcattggaaagttattttattgctagctagttagttagccataatgttccccttgtgtctctaagctgtttttgcttatgatctctgttccagccatatcttaactggagagattatctaaacatttattcaagttttctcttttagattaagctagaaatcttcttatctattgtcatttcgtctgtcagttgtggataataaatttgttagggactctgtcaaattctccaaccagtctacaacattcggagaagccttcagtgatttcactcgttctagaaaaggttatcccactgaacatcttctgtagttttttctttcactttatcttattgagaacatcttcctccattgatattcgcacacacgaaaatgagcccttggctgaacaatttttacttgtctgaattgcttttaatgaatctctacaatattgcagagaaaaagtattcgtccaaggcagtagttgatgtagaagccgaaattaaagatgcagattgagactttgtagtgtaatcatgtggtatgttgtaaatttcatcgaataaagtttacatgcgttattcataaacatgtttttaacatcctatgattgtaattagacccaaagacagtatttactgaatagagaataccaaagactgacagtcttttacttcacatgtttccctaatttacattaaaacagagattagaatctaatttagtactaaaatagaacaaaagaaatttcaccgtacaatgggatgggagaaatacttttctttttctaccaaaatgataaaacaaatacaaaaaagtattggaatgagttaacaaagaaatgataagatatgtaaacataactcgtcatgtgaaatagtattaaataataattttcccatgaagacaattttacaggtaatggtaataaactgatgctctagtataaaattttcatatatacgtgtatacatattatattggtcgcatggatttgagggtgattttttttgcttaccttaaactgcttatggattcgtttgatttatgcagttcatcaaattgctttggagatttgtaaatacaataaatgcccatttaacattaactgtagcgattaaccactttttattttccttagccattatagaagttcattgtgtactagttcaaaatttactcttcgatattttatgtctaagatgacgattttgttgtacagatatgtaaatttgaagtggagataccctttgtgaacaagcccattgagccagactttaagaattaaaatggtttcaaagttgcaagtgagaagccaagtttgataagaaagaaaattcaacctatataacttttgtcgaccaaatggctacttgcagtcttccttaataatattctattcttttgtatttataattttgatgctcatgtaaggaaagatatgacataagtatagtacatacattgttaaatgagaatctattggttagaagactaagctcattggcaattgcctattaaagcaactattagattatggaaagaaaaaaaatatgagttactaataaacttatcattattagaacaaaattatgtatacaggcaactataggtatatatatttttatacaagcctaagacgttgatgaacatagaaaatccactgtgttacaacaggagtgtgccaagtactgaatcagcctcaaaactagtgtgatggttctccaactttctgcaagaaaaagttataaaaaaatatcatattctgagaactagcttaaaaatatgaaacaaaacatttgttttttctgaatatccagttcagattatagaatatgatcaacaagtacactctcaggaagagagcaacagctaataataataataacatgatagataggccatccagccaggcagccacactctaccatgctttgattcaccatataagaacaagacataaaagcttgtcataattctaaaaattaaattaagtaaatcaatcaaactatcaccataccttgttattcttgttcttcttgtctcccatgaaatacttgtatccttcgtatgttaggatcccgcatgcagttaatgttattataacaaactgcaaatgaaaagcttcaatttttatcatgacatatcctatcttttagaccatgttttttttctatataaattctgaaaaagctcttgatccaattttgcaaattcaatccttttttttttcgtttgatgtataatcttgacaagtgtacatttaaccagtttaagaatataatctattattggcatgaggtagattgggaattgaaaattgatagtacaagattttatgtgtgtgtaaaacataaaaaaataaaaagaaaacctataatcactgtatgataagtgtttggtcagtgatagaagggctttcttattattagtacaaaaaaaaaaaaagagcttacaggttctctcttccatcttgctgggttcattgggtcttcccaaaagttcaccttggaagttccgtgatggtctgtaacacattcaatcatatcacacatgactaaactcgatcagattatgaaaagcttatacatattagataattaattagtagtatttaccagcagtacgaccggctaggccacgccgatggactagagtagctgcctgaccctgaaaggtggttgaggccgctggtttaggaatcgaaagctgaatcatattcgccattgaccgcaccgccattgttcgatgattagagtaaaacagagtgagagagacagagatacgtgttcacccttcagaaatcaaatacttgtagcatcatctagaccaaaaactacattttttattgtttatcttagcatagaaaaaacaatatagtataaatatatatttttggttaaatctatattacacccaaaaataataattattttggtatacttttcacttgttttaccattaattttatagtctatttttttttttaattatagttatttaattattttaaaaaaatttcaaataatttataatattaaaaataaaatttaacattacttaaaacacttatatgagctaaaatagctcaaaaggtaaaattattaagaaatattgttaaaataaaaggcttcaaggctcaaaattttaaattatcaatagtgtagagaagcactattatttcttcaaatattattttaataattttttctctcctttaattctctatcatttattttttgattttttttggtttatataataatatataataaaaaaaatataatatttaaatggtgtagagaaaaaatagaaaaatagatgtatgatgtaatgtaaaagtgtgaggtaaaatagaaaaaaaaaaaaaaaagtagttttggtgaggtattttgaagaattagagtagagaagctaatatgagtgctcttactaagtgtaaaagaaaaaactgtcacaaattatttaaattttattcctaacattataaattatttagaattttttaaaaatttaccaataaatttaaataattacaacaaatacaattatatatatgatagactaaaaaaactatcttcaatggcgaaactagggctattcatatattatacaatgggaaatttacaaaaatactggaatttagattaatttttacaaaaatactgtcacacaaattttttttcaaaaatactgtgtttttataaaacaccaat

SEQ ID NO: 18279 - DNA, 6604 bp, Cannabis sativa
  modified_base (3506)..(3512): a, c, t, g, unknown or other
ttttttttttttgaaagaacagcttgttcattaaaagataaagttgatgggaatcacagagggattgccttccccttgatacaaaacagccgaatcgctagcaactctagtttttttagctataccatccgccaaagagttaagactacgattaataaagcataaattacaaactagaaaactcttagaaatattaactgtagattaaaacacactagacaccttccaatcaagacaaccctttgacgaagacaaagcttgaactgccacttttgaatctgatagaataagcacctctcgccatcctagatcaactgcccaggacagagcaaggagaattgctctgaattcaccttccaatgctgactgcgattgttgtctttgggagttgacaaaccagcatctagagctagtatcaacggatattgctgcaatgccagcttcccctctcacccatgaagcatcagtgaagaaaacatgacgaaccagtatgtctctaggtagtactatcgcctcattcattgagctttccatggcctgattacccccgagatgtcctcccctattagaccaagacatattctgtagttccaaaaaatctttttcagcctttgccaaggccaaaaaaggattagcagggatattgttgatgtagaaagcattcctttgttgccaaataacagagaaaacgcagccgatgtagttgagtaacccagtcctaccgtcacttgttgatattgctgaaaaagatgaaaccagattttccaacaaacatatcaaagagtctcctgtgatatcaccaattctaatggtttacttcctccaaaccatatggatttagaaaaactgcatctacaaaacaagtgcaaatgactttcctcctcagcatcacacagattacacactttgtcaaaagtgtaatctgttcttggtaggaattgcatcattcaaaattctccaaaataacactgaaaacctaggatgaattccagcatcccaaatccactttcaaatatcttttgttgggtcaaatctccaagattgttcaacattataggctgccttcatagaaaactgcccgttctgggtgtttttccaataaacctggtcttgaaatggaattggtatccttggaatggagaggatacaatttcccaaatcaataccaaaaacttgtaagaccagctcctcattccattcatttcctgtggaaatatccgccaaagatttgattgtgtaccctctgttcctcatgccattcattaaagccataaattcttgatactccaaccaaggaatccatggatgttgccagaaatttattgaatccctcgaagcagcaactgagatcgagcctttgaggatcattgttcttgtatccaaaatacacttccattggaatgaatcactactcttacttctcacacttcagaagctctcgaacttgcagtatttattcagcaagcaagagacccatggtttctgttctttggttgccaaactccatgccagcttggttaacaatgctttgttcatgtcttcacatcttcttaaacataatcctccagaaacttttggttagcaaatcctatcccaggccttgagagcgaaatatctatttcgatccacatttcctgaccaccagtactttctcattaatgcatcaagctttcgacaactagccaaaggaatcttagatgtggacatagcatagattggcatggccgaagtcaaagacttgataaaggttaaatgcccgacataagaaataagtttcatcttccacccttctagttttttcagcatactttcctttagcctcaagtagtcttcatttttccttattttgaaaacgaatggattgcccaaatgcctctctgtatcacatgcttgatcaatattgagaatacccaaaatgttgcttttccttccactacacaggttcttcgaaaaaaggcactagatttcgatttgctacaagattgccctgaccatttttcataagttgagaggcattccatcaactttttagcttcattcattttggcacgggaaaaaaggatagtgtcatctgcaaacatgaggtgagacactgggattgctgactgagctatcttgataccatgaaccaaaccttgtacatccgccttagttatgagtttcgataaaacctcttgacaaaggagaaataaaaacgaggagagagggtctccttgtcgtaggccacgctgaggagtcaactttttgaggggacaaccattcaaaagaaccgcatacgatacacttgtcacacaagccatcaaaagctttcggcttctatcattgaagccatttgcacaaagaactttatccaaaaaactccattccatcttgtcgtaggccttgtgcatatcgagctttaaagccataagacccccatagcctttcttctgacgaatcttatgaatgatttcttgagtgagtatagaggactcggctatccatcgaccaggaatgaacgcagactggaaaggggaaaccagatcattcatgagtggtcttagcctattcgataaaatctttgcaatgactttatacgaaaaattgcatagacttatcagccggaaatgatccacacaatggggaaattccacttttgggataagacaaataaaggtgttattgagattagggtctaacactccacttgagaagaaatctttgacaatagcacacaaactagctcccacaacgtcccaatacttgcgaaagaaacacactgagaattcgtcaggcctcggggccttaagaggatataaacagaagactacatccttaatctcgaaatctgtagaaactttggaaatatttccattaaaagaatatttcaggtaataacatataatggaaacccttgcccttgcttcaaaacttacttgaatagagcatgaccttagtttctcgtggcgaatccaataaaaccgagtttaatgaaacaagttgtgtttggttttggttacatgttcaatacgaaatttgattttttttaatggaacaaaaaaagttatgtgttttattaaactcgattttattggattcgttacgggaaattaaagtcatgctctattcaacttaattttgcgttgaaagtaaattttaaaaattatattgaatggttatataattagaaagaattagttaattagaggatgtgaagataaaaaaagtgagtggtagtgttactaagaactacctataaatatttagaaaactattagataaaattattatgagtaattcaaaaaagaggtatgcgtaatccacaccctcacctcacctcaccctgtctacccaaagatgtagtcggttaattttccacctcaacaagctattcttgggcagttggcaacttcgcatacaaaccataccatattcgttgtttattaagctcaattttttgtccatttaaataaatacccaaattaattttataaaacaaaaaattataaggtttttttttttttttnnnnnnntttttttttttttttaaatgcaaatttttcattaagcaacaccaaaaaattataagttaaaaaacttaaatatatataaattgtgcacacagaaaattttatttatttaactttttgtatttttttttttgtaaacaaaaccaaacagaaaaaggcacacacaaacacaaccacaacaataacaataatcatctcaaagtgatgaatctctgaaacgaccgttctctctgaatcgaaaaaggttagtgaaaaagactattttatttctctctctgcatttcaattttgatttttgattttttttatcaactttgttttgaatgtcttgaatatctttctcttggttgtaaaatttacttgatagtttttcgatttctgcttatggatcattattaatttgcagaaagagtattgggtttgctcttttttttttgttagattttctcgacccatgtttggtttccgagaaaaacggaggaagaaaaaaatagaaaattttattagttatgtattttctagatgtggtattatggagtgagaaaggttgaattaaacgaaaattatttgttttggggtaagttgattgcaatgtttgaagatttaattattagggttatgtttaaaaaagaaaaattgattctttcacttactttgcactttttcttagctaccctaaagagcataatctgcttgcaagtgtgtcttttaaaatctgatcatcgagaataatttatttatattcagttagttgttttcaattatgttataggagtatttaatcggtgatttcatgctctgtttggttgttgagaaagtggaagaaataactggaatacttatgcaattgacttcttggctgttgaagttatatcaagataaactctcaagaataaattaaatagaaagttaatatttatacatatatatgtgtgtgttttataatcgtgaattatatatgagaagtcaggatgcaaactgtgtaattatgtctgtttacctttcagtgattataattatcccaccgattttgctttccccattgtttgtgaaattatttttcttggttgcaatacacaaaacataatcacatgatacctaattttcatactgtgattccccaaatattggatgtttgattcatatatatatgtacatagatgttgttctagcacctcaataactagtgatggtctgtctgaatgttatgattacaattctacagttattgactctttacatttgatttttttttttgccttcgtctcttacattcattttgttcttcttctccagatttgtactttcgggtgacagtcagacagcaccatgagatttagaaaaggaagcaaagttgaggtgctgagtaagaaagaaatgccttcaggctcctggcaatgtgctgagataataagtggtaatggtcacaactacaatgttagatatgatggactagggagtaacactgttgtggagagggtatctagaaaggacattaggccttgcccaccgtcgttggatgtttcagatgattttctttgcggtgatgttgtggagttttttcacaatttttcttggaaaatggcaacaattttaaaagttttaggaacaaagtatgttttgctcaggcttgttggatcttctcaagaatataaagctactaaattggacatccgagtcagacagtcttggcaagatgatcagtggattgtgattggaaaggtaactagattttaattcacattaacccttttaaaattcctcgtttgttctagttttcttgggttagtatatgtttatgcttgtaggctgtggattgaaatgtgttgtagttttctgactgtgtgttttgttttattgctttatacttgcttgatggttctatctctatcatctttcaatttcaacatcttttaccacggttaactagcttgcatacaagaaaagcaagaagaattgtctgattattctttcttcttttttcctttctgttttcatttttcttttctttttctggttcttctattgccatactctgtttgccaacttttgtctatttttctctcttgtggacgcagggttctagaaattatgataatgggaaagataatgaaaatttaactttagagaaaaatcaaaattcaagcttccaaaatcagaagacaaacataaggataagttcacgaataattggtcaccaaattccagttatgaaaaaacgaaaatttcaggaatcccaattttcctcatcaaaaacaccgaaaagaggattctcttactgcaattctcaagctgatgtgcatgcgagaacatctcagaaatgtagagttgttgacaatgggggaatatgtcaccgagtgtttaagaatcattctgtattagctgaacaggcagatgctgctttaccaagagatatgcaaggcgaaaaagaattagcttcatttaacatcagaagaacctgtcttcctgaagtgagcttggagaaaaagcaaagtggtaatgttggatattcagtcgcagtaaatagagaatcagatgacactaacagtattgcaagttcagtcggtagttgtagcatcagtagcaataattattattcatcacctggtcgcgttactgcaagtcctgtagtggacctgaattataacaatgctgaatctttatgtcattcgagatatgaagatggaaactgtctccttccaagaaataatgaattggctgatgagatccataggttagagttgcatgcttaccgttgtactatagaagtattgcatgcatcaggacctttaagttgggaacaagaagaattgatgactaatctccgactttcactccatatatcaaatgatgaacatttgctggaaatcagaaacttggtttcggcagatacaagcgtacaccttagatgacagaaaatatcttaaatttttcatatagttgtagaatgtgattagtattttctccagcaacttgctgcactgtaagaaaatggatagaagttttccctttaatgcttataaattactctggtgaatttgaaaaatacatgttactgttcttttctttgttaaatataatttatcttcttttct

SEQ ID NO: 18280 - DNA, 7729 bp, Cannabis sativa
tgccatttggattgacaaattccccagccacttttcaagtacttatgaatgaggtatctcttaatttttgaggggattgtgcattagtcttttttgacgacattcacgtgtacaacccctcccttgaagctcacattactcatcttgagttggtactggagcgtctacaacatcacaaattgtatgcaaacaggaaggaatgctcttttgctcagtctcaaatcaattattttggccatgtgatctcttcccaaggagttgttgcgaatccgagtaaaactgacaccatggtttcttggtcgagccctaccaacattaaagaattatgaggcttcttgggacttacggggtattaccgaaaatttgttcagggctatggaagtattgctagaccctttacagatcagctaaagaaggatgctttctcttggtcacaagaaacacaagaagctttcgaacaactcaaacgagttgtgttcagttcccgtgttggcactacctggttttacaaccccttttgtattagaaacggatgctttaggcatgacttaaacccagtcgtcctcaggcatcggtcttggggctgtcctcatgcaacatagtcgtcccatcgcttatttttgcaaggttttatcccctcgggcgcactagaagtcagttaatgagcgagaactaatggccattgtcttggcaattcaaaaacggcattgatatctcttgggtcacaaattggtagtgcgtacggatcaaaggagcctcaagtacttgctggagcaacattcggcttccatggaacatcataaaatggcttacaaagatccccaggcatgacttcgaaattcaatacaaatcaggtctcgaaaatagagcaactgatgctctttcacgtgtcaatggggaggtttctcttgctgccatttctgtccccaacttcttctctatactagacttgcaagtgcaaatcgcagcagatcctatcctctcaggtgacccaagacttagccagaggtcaagacagcaggggatttaccatggttcaagggtgtctcaagttcaaaaggcggcgggtgttacctgcctcatctctcgtcatccccctactcctataagaatatcatagcaataacgttgggggacactccagggtgtttaagacatggcttctgagttctattggcaaggaatgtagaagacagttcagcagtttgtggcatctgcctatcccaacaaaataaatatttggctcaatcacctttattgcaacccctgcctatcccagagcaggtttgggaggatgttactatggattttatcgaaggccttcccaactctaatgggtatgactctattttggtggtggactattgtctcacaaagtatggccattttgtcccactccgccatccttatactgctcctacagtagccaacacttatgtcaaggaaattgtcaaactccatggtatcccacgctcaattgtctctaatcaagacaagatttttctcacttgttttggaaggaattattttgtttgcaaggcattaagctgaaacatagcacagcttaccacccacagtccgatggacaaacagaagttgtcaatcattgcttggaacctccgttgctttatgagtttcaaacccaatcagaccattcttcttctggcatgactcccttccgaactttatacaatcgcgacccaccacctctactccgttttgagcgtgctagtaccaaggtttcgttgaagtgcactccaagatcgtgattctgttttggacttgctgaaacaaaacctgattcgtgcctaacaaaaaatgaaggttcaagcagaccgcaagcgttgtgatgttcaattccaagtcaaggacatatgtgaaactccgcccttatcgccaacgcattgtcgccaaacgacccagcgagaagttgtctccccctttttggaccttttcccatacttgatttgttaactaagacaaacaaaaaaaaaaaaattgggagcaaaacattatagtactcatgaatcctattgtgcaccttacaaaagatgggaaccatttaaagaccctaaaaagtatcagggttgttggaaagttgaattatcttactgtaactcgtccagatattgcattctctattagtatggtcaatcaatttatgtcgtctccaacaattcatcattgaacagcgttagagcaaattttgtgttattagaaatgagcacttggacgaggcatcatgtacacagatcatgggcacactcatatattgagtgtgtctcagatgtagattgggcaggttccaaagtagatagaagatccacttcaggttactgtatttttgttgtagggaatttggtttcttagaagagtaaaaagcataatgttatgtcacgatccaatgcacagtcaagatatagagctatggcacagtctgtgtgtgaggtgatatggatatatcagctattagctgaagtgagactcaaaacttcattgccagcaagattgtggtgtgataatcaagctgctcttcatattgcttctaatattgtgttccatgagcggactaagcacattgaaattgattgtcattttgttcgtgagaagattcagcaaggttaagtttctacaagatatgtgaagactggagagcaactaggggccattttcacaaaacctgctaatggggtgcaagttgattatttttgtaacaagctatgcatgatcaagttgattattagctgcaaaattagctagaaattaggctaatcagtttcctttattctcttagtttccaaggatagattccctaagttgtgtacaaatgtatgttatttcctcaatggaatatacaagtgaaccattctcctcaccattgtttacatgtaccaccagggtacatcaattggtgtcagaacaccgactccagtgaatgcaatatatgtgaatggagtttcgaattgtgtgaaggtagtgcatattgttcaaagtgatgtcacttgattgaaggaattggtccaccaccacgagtttgagcttgctgcagccaaacaagatttgttaatttatgggcaatcgacgttaatcaacttcatcgatggctctgccatggcaccactgctttttgatgacaaagaagtcaatgcttggacctcttgggccaatggtggcaactaccatcattctacatttgcctgtactgaggttcattcaatactttcaacaacttgcaatgcctcatggatcgataccaccataacgatgagggtgtagtccactgtggtggaaggaatggttgaagctcgatcccataatagccaataatcggcaagggctctcattgtgctgccattccaaaactagtcctcaattggtagtgcatatagttcaaagtgatgtcacgcgattgaaggaattggtccaccaccacaagtgtgagcttgctacagccaatagtcgacaagggacccataatagccaataatcgacaagggacctcgttgtgctgccattccaaaactagtcctcgattggtaatgcatacagttcaaagtgatgtcactcgattgaaggaattggtccaccaccacgagtttcgaattgtgtgatagtagttacagctcaaagtgatgtcactcgattgaaggaattggtccaccacaacgagtgtgagcttgctgctgccaaacaagatttgttaatttatgggcaattgacgttaatcaacctcatcgatggctctgccatggcaccactgctttttgatgacggagaattcgatgcttggacctcttgggccaatggtggcaactaccatcattctacatatgcatgtactgaggttcattcaatactaccaacaactcgcaatgcctcatggatggataccaccataacgatgagggtgtagtccactgtggtggaagaaatggttgaagctcgaagccatatagccaataatcggcaagggacctcgttgtgctgccattccaaaactaattctcaattggtagtgcttacagttcaaagtgatgtcacacgattgaaggaattggtccaccaccacgagtgtgagcttgctgttgccaaacaagatttgttaatttatgggcaatcgacgttaatccacttcatcgatggctctgacacggcaccgctgctttttgatgatggagaagtcaatgcttggacctcttgggctaatggtggcaactaccatcattctacaattgctagtacagaggttcattcaatactaccaacaactcgcattgcctcatggaaggataccactataacgatgagggtgtagtccactgtggtggaagaaatggttgaagctcgaacccataatatccaataattggcaagggaccttgttgtgcttccattcaaaaactagtcctcaattggcgcgggtgatgactactcgctactcttagcacatcgaaggtagctagcagcttactacaatcaaacaggtggttgctcattgtgttcctatcttattaacgatccctatgtgtgcaatcaaacttgcaacaacatcctccacaaaagcgaggcacaacctggcaacagtgattcattatcgccactactactaatggaaacaagcttttcgattgagatagcgacaaccaacaagtttgttaatctcacgattagacgcaaagcaattatgggagaacagtggaggttagtgaagatgttttgtttttggaaaatgatttgaagaaaaggaactgaagatatcctagggcttatgcaacccattctaacaataaattgcacaccatccaagatgtacgtctagcagtgaagatgctgctcacggatttgaagacatcgacactgccattcatcaagaaagacacaactaggatcattctgctgaagccaacgacaaatggagattgatagattatttccataaaaccctatcacttaccagcaagtttgttaatctcacgatcagacgcaaagcggttatgggagaacggtggagggcggtgaggatgttttgtcattggaaaatgctcttgacaaaagaacttaaagatatcctagggcttatgcaacccaatctggcaatgaatgcacacctccgagatgtacttttgacggtgaggatgttgctcacagaactgaaggtgttgacaatgccattcatcaaaaaagacgcaactaggatcattttgttgaagccaaagacaaccctatcccttacagcccagttcattacatcttgttccaaacccatcacatattagcaacaaccttaacccaatggatcacgataatgcgatggacatatgggacctagtagggcccatttaattgtttcttctccatgtaaaggactcaatagtcagtacccgatttactggctcatacttgacattcaccctatactaacgacgatgaggtcacaaccccgagcttgcacctgggtccggcacaaagcaaatggtgtgattgtcaacaagcaagttttgacaatggctctttctcttaattcatctttgttgttggagggtttcattatgagagcttgggcacggattgttgtctcaactccattaattttctctaagtttattgaccttattttaaggattcctttagctctaagggactgaaattttgctgatgttttagtgaagtaacagcgttgggttttcgactaagagcaacaaactcaacttctactttttgagtgtgcatctaggtttgaaatgtgtttccaatgatggagacttacaggttctgattctggaattggtgtagcatcgttgtgtgtttttcctacttacacttaccacgaatctattcttaacatgaagctagaagtcactcttttgtggggcaaaaattcgcataatagcataaaggcttctacactcagtgcctcacttcagcattaacttgttttgtttatgaagggaagtcaaacaacattactcaatttgtttttcgttactagtcaccatgttacgttgtggtttctactcaaattttcttgttctttagtttttcccaagttttcttggtgctattttctaacgccttgaggacaaggtgaaacttgggcaactggtaacattagacctcatatattgataggcaaataagaaatgagggtatatgggtcgtaggaaaaagtatttttgtattgggtagtttggtaattttgtggttaattagagaatggagtatgagaatggtgagaaaggaatatacgtgaattcaagagtgaaacccagcatcatggagagctctaaatctctcaaatactagaggaaattgtcattgttttgccatttttaatagacaatttcaatctgttttttcttcattagtttgctattgccatctttgtgtattctgatttgtgtaccaccaacgtacataaactgcttgcttataactagtcattttcacaaaacttatcacacaaaatgtatttcgtgtaaaatgcactttagtgttcatacttatagaagtgcacttaagtttcatacttataatgtatttcgcttaaaatgtatttcgtgtgaaatgcactttagcgttcatacttataatagaagtgcacttaagtttcagaatctaacttagttatgtaaaacgacggcacatatgaaactctttgaatgacagttgttgcttaattcatcacaaaaatgctcaatttgaaactctttgaatgacagttgttgcttaatttatcacaaaaatgctcaacattatctaataaacttcaacaaattccataataagtccacaatttagaaacacgctagaaacgtagttttatctttattcaattctcaagctttatttattaatgtgtttcgtaggaagtattgcaaggaaatagtatatataggccttatttgactgagcttctgcttttagcttctcaagagctattcctgagaaagctactaaaacaagcttttgttaaaagagctttttaaagttaaaagctaaaactcattcgttaaccaacaagcaacagaaatgcttttggagcttcagaaggccaaaagcagctcttaaaagcttaggcaactagggacataccaacaattaagcaaatcatttgaacttgaattgaaaggccggacacatacccaaggaagggggcttcgatgcaaagtgaattgagcctagtgttgaagatttagagaaagcaagaaggatcatacgcccatcagggtcccatgttgctccctgaaataaaaagacacaagtatcaacatggaaagagcaaactctacatattcgaaagcaacatcaaagacaatcaacgaaatgacaacacaactctaaattaaaaggaaaaattataatcttgattcttttatttggaaaaaatatgtatgtatgaagtattttattgatcatagtgacaaagttatagtttagagttgttcgagagggtgactctgcacaagagttttctcttagcaaatctctagctacccttccaaagagccctttccctctaattatagagggcaacttaagacaaaaaacactacaactcaacccttttcaaatgaactacagccacctagatcaattaataaaagattcttacaaaaggacaactaaaatattactgaaataatacaattagtactaagccctcctcttataacctaagtgatgtgggagtcctcccaagtagcttgatagaattgctagacctcctata

SEQ ID NO: 18281 - DNA, 6637 bp, Cannabis sativa
gagaggaagagagaggctgagatgagatttgaaatgtgaggggtagttttgggaaattagtaaagtggtcatatatgaccaattttaataactacgcatttagaagaaaaattataaggtattttagatatgaaaattcaaatttcccttttaaaattaagtgtgataaaaatttaaatagacgcattatcatttcatttgtcacattttacaaaacttaataaaaaaaccattttataattcaacaattatttttaacgcacaaaattattaaacagccaattataatgattggctaaaagtgtggtgggtcaaagtggctcatattggagtcagcctttgccatttcttaaaatatgtatatatatatgagaaccaatagtaaatcgaaacgtgtccaaggtcataaacaaagcaatgatgacgatgatgatgatgatgatgaccatgtcactaacctatgtcagcacacagatacacacaccctcactctgagagagaactttcgtctccctctctctttataatattctttcaattcaaacagtaaaaagagtagaaagagagagtgagataattgactccaaacaagggtttctttttcattcttgatcgtttctgggtcttcggtttttcttttcttggactctaaggtaaccttacttcacttattctcttctttttttttttcctattttttgtatgaactattgaactgatgtgtgtgcttgtttacttctaacattcttgcccgaatttgggtatttctttttttgtttgatgattgctaaaatggtgtattggcaagtgggtttcgcatttgttggcgttttatgtacgtagaaagattaacaacattaactactgatgatttaaattcctgggaatgattgatctatttcagtttttgctttgaatgtctttgcatcttaaattttttgtgggtttatggaacttgactgtgtgaaatcaaaattatctggcttatatagctttcttaacagttatggaacagtctttatttaattctttctaatagagctcgaatcaacttatatatagcttcaaaatcccatgcatttgcctctttttatgaaataataaagtgaaattatggaagagataaaagtcttttttgaagaatttaacaaaacacagtgaatgtagtctttgttgacagtaagattgattgatgtcaagtcatttctcaagttgtatgttgaaactcagtgaatgattctgtagtagaaatttttagcatgattggttttagtatatgtgaaattttaaactaagacttgctaaccactatctggtgttaataggagtggatccaattaatttagatgggtaagagtaagacggtacatttgtctggattcccttcatatgtttcggctgaaagtgttaagaaatttctggaagagcacacaggagaaggaactgtgtatgttattaagcttcgtccacctaagaatgggaattcaagatcctttgcaattgtgcagtttacctccatgaaatgcgctgagctcattgttgctaaggcgagccagcgtttgtggtatggaagttcctatatcaaggcatttgaaatggaccatgacactgtaccgaagccaagaacatttgaccacagcttgaaaaacataaaactatattttggttgtcagttgtcaaaggaaaggttttcgtttctatggaatgtggcgaatgtatctgtggattttgggactcgtcttcgaaaattacacttctatttaacaaatgatctagtggagtataagcttcagctatcctatgagaacctttggcaaattgagctgcatcgtccgcgtggtcaaacttccaaattccttttgattcaggtttattgctttacctttcactctgttttctttattgttgggaattctacaatatcttgcatttaatacttttagtatttagccaataacttttttgtgtataatgcaggtgttgaatagttttgagttcttctacgttgagtttttgtctgtcttgtgaaacttcctattctgaatgaacatttgaacaagattatacgcgttttaactgtaatttttctaggttatttttatttattttctgttctgttccgttctgttctgttctgttttttttttttcacttaatatgcatgatggctgttcttcttatttattttgaaaatgctttaatgggttaggagttacattaattgggttttggaaaattcctatttttaagtaatccttaacaattaggaatatgtacatatgttattttcaaaaatgtgtcaaaaaatcttataatgtttccagagaattgtaatacatttttggtttgagatagacaatcaccaaatcagaataagtctttagaattgataattgagaaagatatatatatatacataaattgtattactgcaaatcttggttgtaactagaagtatccatattatgattgtggggaaaatttaatcggttcctgtcctacttgatcattttttatttagagcttttaaatctcaatttcacattatccaatagatgttattaattactttcattttgtacataaccttcctttcatcatctacacttttttacttgtcatttctttcctgtgcccatgtttttagtttgaactatccaagttctgtatgtttaactgtattagtttgggaaaaaattggaagtgaaagaattgcattatattctctcttaaattcgcctgttgacgattagttcccttatctcatgcaagatttgttcaataagtggtttcatttttaccaggaacatattcatttgctatactcatgatgcatatcatttacttaatgtttcctactggttagattaatccttgatgtaacattatgcatttttagttgcttggcgggcttcggatttatgagaaagatgtgcgctcttcaggaaatatatacgaagaccctctctataattattttagggacacccctgacgaccaatggatccgtgctactgatttcactcaatcatttcgcattggtcaatcttctgcgctttgtttggagctgtcaaacgggcttgaacttccaaattttcgggaaagctttgcttactataaagaaagtgatgagcaatttagcttggagcgcggtgtccctttttctagcaacttggctcttgtccctattgttggtcctccttcggatgttcatttaccatttgagattttgttcaaagttaacatactgcttcagaatggatgtctttcaggacctacacttgatgctagtttttatcgattgattgatccaagaagagtcaatcctgactgtatagatcatgcccttgaaaaactgtatgctttaaaagaatgcacctttcaaccttcattgtggctttctgagcagtacaagaactaccgcgcagcaaggaggcccccgaaaccatcagccatagccttagattctggattggtatatgtaaggagggtccaagttacaccaactaaagtatatttttgcggtccagaagttaatgtctctaatcgtgtgttgcgccattataaacattatattgacaattttcttcgtgtttcatttgttgatgaggagttggaaagattgtattcaacagatttatctccacgcacgtccactggaattgaggacagaaaaactgaaatctatcacaggattctctctgttcttgaaaatggaattacaattggtgataagaagtttgaattcttggcattctcttcgagtcaattacgtgagaattctctgtggatgtttgctgcagaagataatatagatgctggtgaaataagagagtggatgggagattttcgcagcataagaaatgtggccaagtatgctgccaggctaggtcaatcatttggatcctccacggaaactctcagtgtttatgatcatgaagttgaaaatattcctgatgtagaaaagattacactgaatggagtcaagtatgttttctctgatggtattgggaaaatatcttcagaatttgctaagaaagttgccttaaaatgtggctttaaagagttcaccccatcagcttttcagatccgatatggtggatataaaggtgttgtggctgttgatccaacgtcacaagtgaaattgtcattgaggaaaagcatgtgcaagtttgaatctgagcatacaaagctagatgttttagcctacagcaaatttcagccatgttatctgaaccgtcaactgatatctctcttgtctacccttggtgttgaggatcggttttttctgaaaaaacaaaaggaagctgtagaccagcttgatgctatgttgactgatccattgaaagcacaagaggctctggagttgatgtcttcaggtgagactactaacatcctgaaggaaatgctcctgtgcaattataagcctgatgccgagccattcctttcaatgatgttgcaaacattcagatcatctaagttgctggaattgcggactaaatcaaggatatttattccgaatggaagagcaatgatgggatgtcttgatgaaactgctaccttgaattatgggcaggtgtttgtgcagtttgctggaaccaggcataggcgatattttgaagattcatttatgtttgatggtggtaattcaaaccagaattttatcgtccagggagtggtggtggttgccaaaaacccttgcttgcaccctggcgacattcgtgttctaagagctgtcaatgtacctgccttgcaccatatggtggattgtgttgtttttccacaaaaaggaccaaggtatgaaatgattcacccaaataatcttagttctgcagtaaatcatttgttttgtatttgtgttttcgattgtgtgcaaatattttctttttggatactgatttactgaagtgcaacactagacctcacccaaatgaatgttcgggaagcgacctcgatggagatatctattacgtttgttgggatcctgatttggttcctaagaagcaaattgaacctatggattataccccagcaccaagcaagcacttagatcatgatgtcacagttgaggtaacacattgtgttgcttaaaatgagctcttcaaattgaattttactgatgcttaacttcctgtttcatatacagatcttttccatgtgttttgcttatgagaaagattaccttgtttctttgatgcaggaaatcatggaatatttcacaaactacatagtcaatgacagtctgggaataattgccaatgcccacaccgcgtttgcagataaagagtctaagaaagcaatgagcgattcatgcatagagctcgcaaagctattttcaattgctgttgactttccgaaaactggtgtacctgctgtaatcccaagtcatttgcatgtcaaagaatatcctgatttcatggagaagcctgataaatctacatacgaatcacaaaacgtgattgggaagctcttccgcatggtgaaagacatttcgttgcatgatagctctacaaggttcttcaccaaagaagtggctaggaggtcttatgatcccgacatggagtatgatggatttgaggagtacattgatgatgctgtcttttacaaaggcaattatgattacaaattgggtaatctgctggactattatgggatcaaaaccgaggcagaaatactgagcgggagcataatgaaaatgtccaaatctttcacaaaaagacgcgatgctgaatccattaacatggctgtaaggtctttgagaaaggaagctaggacctggttcaatgaaaatgggagtagtctagattctggagctgatgaggtatatgcaaaagcttcagcttggtaccatgtcacataccaccccgattatttcggtttttataatgaaggcatgaatcgggaccattatcttagctttgcatggtgtgtttatgacaaacttgtgcaaatcaagagaaataatgcaagcatgagaaggtctctacaacaatcttctctggaaagggaattcggtcttcgattgcaactgagataagaaatttgtctgtaaatatcatcttaaacttgagtgaaacttggtctctccctctaagaaaaaaatggtactgatgagttgtaattatataatcaagtttgctgtatcatcttccatgttgataagtatgtaaatatatatatatcagaatgctatgagtgcttcctttaaatgatttttctcagttttctttactttactgagaaggacccttcattatggctctttggtgcatagtaagcttcaccatatcattatggctctttgtagtttcttcttccatttttcgaaaactagcaaataatttacatagtcaaaaagacgatatatattgttttaaagcctgtttttgagatcgaaatacttaaataactacattgtatattgttatataatttgattataatttctattggaatagaaacactcctaaagggtgttagaagtaagctatttaagatttttctccccaaattatgctcttatcatataaatacaaataagctatttagaatttttgtccctaaactgacaaatgcattattgtgctagtccccaaattattcaaagtaacataatgtgacttgcggtgtttacggg

SEQ ID NO: 18282 - DNA, 4975 bp, Cannabis sativa
ctaaatgaaaatactaattagctcaattggatgttagatgtattaaatttttggatactccatccaacatccgatccgattcaattgaatattcaaaattagcatcaaattcgattcaatcacaattggatcttcaatgtttggcggtcaattataattggatcagtcggttgtcaatgaattagattgatttatacacactctttttgcacaattagatattgagttccctatattttaatttgatatttatctggagaaattgtaaaccatttgtaaggtaacacttcatggtgatgttggatgtaattttacataaaatttgtgttattttttttataaaaaaaaaaaaaataaataactttgtgatataattgtatcaaattttcgtattgtgttactaatgtataattataaaatttgatagaaaatttaatatttaattaattttattactaaaaatataaaacaaaaataatgggtttatcatgtaaaacaattaaaaaatataaataattattagacttaggcttagctttgtattcttgagtcttagttgcttagaaaccgttaggattagttagctagttaattataattcagttagctaattctattgtaataataatagaattagtttattccttcttatcttcttcttctctgttttctctattttctctttccgcactaatatggtattagagccttgagtgtgctcttcaatggcgcggggtgagggagttcaaaccaggagcactgttgataactctaatcgatttttcgttctcgacaacacttctcaatcctactctgatgatgcacgaaatcccttcttcttgtctaacagtgatcacccctggcgttagtctggttccaaagatcttggaaggatgtgaaaattatagctcatggagacaactgtggctttaatagctaggaacaagctaaaaattgtcaatggaaagctccctgcacctaatgaagatgatgaagactttgacatctggaatcgatgcaacagtattgtcatctcatggattcttcatgttgtcaccgatgatattgcagagagcatcatgtatattgataatgttgccacgatatggtctcatattgaggagcagttcaatcaaaagaatgctccacgcgttttcaaaactattcgaaccaaacagggacttattcaaggatcgaacaatatcacagcctactttactcgactcaaatccctatgagatttgattcaagaatatcggccacaaccaatttgcagctgtggagctatgaaaatcattcaacaataccaggatgaggatcgtgttcttgaatttctcatctctctaaatgagtccttcagtaatgcccgttcccatatcttgatgcaagatcctcttccaaacatcaacaaagtttattctactgtgattcaggaagaatgacaaagatgtttgtttattccacacactgaaaatgataaatctggatccaatgatggtggttttgctggtaatgtccaaccacacaaacctaaaatgtcatgtagtcactgtggcattttaggtcacacaatggacaaatgctacaggttgaatgggcatccactagggcatcatctatatggaagatttccaaacagaaatacagtacctattgggaaacctaacactcaaaatggcaactcatatggaaataatggtggaaaaccataagctgctaatgttactagcaatatggaaatgaaatctaggaaaaatactgatggtaatcaagacttggtcaatcgactctatgaagtatcaacacatcttggcaatcttttctcaaaagtctactgattgaactacagggaatcaaagtgatcctcctttagcttctcatttcattggtaaacattttcttaattttaaatctaagtggatcattgatacaggtgccactcatcatgtttgccatgatatttcactcttcactgtttttttatcataattcatccataaaatctgtaatttacctacaaattcttgtgcaaaagtgtcttgtcttggtacaatttagatctctcctaatttttcaatttctaatgtgttgtatgtccctaaattttattgcaatttgttatcagtaacatcaataattgatgtttagtattttttctatcatacttactgtgttattcaagacaatgtgagcaagaagaagattgggatgggtgaaagaaaagaaaacctatactacttacaagttcctatgccatctgatgttccttttgttttttcttcctttttgattcgaaaatcactgatgacacaatgtggcactatcgattaggccacccctcttgtgacacattcattgaataaaagtttgcaatttcataatgctaatgactcttgtcatttttattgttttatatgccattttgccaaccaaaaaaggttaccattgccctccaatcctcacattataggtcataattttgatttgatccacattgacatttggggaccatttaacaccctaactgtttctggctataggtattttataactatagttgatgatcactcgagatatacatggattcattttatcaagcataaatcagaagctcaaactgtcattcttcattttttgcagcttgttaaaacacaatttaatgttcaaatcaagggtgttcgttctgataatgctaaggaactgaaatttcctgaattgtttagttccctaggcatcattcactataactcttgtgtctaagaccacaacagaattctgttgtggaaaggaaacatcaacacctgttaaatgttgctcgtgcattactttttcaatcccatatacctttgacatattaggataaatgtgttgcaacagcagcatatctcattaatagagtgcctacctctaatcttggacacaaaacaccctttgaaatcttacactctgaacactagcataccaacatctaaaagcttttggatgtttggcttatgcttctactctacctcaaaacagatccaagttttcacctagagctgcaccatgtgtctttctaggatatcctcctagaatgaaggcatacaagttaatggatctcaacaccaatagagttttttgctcaagatgtgagcttccatgaaaaaaatttccatttgggaaaactgattcattatccaatgaacagatgcaatttttttccaattttacttctcagtcatcatctgattttactccaatctcctcatctgatcctattccaacctcctcatctgatcctatttcaattaccccatctgataacacaccttcaacctctagaccccatagagcttctgttaaacctgcatatctcaatgattatcattgttttttttttttatctactaatggatcttttactactgcatttccattgtctcaagtgcttgattacaccaaattgtcacctagatttcgtgccctcatactctccatatccagctactcagttgctcaattttttttgagtgggataatgcaatggatactaaaattgcaagccttgaaaagaataatacttggatcattgtgagcctaccccctcatcaacatgttattggttgtaagtgggcttacaagatcaagcttaatgctaatgttagcattgaaaggttcaaggctaggttggtggctaaaggttacaatcaacaaaaaggtgtagattattttgatacatttgcacttgttgcaaaaatggtaacagtcaaacttatcattgccttggctgcaatccatggttggttcttacacaacttgatgtgaacaatgcatttctccatggtgatcttcatgaagatgcttacaagactctacctctagggtatagggagactttaccacccaatgttgtttacaaacttaagaaatctctctatggtttgaaactagcttctagacaatggtttgagaagttttctactgccatggttgaagaaggctttaaacattctgtactgatcactcactctttatcaaacattttgacataatttttattctgttgctggtgtatgtagatgatgtgattgttgtgagcaacaatctggttgaaatggaggctttaaaaaccagattagatggtaggttcaagctaaaatacttgggggaattgaaatactttcttgggcttgagatagctaggtctaagaattgctcttcaattgttgaaagaccttgggtacttgggttgcaaaccagcaagtacaccaatggaagccaacataaaattgtgggaaaacaacaaagactctttggctgatcctaaactctatagaaccacaattgggaagctcaaatacttgactatgacaaggccagatatagcatacccagtcaacaaattaagtcaatttcttgctatactcctagatcaactcatttggttgctgcagaaaggattttacagtatgtaaaatcctcaccaatggaatgattattctttcctgcatcatcaaaagtgcagctcaaagcatacactgattcagactgggtagcttgcattgatacaaggagatccacaactagcttttgtatttttcttggagaatctataatctcatggaagaacaaaaagcaacaaatgatttctagatcctctgctgaagcagagtatagagccatgacaaacacaacttgtgagcttgtatggcttctctctctactcaaggaattaaaagtagaacacaaggaactagccatgatgtattgcgacaattgtgcagcccaacacatagcctctaatcttgtgtttcacgagagaacaacgcatatagaaattgactatcatcttgttcgtgaaagagttcagcaaaggataattaaaacggcacatgtgtcaacaaaggaacaagttgcagacatcttaactaaggctctatttccaactcagttcaaagctttaaaagacaagattggattgataagtctatacatt

SEQ ID NO: 18283 - DNA, 2681 bp, Cannabis sativa
acatgcacatcctaccccaacccccagccatgctgcaactgctcgccagaggtcatttaagcgtaacaactcaaacgcatcctccaacggttcctcctctcaaccaccagcaccagctaatcaagctgttgatatggcttctacaaatccctctcctagggaacatacacaaaggagtggatttggctctcactctgatggaggtggtgatcatcttcagcaacggaattcattcagaaacaggaatggtggtatgcacccgcgtggagatggttctcatcatcataattatgggaaccggcaagatcgagggaatcatgattggaataaccgtagaagttttaatggtagagactcacacatccatcaccaaagaggggttcctagagtatatcatggtccaacacctcctagtccaacatttattcctccacatatccgcccttatggtactcctcccatgggctttccaggtaagctaacttattaataattttatttctagacatgttttcacatattcttaaatattctatgctttcatctattcaataggagaactgggacctccaatagtatatcttcctcatcctcagtttggagtcggagcctcaatgcagcctatgttcatccctactccagatcctcagttaccttctaagattgttaaccagatcgattactattttaggtactcattggtcttaaaatgtaataatgtatcattttatttcaatctctctgttaccattgtgcctttttccttcttaatgtctaactgtgggtgcatctcttattcatttgatgcagtaatgaaaatcttataagagatacatacttgaggcagaacatggatgatcagggatgggttcctatcaccttaattgctggttttaacaaagtgagtttgtttaggatgtttgagttgtttcatttattgtcttagcaatctcccttctcctctctttctccttgtctctgcttctatttatacttcatgttcttccttctctgctgctttcgttggacgcttctgttttttttttttgttgtgtcactttactttctaattgtatttgtaggtgaatttaactacaagtttttccccatattctctttttccttttcttgtttactaatttttgaagttgtggttatcaattacacacactagcctaatacactaggtggttatcttattacctcgctaaattggttatgtgaacatgttgatgatatcttcagtttttctcccaatgttttaaacctgcaatgttatttacctctcttttttatcatgttaccttatttgtgattttctctaaggattggctgttatttcataatttcttttcttatggccatgaaatagcagtttgaccttatatttcccttgcatgagtatgtttttctgtttggcaaataatgcattgcattaatgttggctccgtgttgtcccaaaagatgaagtcttcttgtttcatggtgtttagtatgggttaaatttcttctaatattgatctccactgtaaaatgtggctttgatacgtgttttcaaaatcttatataactattgaattcatttaagaaaagccgtagtcataaggaagcaatgaggtcaacaaagagttttgttgtgtgtgtcctgatgttagtgcactggatattgttgcatgccacgtgattaattttgacttacttattttactttgtctgacaaaagtctactgagttagcttccgactgaaaaaggaaatggaattttcctagacatgatgcgaagcctaatttggaagagaaccattagcagcagaggtggtttttaggtgtcattatgtttaatagttatactatactgtcttgttagcttcataatgtaaaattttgttatgttttgaaaactattgcaatattttgtcttgcaagttggatggtagattattttatttctttttacggtccaattttttcgtgaaatcattgcaactacagtttctttctattattacttctacaggttcagcttttgactgacaatattcaacttatattggattctgtgcggatgtctagtgctgtggaagtacaggtatttggacaaattacatgtttggttctcatatagtttgagatttgatggttcttttccagtcttggattgcatcataatgacatttttttaatagtcacgtgaaatgtttttctgtgctaatcttgtttttctttaccttgtatttaccagggtgataaagtaaggaggcgcactgattggagcagatggttattaccccaaactcagcttcctaccgttcaaagtccccgtactcctggaagttcctccagtcaaagagttgcactggaagagctgagtattaacaacagtaacagtgcttcaaacacctaccaacctcagctttccaatggcgatggaagtgctcaagctggagcagaacgctcgttttctggaagaaattaaagtaagaaatgtgcatcaatgcacatattctttttgataaagaaatgaaggggaggataggggaggagttggatgagcatgggggttctaatgagtgtcctacaatggcatgatgaaacatgctgtcttgcggggaaaatacaatgacagaatagaatgggtaaggacaaccactaattaaggaacagaagaaaaaaaaaaaaaa

SEQ ID NO: 18284 - DNA, 8868 bp, Cannabis sativa
atttttaacggccaaaaaagttcatggggcataatttggtacatgtcaaagttcgaggggaaaaattactaattagcttaatttatattagaactacaacaataaaaatgtctctctattttagtttcttagctaaaaaaaaagaatactattggaaatgttttagagaatattactaatcaattataaggtgctacctcattggtgcccaataataatgctattacagtacatatgttggccaaaaaaggaagagaaaataattaagaatgtacttgtgttcatttatttttttttaggagtcaaagtagtatttgtatatttcttttaaatgaaatatcaacttcattgaattaaaagcattctgaatacaggagagcctttaaatcggcccaaacattatgttcgaaaatactacaaccagaggaaaatcgagcatgcctagcaataacatgagtaactcgatttgctggtcgtttaataaaatgtattttgacatcaagtagagaagacaataattcacgacaatcctgaataatcaagccaaaaatggaagacatcccctaactacttcggattgcttggacagtgagaagactattagtctcaagctctatattatgccaattgttgctcttattcagctaagagcttccttgatccccaaagcttccacgacttcagcagagtaagaactagctttgtaacatgttttagcttcaataagcttgcccagataatctctcgctacaatatcaaagccataggagttctcatgatgaaaaattgtagcgtctacattaatcttgatatgatttgcaatgggtttagtctaaagctcggccccatcatcaccattatcaaaagatagtgatgatagagcaaatttatcctgagcttttcgtcaatgatcaagagtgatagaagttgtagctaaaacatcgttaatggtggattttcattttttccacacaacttggtttcgtgatttccatatagcccaacagagcattgaagctctacaaacttgctctgtatcacaaacattctgcatgttctaaaaccagctgccaaaggttgaaggagcagcaatattaatcagcataccaaatggtgactagcaggatttggcgaaatcacagctgagaagagagtggattgcggtttttggatgtaaattacaaactggacattgagctaaaattggcacatgttttgtaacaagattgacacaagtgggcagtgaaccagaaataacacgccacaggaagttagacactttaggtgggatcttcaaaggccatagtttacgcccgaaacccgagggtgttggagctgctggtttttcatgttgcagtaggaagtaggcacttcgcacaaaaaaagagcctttatggtcagctatccaagaccaaaaatcggcccctgtcgtgctacttaaagggattcccaggatgatgttgacttcatgagttggaaacaagtcagtcaccacatctacatcccatgcacgaccatctagctgaaataaagagttgaccgaattatgttgcaaacttgggtgattagaagtgataaacatgttttggggatttggcagctaaggaaaacccactatacttgtgtttgtaccatcaccaataacacgagcaccacccaagcaaaccacatcttgagcaccccaaatgctacgccaaacaaagcttggattgttaccaagcttagctgaaagaaagtcaaaatgtggaaagtatttcgctttgtatactctagcagcaagcgagtcagggttacacaaaagacgccatcattgtttcgcaagcatgtcaagattaaaatcatgtaagtgtctaaaccccatacctccttcttctttgggaatggcaagttgatcccaagacatccaaataataccacgccctttactagtgttggatttccaccaaaagttggccattaatttctctatctccttgcacataccaattggtaaaagaaatacactcatagcataggtgggcagcgattggatgacagttttgaggagggtttctttccctgcacgagataggaatttcccatcccagttgttgattcgagcaataactttgttattgataaaaccaaacatagcatttttattgcgaccaataatgttgggaagaccgagatagaggctgccttcaagagcttcattcatatgaagagtagaacaaatttggattcgagttgtgccatctgtgttggggctgaaaaaaaatggattatttagatggattaactttttggccagacgcattttcgaacagctggagtaaattaaaaatactagcagtcgcaccctccgttacttggcaaaagaaatggctgtcgtccgcaaacaagatatgtgtgatagatggagcacggtgagcaacacggcacccttgaatagttctttcagcttcaaacttttgaattaaagctgagagaccttcaacacatataatgaaaagataagttaaaagaggatcaccctgtcgaataccacgagacggacaaatagactccaaaatatgaccaccgtgcacaactttgtatcgaaccgtcaaaacacaagccataataagcttgacccatctactagcaaatcccatacgaagcatgaccgctctaagaaaacctcattcaacccgatcatatgctttgctcatatcaagcttaagagccatgaaccatttcttgccctttcttttacgttacaagtagtgtattacttcaaaaacaatcatcacattgtcagagattagatgccccagaatgaaagcacttttagtatcagagatgatgtgatcaataagatcccgcgtacgattggcaagaactttagagataatcttataaagcacattgcaaagggaaatcggtctaagatcactcataacaacaaagtttttctttttgggaatcaacacaaggtgagtgtcatttaggctatcgggcaaagctccagtagaaaataaatctttgaccaagttaataacatcgaaaccaacaacttcccaatgatgttgaaaaaattcaagacccataccatcaggcccgggtgccttgtcagtgtgcatagagaacacagcaaacttaacttcttcatcaaggatcggtttcaataatgcatcattgtggtttgcactaactgaaacttttatattgtcaacaataagctgtgaagaggttttggacgtttggaaaagattgagaaaataatcattaataatattgtcaagactggttgcccaattcttcccgtcaccattagcatcttgtaattgatgaatttaaaattatgtcttgattatgtgagggtgtgaaggtaatttgggtacaatactcataaaaagagatatatttaaattaaattttatttggatataaatttagttaatatagtattaaaaaaaaaaaaaaagagtactctttaacttttctcataaaaggtaggttggcaatgataccaactagtccacacaataacaacaatgggtaaatattagccccttcaaaatttatccatagattagaaaagataatgttccaaatgaattcaaaaaaagctccacttgggtgtttttcacacccccataaggaattctcaataaatattttatcaatgtgaaaacattttgcttaaatttgaaattatttttattaaattcaaaatgtatagatcatttttaaccatttaacaaatcataaagctcaaaatatggtattttaggatagaaaatcacttaagctcattgttattaagcactaataatacttaataccaccacaaggtaatacctatcaaataatttataataattattaaattaaaatataattaatatttctcttcacttataacaaaatgaaccaaaatagtataatctcattaatttatattttcattataagaataataacaaaatgtcccatgtccttattaaccaacttacacaaaaaaaaaaaataacaacatatactttttctataaaaataaataaatatcaagtggaacatctaataaaaaatataaactctttatttttacctacaaaattaagttgttattgttgttcctttgagttcaagctagggttgacaaagaagatctaaagaggttgaaatagacatgtatgaataaagccaccaatgtatgaatgaatttggtgccacaaacctaatttgagcttgtagaatgatttgagcagacatccaagttcactgcaataaatttaatggacaactaacttcaagaaatcttaaatcatatcgaactaatcgtcgtggcctcatcactgatacttgatctcaaatccactgtagtctgctactgtttgttgtcatagcaagaaaatgtttgaaatttataccataacggattattagacttcagcaccgctatccttctgtgtgttgtttgcacccctttggtccataatgctgagaactgcgccttacaaccttattgcacaagtaacaatagttggtttgacaagcccagcaaaagagatgattattgttgccaacctaataaaaaataagaaacaggacaaaacataaatctgtcgtatcgacacagcatctcagtaagcaaacggcgatgaaaatgacaatgatgatatcgtcatggaatttaaaacgaaaacaacatataactttcctcagcccacagaatggaactgaaagattttttttttcgaagtttacttctcgagtggcaaattcgttttatgtttttcccaattcccctaacctgaaaatacaccctcccctcattcttttgtcaacaaagatactctaatttatgtctcaaacattttggctatctagggagaattttaaacaaggaacaacaacacattatcagtgctttagtgggaagatatcgatttaagcaacgcaagactaaagaagatttccttattccctcgatttcattttaaatattttatgatcttatgcagcacagtaatcgttttgatcctaaggattctcatgattcgcattctttactcaccttgaaattaaattgacgacaattaggacaaaattgaccgtgatcgccaccaccatagagttgaacttgcgcctgggcctcaatctgccgttgatttatgcgctcctcccagttctgaatcattgctagagggaacaactcacatgtccctcccctttaatcgataagaggtttattagtcccaaatagagtaggcgaaaaaaggaaaaaagcaaacataaatcctaacaattgagaaaaagacctgaaatgatcgtaaccatcgattgccttgttacaccgatagcagaagtattttccacagttctcacacaccatcttgttgcagccttcagttcgggagattgccatcttgcaactagggcattgctttgcatcacgaaatatttccttgaggctaagaatttcattaatcatttcgcgttctttatgcttttgggattctcttaattgggatgaattctgacgatcctgcaagcacaaagttaacattcagaaatgggaaagtttttaataaacaagacgaagaagattacaaataattattggctgtgacaaaatgattataatgtcttacaacaaaaataatacctgcaggatctgaagcttcaattccggggtcatacaatcagcacctacatgtcgtcgttccctgcaaagagtgcaaaaactaaaaaaacactgtgagcattgcgcgtgttggtcttcatcctctatgcatggtgtttcacagcgtgggcaatcggtaatatcaggcatagactcgagtgttttctgtaacgttagagactcccaccgttcatactcttcatcactgagcaatccttttaacaaattaggtgggatcatacaatcacactttgcatcagggcattttagcttggttacagtaccctcactgacgtgtatatcagaataagtcttcatgcatttacagcaaaataaatgctggcatggaagcttgatgaactcggtgcctaataatataaatataaacagtattttcaaatgtatgttcatgcatctgaagcagagtatgcttacaattagtaatgcgaaataactaaatcgctaacaaggattatttgcccaagtatggattctcaaatcaataacaaagacaataagcagaaataaagacaaattgaaggtagaagcaaattatgaataggcaaatctgagaatcatgaggtattcgagagacttaaactctccctagaacaaagctcatacaaatagtagaatagagaacaagaagggttagctaaatgattggaatcatgtccataaagaagaaaaaaatataccattacaagtgtaagcttcataatcgaacgagtgttaagagaatatcacaattgtttacgaaatattttaaccaagaaatgttgaagagtacctggatattcactaaaacaaatgtaacattcatgaatgttccgctggaagctttcgtggagtctctgatcattgtaacttctaatgaaaggaacatctatatcaggtgaaacacttcccgaaactacacgcctatctttagtgtgtttaaggccataaggaccaagcatgatctcattgtcaaaccccataaaggaaagagaataatactttagccattccacccattggtataatacctcttgtccaggttgctccttccatatggagtcaagcttcgagcaaagattggcaatctttatagaatctaaccactgaacggatattgtaaaataaggaggtagatggcttggatatgatttaggtaataaacatgtcaacacaactgggggaagatattgaactttgaatgagtatgagaactcgtctacgtctttgccagaggtcttgagatcacctgaagaatttagctttgtagtaacagtgattccatttggcacttctatatctatatgaacctgtaaaaacacaaaagtgaaagactatacatttacatatttaatcttatatgatatgaattaaagattctgaagttattacctgaaaagatttaaggcccctctgtttgtcaaaaatgagaacattttcgccgtaaatggactgcaggacaagtatctagacgaaaagaaagaatttaaagaagagattagcaaaagaaactcactatagatatagcaagaaaacaatcaatatagttagttgctatgaaagacatcactcatcaaattagaaaccgatcaagccgggtcattttattttagagctaatttgtgcttgttcaacttcaaatctggcatgttaagtattaattacattttgctatcacgagcttaatgaactaggagaaagtaaaagcctcacatttgcaaactagtttactcaaatacatttttgaatcaatgtcacagcatctttaactatgtaacttaagattctttgtctccctttacccttgactaaaattgttccaaaagtgaacatcactattgcttcacaggagtaatgacaagacaattaaactaacagagaaacatgtttctcaaatttccctaatgaaaacaatttcataatcaacttcaatctatacttaaagaacacatgtaacagtctaacacccaattaattaatgtaaaacatagtgtaatctcaattaatgatggctttatccacattaacaaccttcctattcgatcaaaataagaacacttacttcataagtttgactcacagtttcgataaaaacagatttagttataccactcaccactggaatgagcctactagaatttgatctattaacatctatcttgcgaaatttagccatgattaaatgcttaatgaacactaccacgaggctccattaagacaccaactttgttaaattaactatggcgattgaaactaaaactcattatttattttggagtaaatatctgtataagtacctaaagtttaaagttcgtaagcgatataaactcaatattttgctctggtacaaacttcgttatttagaaatatctgatactaaatattttagtcttagaatctgatgtttatcatatttaacatttaaggcaataaattatagaaaaattacaattttacacttaacctttattttaactaaccatctaaagtccccatgtaaaaatcataactttatctgaaaattaaatcaaaattaataattaaacacaaaattaagagcttgtaaaaccaaaccaattacctcatcatcctgatactgacaattactcatcaactgctcttctgacaactccacctcttcacaactcaacgccaattcttccaataaatccctaacatcattagactcttcttccaccacctcattcttcgaccctgaactactacacacacctccttctctctcctctttctcaactctttcatcgatactcaacgaacccatttcactatccaaagagacagagctgaacacctcatgactcgaagaacccacctcggatttgtcaacgaattggggtttaaccccacgattcctcggaacccacttgggattattgggctcgagattccgtgggtgagaagttgaaaccgatggatcagaggttagtgcttgattgaatttggaagatgatgattcgctgcctctgttagagcgatgaagaacaccctttcttgctcctgccatggccgaagactcgaattcgattgtatagttttatttggccttaaatttctggctttatatatatacgtttttatcacgaaataatgtttatttttaagtctaaaaaaagatttatttttattaattttaattaactaaaattaataaaaagataaataagggtgattactataatagatatttatttatt

SEQ ID NO: 18285 - DNA, 2479 bp, Cannabis sativa
atatatatatttatagtttattgtgtaatatttgttaaggtatatttcaacatttatgttcttcaaattatttattttctttctactatttgccctttgtggacaaattttatgagtctgtacaccatcacttgaaaacttctactataaattaatttcaattacaatacccattcatatttaaccggcctataaacctaaatagaaaatattatggtttgcaccaaattttgcattttccaaacaatacctatggataagaatttgagcaattttgtccttttgccatttatatagaaagttaataacactattctcgtcacatgattaattcttagaagttgaagtcggaggttgatgaagctgctggtacattgcagccatcctactataagcctcaggtgtcatagactgcaacaattgcatggacagttatatatatgtgagatataaaaaaatttactttggtttatggaggaggtgtaattagttttcacaaattaatgtacctgtggttggcatgcaaagaatgaggccaggtgatcaggaatgactggaggcaattgaggctgcaatctgctttgatcagcagcagcggcagaagcagagccatgatcccaggcgttcatgggcatgaatggattgggatgaagtattggattgattccgggaagattaggacgacccattgtgtccatggtcatccccattcccattcccatccctgccaagctattcatcatcgacatttgaagttgttgttgcatagccattggcaacatcatagccgcgggcatgttcattctgttcatcatttgaacttgagcttgtaattgcttcaaataatcgatcacttcatccagcatcgaagctttatcagtctgcagtaatcataataaaattaattaattaaaaatgttaatatttcaacaaataaataattcaatctatatactaaacatcaatcagaatcatacttttcgaactactattttacatatcagaatgtcatgtattactttatagaacccccgctaattttcgtcaaataattttatttttttatagaatattgttaatactaaaagtaaaaaagttgaccattagtaaaactaggctcttcaaatcaaattaatttacaccaaataaaagacttataattgcaactttaatttttctttgacatgaagaagctaacatacacaaaagccttgcacaatcccaaattcaaaaagcactaattctttagttgtagttaaacacgagctatattgttttactcctacatagacaccaagtactctattcgtttccgtttatatatttttaacaaatgcacgatacattatcaagtagccaacacaataataaatttttagacatcacttacatcgataattagagcaatatgcattttttgtattattcttcaatcttattttaagaattggacttacacagttacacatatgtatgtatttccttggatgtagcttattccatcttctaaagcatcaaactaaagtcctatttttacaacttgcgaaataattaagacatatagccataggtagctaggattgtatagtagaagggtactgttgagcttagacagacttgataatgagggcccaatagggtctaccacatgttagggatttaatatgtttatgtggagctgcaggtagctgtctccacacctaacactagtagcctcctcctatcaactttcaactcttaacaaataagggtttgtgtggcctagaatcgttgggtctttgtgccattgccccaagacccttaacaatttgaatgcatttaaaggctttggaccacccccgcttataagttatatatctatatttatatgtatatgtcaatcattgtctcttaagtttgtgaccttttttaacatattccgagctctcataaatatgtggaatcttacatgatccatgtgtcaatctcacccttggatatgctagtttaaactggttatacccacttgtttcttaatataaacaaattattgaagcaaaagtactactacttctactatacacatctatagctatatgtaggcatttattttcaggcaacatgttgtgcttcttattattgttattattacaattttttcataaataaaaaataaattttgtaacttgttatattaggaagcttgtggtggtaactatttacttatatagaaatatatatatatctgtacggacgaaagtttcaatggttcaaatataaagaaagtagaaagaaatgataatatatatacatgtataaataaattaagcccacagaaataggaatagaatatccatcgtagtcataccttgctggaattcgggaccagcttctggagtgtcgtcatcctttggttgatcttatctctccttttctgatacaaccagcagcacaaacagaaacaaatttcatttataattacgaaaatgtcaacataaat

SEQ ID NO: 18286 - DNA, 4948 bp, Cannabis sativa
actctcttcttttgtatatataactcacgaaatacattttatttttttatggaagcatatatatctctctttctatagtctattgtctattctattgaactcttctatttgagttcttccttcattcatccacccaatcccttgagatttgaaatcctcctctgttcatgagatctgagattggccagaacaattgaccgagaaaggctgcaattgttcctcagccatttgttgttgtcactgacggaaaagaaaaagctcaccccgatagctcttcatttgtggtatgtatgcctcttttagatttttttttcttttatcttgatatctaggtttttctttttatatgttctgtcttgttcttctcaaggtaccatttgagcttctcattaatgttcacaaaacctaattttttaggaaaatgaacagttcaatttctcatttcattttgtttggaaataaaaatgtgatttcatttggtagtattttgtttttattttattttattttttttgcattatttgatttcatttggtttgggaattttttctcacgagaaggatggaagcttctcttattagagtaaagctaagtctttaattcacattccatctcaatctggaatgagaattcaaatcctactaatgtcccaaaaccttttttaggtaatcaaatgtttgagattatgctagaatggattatgaattttttcccaaattgtgttttagtaaaatcttctagttttacatttcagtcacaatttttttcttgttgttgtttttgtgccttctctctcaacaagttttagagagtttaggtatttttattcatatatatatacgtatatgtatacaagataacaaatacttgttaatcatatatatagacctaccttagagatagaaagagctaaacaagaataaaaatgaaaataaataatgaaagtaagagataagagtcacggaccaataataccaataatgaaactcatgctaacaacatttcaacagagagcagtggtggtaaagatatgtaatgaatgtattataatatgacagccatatgaaaaaggtgtgtttggtatatataagggtgattaggatttgcatgtgacgagagaaatgacatgtgggtgaagtgttatgtggtgaacattgttgggattatatgtttgtataaaagtgttaaaatatctctctagttttgtatttagttctttccttttttttatgttttggtgtgcttcttaatttttttcttccttaagagcaatattggtttatgaactcaattctcaaaagatgagaatttgctataggatggctctaagaaaggtcttgcctctttgacgctatttgggtcattgtctatggcccttggctgtatcctctcttaccattttttttttgtattcatctactagaatttgaaatgtacagtgatgttgctgattttgaggggtttctatacgaaagtggttgtctgtagttacaaaatgtccataaaaaatagtgtataaattaatataaaaaatttgtgtctgtagaactcatgctatatagatattcctaatcaaatttgttacgtactagttgataaatagaacatggacaatttatattgactctaataatgatattttcttgaattttactgtgactttattatttttgtgtgtgtgcatacatactttttattatattttaatatatctttatttggtgttgtgtaactagaattgcaaaaagaaaaaaaaattccactatgaacaatatgatttatgcatctttgttttttgatttgtgtaagcttatgatatgcagatggataaaaattggatccatcttaacaggttagtaaataataccgtatagctttttatgatattagtttaagttgtaacacttgatattaaagtgtggtcttaacttgtagaacaactgaagaatatgagaagaaagctagggagtttgttaaaacagcagtaataaatcttagttttccgaccaagattctttgtccatgcaacaaatgtcacaatttaagacatcaactttcagatgaagttgtcgaacacttagtgttttggggcatggacagatcttacaaaatatggtttcatcatggggaagatccaaattcaattgaaagaagcacgacaaagacaagttctgaatatgatttattttgggctgttggagttcattcaagtaatgtcaatgattttgacgacaataatgatgaggttgattttgatagtctatttgaagatgctgagtctccattgtatgaaggttgtacaaagtacacaaaaatttcatccatcgttgggctatacaatctaaaaacaaagcatggattgtcagatgttggcttttgtgagatgttagagatgatcaaagcaatgttgccaaaagataatctcttgttaacatctatttatgcaattaaaaagtttttaaagacgtttgatctaaactataagcatatccatgcttgtgtgaacgattgttgtttgtatacaaaagaaaatgctaatgcccaagtatgtcccacctgccagtatccaagatggaagcaaaatgaagacacaggggagattttacaaggacaacctacaaaattgttaagatattttcctattacaccaagatttcaaaggatgtttaaacataaaaaaacagctacaagcttaaagtggcatgcaactaaaaacgaatggatgggaaaatgggccacttagtagattcagaggcttggaatgcgattaatgatagatggccagatttttcactcgaatctaacaaccttcgaataggacttgctgctgatggggttaatccctacaaaaatatgagttctacatatagttgttggccgataatgcttgttgtctacaatttaccaccgtcgatgtgcatgaaggatgaattcacctttctatctatgttgattcctgggcctaaaaaacccggaaatgatatagatgtttacttggatcccttaatcgatgagttacttgagttatggaaaggcgtttatacatatgatgcttctataaagaagttttttaatttaaaggccatgttattatggactataaatgattttctagcttatggaaacttggctggatgtgcaactaaagggaagtatggatgtccagtatgtggtgaaaactcaaatgttgtttggttgaagcatagcaagaagatgtccttttgcaatcatattcgatttctaccacaagaacaccattatcgaaagaagaaatataaatctgcaagggcaagggagagagcaccacaatgtccaactataatgaccggtgttgaagtagttgagcagttaagcaaagtaacaaacgattttggaaagggcaaaaagcgaggtcgtggtacagagatagaaaaaaggtggaagaagaagtctatttttttaggctaccttattgggaggtattggttgttcgccataatcttgatgttatgcatgttgagaaaaatgtttgtgaaaacatacttaacacattattggattgtaaaggaaaatcaaaagatcactacaactcaagattagatttgacagagatgggcataatgtctcatctccatccttatgaagataagggcattactcgtcttcctgatgcagcatacactctttcaaaattagataagaatttatttggtaagaggctatttgacttgaaattgccttatggatatagttctaagattagcaactgtgtagatttgaaaaaacagaagctaataggacttaaatctcatgattgtcatgtgattatgcaaaaattgttggctgttgctataaggggtttgatggaagatggttgtagagagacaattcttcaactttgtcgatttttttatggattgtgtcagcgtattgttgataaggaggatattagaaaattagaattagaagctgctgaaattctttacaaattggaagaatatttcccaccttctttctttgatccaatgattcacctggttgtccatttagcacgagaagttagactttgtggtccggtgcactttctatggatgtaccattttgaaaggtatatgaaagtattgaatggttttgtatcaaattatgcacgaccagaaggatgtattgcaaatcgctatcttgctgttgaatgtgtacgcttttgtgagacatttttgaagtaaaatgatgatcaagatactacactgattgaagaaaatccactatcagctgctgaatgctttgaacttaaccaagcaaatatttcaatagcacatcgatatgtggtgttcaattcagatagtgtagcaccatttctcaatatccatatggatgaaatgaaagaaatgcatccagaattgaagaacaatcaaactttattgtggaatcgacattctgaaagtttccccttatggtttatgagaaggttagactatattacaaaaacaaaagtgaatatttagacttctaatacaaattgatgaccataatatttttatttttctgatttctaaatctaacaaggtagatgatatgttggcacaattggctgaaggcccaagtcgtagtgttacttcctacaaaggttacatgattaatggaattcgtttccacaagaaaggagttgaaaaaatgactcaaaacaatggtgtatacttggaatcacatggcagtgggcaatcgaatgagaaagaggagtattttggtgttatcaatgatataattatgcttgattatcgtacatttaaagtgccactatttcagtgtgattggacaaatattcgaaatggtgtaaagaagttagatttctatacacttgtaaattttaatataggtcaagctcaatcgattagggatccatatgtgttagcatcacaacttcacaagttaaaaaagccttttatgcaagggagaatgagtcatctaattg

SEQ ID NO: 18287 - DNA, 3254 bp, Cannabis sativa
  modified_base (1409)..(1425): a, c, t, g, unknown or other
  modified_base (2519)..(2531): a, c, t, g, unknown or other
aaaaaaaaaaaaaaaaagatagagaactacatgctaatccaaatgataaaagattgaagtaattgtgactccattaagtgcactttagtaattgaaaggcctactttaagagctgtcataatgggcaaaaaacataaccacattcaacttctacgaagatttcttcagtatcagatagcatatcctctaattgtctaaagccacgcaaccaatttgttgagcaataagcactctgaagttaataaaagtagtttatttgttcaaaacttgaacccaattgcaacattccattaaattccaatgaaactcaagcattaatccctacattactgttatctgatactaggatctgagaaagaaagaaaaacagaaaagtaatttatacgctcttataagctagagttaaagggtcataacacgcttgaatggatctacagaaaaaatcagcggaaaataagaaaacacaatacccatgaaaaagacagagaaatctacttagcagacacaaacaatcaccaagaaaaaaaaccgaaaaaaacagagaactatcagatctcagctcctcaacccaacaaaaagaaaatatacataaacaagagaaatgacttacaagaggagtgtaaagccccatcacaacatactgaaacatcttcttcccaacaaagggagcaaagaagacatagaaagcaaaacccaatgctaggaacactgcaacagcaaccaccttcatagacaaaaaataaaataaaataactacggaagtgaaattaagacaacaaaggctgcttaagccactatagtacttgaggaagaagaagaagaagaagaaatgtactaaaccatacctggagagggtggtatgggagctgccatccgttcttcctcatcttcttgttcaatgctgaagattagctagagcagatgacaaaggcgttataaccaattgaatgggtcaaaaaagagaagtgacgactttagtgaatgtgtgtgcgtgttttcaactatttgtaaatttattttgtttcactttccctcattttccgggaaacatgaaaatggttgattcactgtggaaccaacccaaatgaaaagttgcaggggcattttggaaggagaggtctaatcaaggtaagaaatgaaatgggttggagaggaaagaggttaaagaaggtagcttttctctggtatgaatagatgatgatgatgatgatgatgatagtggtggtggtgatgatggtggtggtgttgatgatggtggtgtgaggaagctttgtctggttcactcaatgataacacccaggtcaaggaaggtgggaaagaaaacagggtttgttgcaaagtttttttttttttttacttgagcaaaaatgccaaatacaatgactgtaataagagagagagagagagannnnnnnnnnnnnnnnnagagagagaaagaaaaagagagagggggctggctttgtttgctttccatacctataattacctcttaagtcaccttttactttttccttgtttctagcgttacctttttctcctgggcaaatcatgtgtcacagaccagagcaacagacagttgtttggttctcctttatgtaattgcccatcaaagcttcaacccacctcccatgaatttttttaaaaaaacaaaaaacacaaaaagaaaaatatctctattttcttttctatatttttattgatctttgtttttttccttacaaaatcacaatttatccttttagttttctacttgtcactttatttttgcagaattacaatggtttatttatgctttgttccaaatgaataataaacttcttctttcaaataataataataataataataaatttctttcttcaaaaaggaatacaatgcattaagaacaatttgtaaagattgtgacccttcaattcagtggcatttctcctttttgagctcctgtatctttcatttctatatgagaatgcttattttgctctaaaaaactctataaatttgtagacatatacctgtccccttattaaatgttgcagctgcccctttttttagttgtggtgggtagttgctatgcctagaagaagaccaatctttgggcctagcttcttagccatgtgttaaggaatctaatgcttgtttcaacacagcaaccatcttcatttttttgaaaaaaaaaaaacacaaaacccatcttgttatgtctcttttcattcttttaaataccaatatattgttatctttgcgaaaaaaaataccaatattgttaagtttgattaattatgttttaatatttagcatacgactaatgatagatacatttctaatttgtacatttaaattatatattatatgatacataaataaacatatcatgatcccacttaaaaatatatttacagtgagattaattataactcataatatataatttatgtagaaattagaggtacacacatattatattagtaatgcccttaatttgtctcttctcgcttctttttcttttatttatttatttnnnnnnnnnnnnntttatttatttatttttgaaaatgttgttggttgataattgcttaatttttactttttgcacacgttttttttttcataactttgagtttgttaattttaatttttatgagcaaattttagctatttgtcattctcgttcagttaaaaagtcacaagttttaaagcaaaccataccctaattacccaaaaagccgttagaacaaacccaaaactgcaatgagagaacaaagaagaaaatagtaagctctcaatattattgtcacaaagtgtttggactcactgtcccaaacatcaactgatttcattttcaaataactttttttttctctgttttgaggaatgggtatcataaacatttgaataattcaaaatttatatcttcagtcaagagtatagagaagtcttcaagtggtatttactaaattccaataggaaatggacaaaaacagttgtcgaaatctgcaattacagtacttgagataggttccatgtgctacatacaaggctatacattaacgtaacaaagagctatatcagtttttagtatgtgatttaacagctaaatcactttaataatcttaaaacccatacaagattatcaattaagtaacttcaagtgttttttttttttttttttgggttagtctttgtattttagctggcaacatttttcataagaaaagagacaataattggttggagtatgttacaagaaagcagat

SEQ ID NO: 18288 - DNA, 1831 bp, Cannabis sativa
actaacaaaattcttagataaaaataataatttattctatgtaatcactatttccacatcaaaatttctaggcataaaataataacgaatattttggttattacagagagatgaagggttttgagagtcacctaccttttcttttcccttgtcctatacatgagtaggggatccagcatcagcaggattttccctgttatttcctccgacacattccactgagggttcataatctaaatctccttcgtcgagatctctaaacatagcttgataggcccttcgagtttataccaaaggtagacgtctgtaacttttttaggggctcagtgtccttgataggcccttttagtagccgctcaggtatcatttgggcagtctatgagctttgaccactctgagtcccatagtggtaataggtcttccatgtctgggaagctaaagtaaggcgaggtagacttccgcatacctcttaaacttgacctattcccaaattagtgaatcttctccgtgaatgggtatttattaagagattttaattagtgagcttatgagactatctctccctttttatggcacgtgtcacctgttcagaattacggataacacttaagaaaatgagagagatggaaagtaatattgttaacctaaacatgcaatggctatatatatactcattatatatttttcattcgataagagtggtattatacagtcttacacacctatatatgtatgtatatatattcatatgcatgttaatatacaatatataatagagagatttctgacttactttgttagaaaagaaagattaagagcttgcattttcctattatattatatttttttattgtcttcttcatcaaattcgagtgttaagagagtgataaggatttcataaacccatataagtttatttaattgttttagaatccatgttaggttgttaacaagcacatacttgaatagtaaaaataaaatcttggtaaaatatgctttccaacatacccgtcagtaaaacaaccataactcactcaatattactctgattgatgcaatttcaattgcctttgaaatccattttcaagatctttttacatgtgtcacgtattcatatctcaaacatgaagctctaaagtaaaaaatttgttcccaagtcaaatgcaatttttctctacaagaagcctgaaaaggatccaacagacactattctagctccaaaaattgacaatcatcatcaagagtcattttaacaacaccatcaattttcaagatcaacctacaaacattttttttcatattttttgtatacttttatttataattaaatagacttcatttcaaataaaaggagaactccattccctcatttttacatactgctaagtatccctaaggttagagtatttttctctagtttatttctctagaaacattagatctttccttagtcaattctcttgtaattctcgtgagtaataaaaattaaaagtagatgtagctccattgccatcaagagtgaactgctataaattggggtgtctctattatttgatttcctttatttattacttttctcaccaatctagcatggtgttagccaatttttatagtgtcaactatgttaaaaacttaaaatattggtatagaatggcatggacctatggcccaatgtttgaaaaaacaaacacaatacagaaattatttcaaaactatcactttgagtactatttttcattatgagcaaatattagtattgctaagggtaaatgcggatgaagttcctattattaaaacgattaacatcagtataagtagaaaagtggtattt

SEQ ID NO: 18289 - DNA, 3714 bp, Cannabis sativa
  modified_base (166)..(169): a, c, t, g, unknown or other
  modified_base (249)..(249): a, c, t, g, unknown or other
tatatatactatttttttaccgaatttttttccaaactcccgttctatttgggaaatttacaaaaatattgaaatttgggttaacttttacaaaaatgctcacacagaaatcttttcaacaaaatactgtatttttataaaacactagtagaacacaaaacagaannnntaaaaacaacagtggaacaactaataaacaacagtagaataacagtgaaaacttaacagagtacacagtataaaacttanacagtatttttgaaaaaaaattcactttataaaaataataaaataaaaaatttcagtatgtagtgtaattatccattctattttgctatttactattccatccaaaacttttttcttaaaagttttatataaataagggtgattttgggaagtaaaattgtgctccagcttgaacatggtcggctccaatgtctgctcacccattggaactactcagtactcactcaccaccaccaccatttccaagatatggttccgctactactcactcccacaacctcactaccctctcctttccaagacccgaccaacccatctccatttcctactcatttgaccaaccactcaattccacttcttatgcttctcttcttgactcctgtaaatgcccatatttggggaagcagattcattctcactctgtcaaaaatgggtttttggggcatgagtttgtggaaactaagcttctccagatgtatgggagatgcggttgtttggagcaagcatacgtgttgttcgataaaatgccccaaagaaacttgtatgcttggacagcccttttgggcgtaaatgttgatctggggttcttcagagaagctctttcactctttctagaatttcaatttgaggatatggggttggatttttttgtgtttccagttttgtttaagattagtattggtcttggagcactggaatcaggtagacaactgcatgggattgtaatgaaatctcagtttgttgataacatttatgttggtaatgctttgattgatatgtatggaaagtgtggaagcttagacgatgccaagaaagttttagcaacaatgccagaaaaggatcgtgtttcatggaattctgttgttactgcttgtgctgccaatggtatggtgtttgaggctttggagtttttggatagaatggcttcggataagttaactcctaatcttgtttcgtggagcgcggttcttggaggcttttctcggaatggttatgatgatgaagtcatagaattgttgtttagaatgcaagcagtaggatttgagccaaatgcaagaacattggccagtgtccttccagcctgcgcaagactacaacggctaagtcttggcagagaaatccatggctatattactaggcatggatttatgtcaaacccttttcttgttaatggattggttgatatgtatagaaagtgtggtgatatgagaagcgctatggagatgtttttgaacttctcaatgaagagtagtgtctcttttaatacaatgatttccgggtattgtgagaatggtgatatctcaaatgccagggaattatttgataatatggaattgatgggtgttgagaaggatgtaacttcctggaactctataatttcagggtatgtcagtaactccttgtttgatgaagcattgtgtctgttccgagaatcgctacgggaagggatagaacctgattcttttacactaggcagtgttcttacagcttgtgctgatatgaaatttttgagacaagggaaagagatacattctcatgcccttattaggggtttgcaatcaaacacttttgtgggtggtgcccttatagaaatgtactgtagatgccatgaactactggctgcgcataggtgttttgatgaagttagggagagggatatcactacatggaacactttgatatcgggctattctcgctgcaatcaaatagaaaaaatcccaatatttcttcaaaggatgaaggaagatggctttaagccaaatttatacacttggaatggtataattgttggccatgttgaaaataatcatcttgatttagccatggaattgttctctgaaatgcaggcttcaaatttgaagcctgacaaatacaccgtgggtattgttttatcagcttgttcgaggctggctactataaagcgcggtaagcaagttcacgcaaattctatcagatgtgggaatgattctgatgtttacataggagcagcacttgtagacatgtatgcaaaatgtggaagtttaaagtatgcatttttggcttataacaggatcttaaatcctaatttggtatcccacaatgctatgcttactgcttatgctatgcatggttatggcgagaaaggaatcgccttatttcgcagagtgttagaagatggatttagaccagactctgtgacattcctatcggttctttcttcatgtgtccatgttggatcagttgagatgggctatgagttcttcgatttgatgagctctttcaatgttaaaccgacgcttaaacactatacatgtattgtcgatcttctaagtcgagcatgtaaacttaatgaagcttatgaatttactcaaagactgccaatggagcctgattcggttttgtggggtgctttgcttggaggctgtgttctgtgtggtaatgttgagttgggaaaagttgcagcacagaagctaatagagttggaaccagataataccggaaactatgttgtgttagctaacttatatgcctatgcaggaaggtggtatgatctagctaaaatgagagagttaataaaggatagaggaatgcaaaagagccctggatgtagttggattgaagatagagatgaaactcatgtttttcttgctagtgataaatctcacaatagagcaagagagatatatgatactttagaaatattgcatttgcacatgaaagtggattttacaactagtttgtgagtacttcaaacataatattgtgttatggtatatacttacattgattacaaatcaattattgcctcaattatcaggcagtttaaatgaatgcttaaaaataggactaagaagtaagaaaacaaagaatatttgtgaaattatcactgcaacatgcttcaaaatcttgatcaaatatgacaaagggcttgtttgacatgcttttggaagagcttttgaagtctcaagctacttataggtttgtttggataaaacatgaaaaaagcttctttaatttaaaagagcaatctagagaaacattgacttggaatctattttgttagtttaatgaatccttcttaatacttgttttacctttctttttatatatataaaaaagaaaatacattcctatcttaaagtttttacttataggcctacttttttgatagcaactcctataacagtaaaaatattacttctctttctttcacgtcagctgctcttgagaccacttccgacaagcaacttagatggcaatctactattagaacatctcctatagaagtcaacatctatagttgccaaaatacatatatcatcttaaatttttttattattattttatctctcatctacataagatttgacatatttttctagacaactccaaaatttacctaccgtattcccacatactactttttaattaaatttcataattatatataagagaattactctatatactatttttaactttttt

SEQ ID NO: 18290 - DNA, 3122 bp, Cannabis sativa
  modified_base (1294)..(1294): a, c, t, g, unknown or other
ttttgtttaaactaattatcatgttgttcaggtgcaattactgatgtagaaactatacatggagttgggctagggcagacctttcagcaaacacctcaggaagatgacaaaacatcatcgagtgtcaatcctcaaaccattggaagtacaacatttcttgtcagtcaaaataaatttagaggtcagaaattctctctagtattctcctttttctacttgagctggggtgttgttaaaagaaaatttatattcatactgtcatcagtgggttgttgttgttgatgattttaatttttacttactaaatgatgatcaaattagttatggctttcctaaattctagaaatcttttatgttacacttatgattaatcacggtaggttggagttctttttggtagatccatgtccaggatgatatctcatcatcttttggttcttcttgtattgattaaatatttcttgattattataaaatgttataatttttgcaaggaatcattaatttcttatgttttgattcatagatgtgcaacatgtgtacaagagtcatctgcaaatgtacactcagaaaaataagcttattgctccttcatacacttctgagcgggaaggtccgccacatgctagtcgatttaagtgtagagtaacagttgatggaaaaatattcgagtcaccggaatttcactctaccttaaaagaggctgaacatgcagctgcaaaagttgctttgatgtcattgtctcctgatgtggttcaaaaggttagttttttcataacaagtgagcatatacatgcttacatatgtactgttatacatcattaggacacaacttatgtgaattccatgtcaataggatgatgctaccttccacaagaatctcttgcaagaactggttcagagaaaaggtctccatctaccaacatatagcacggaaagatttggtgaacctcattgcccggtttttgtttcaactgttgagatagaaggaaagcgtttcagtggagaaaaagagaaaacgaaaaagttagctgaaacaagtgcagcgaaggctgcatacattgctttgaaagagggtaagttatgtagtaccaatcacttgaattttactttattaaaagttatgcaaaactttctatagttattcttgtttggcagagtaacatattttattagagatggaaattgggcagttaatgtgcggagaatgcaacccccactccatgaccattacttgtttatgccctcattcctgtctggtaggacagattcggggtagggaaatacccatcgnttatggggaatccatcgggtatccatattactagatattataaaatgtttaacactagtatatattttaacacaaatgctaggcaacattctataaagaaaaaagataaattaacaataatattacatcttgttttggcagatcaatagtcaacaataggcataatacttggtaatcaataattttaattctggatatatacgttaaagataacaaaggaaactctatacatctatattggggtcggatatggtgcagatagtatcaccctaaccccactttgggtattgaaattgtccccgactactgccccattaactgccaactcggggaatctccaccccattaggggcgggtccttacgaatacccattcccgtagtttaaatttccatctctacatttaatatttcttaaagtttgagtagatgttttctcggttgttcttggtatagatagatttgtggaagaaaacctggcataaaaaatgaaagaagccattactatagtaattgtgagaaaaaaaaggcaatatgagagttttccagcaagaacaataacaatatgtcttcagtggagtcctttattggaaccaaaagaacttagtacatcaaggagggaaattgaaatgactacaaacaataaatgaataacaagactggaaatttgaggatccctcaggctcttcatcctctaacaacctatcttgtccccatctcaccatgctgcctttttgccacaaacttcaatcctatgagcagccttgtgttggatgactattatgttattgtaaaacaatggagtatgttttgaaaaactgaataattgataaaagaagtacataggcttttgaaggagtaagggttacatgcataattttcatgcacctttcctaacatgtatttcatcttgattttatgttattgttaaataatttaaatctgatattctgtgtccttttgttgctagctcaattatacatattttttccttttctgggcttcatattcatacaaataaaatattaatattattacactctcatggacaggtaaatcgagtgtgggtcttcccattctgtcttcttcccaacaagtacatgaagctcaaaatctattatctccctgctcaaaatctaatgtttcggttaatgtcacgactgatatgcggacgaacttaagttccactacaatccctgtgcaagctgaagatcagataggtaagattttgaagctctatatttcttcatgtttttttttgctttgataaattacttcatttttttcaagatctttgcattgcctacttaactactctaactgagctaaaataagtttaagaagctgctaaattgttacattttctcggctgcgttgtcttaatttaggtgacgtttggttgggaggaatgaaaacataaaaataggaatgcaaatgagaatatgaataggaatggaataaaattaaatttaaaatgtataaaagaattgataaaaaaaattattaacatttttcttattttgtattggaatagtcattcattttatttgaaaatagaataatcattctaccaaattgatattagaatgacattccaatatattaatgcaacctaacaaaggaatgtaataaaatttaattctattcaatttcattacctccaaccaaacgtgatcttttcttgaatcggaaagctgacccggataactgaaaatttaatattagaaattaacttaacaacaactattaataaactataaaacaactaaaaacaacgagaaaatcaacttcatgacaattataaattaaatataaataaattataaaaca

SEQ ID NO: 18291 - DNA, 5517 bp, Cannabis sativa
ctttatattttctttttaaatttatttacgccccccctcactttaaattctgggtctgccactgcttatttagtaccacaagatctctactcaccagggaggagaaatttaacccattaacacatggttgtagttatttagtaagcttgttctctaatggagcactgaaatataaactaagctcgtattttttaatttttaacctcgcgtgtttcttataagatcatcgtgtaattataattatgtgaaactcatgagaatcttatagacgcatgaacctcttggggctcttataaattcatgaacctcatagtgtttatattgatgcatgaacctcttggcattcttctcgacgcatgaacctcttggggttcttcttgacgcattaatctcgcggggttcttaatgatgcgtgaacctcatgggttcttatggatgtgtgaacctcagaggattcttgtcgatgctagaatctcacgggattcttatcgatacgtgagcctcgcgaggtttttatcaatgcatgaatctcacaggattcttattgatgcgtgaacctcatgtgttcttatcaataattgaacaatatatggtccttatcaatgcgtgaactccttagggacttcttttcaggtgtgaacctctctgggttcttattgatatgtgaacctcacaggatttttattgatgcatgaacctcttacggttcttattagtgcatgaacctcatgaggttcttattcatggaatgcctacgattacaatgattgcataccaggctttcaagtattgacaacatagagctcatgggttcatacaggtcgtcacgtactaaatagtcattcagactgccattataaagacacgatctttatataactcatgggggagaaatactttgtcttcgaatgttttttacatgttccaactatgctaacttctctttattttctcgcttttactcttttcatatacgatgcatagtgcacgactagacattgtcttggtcgctagccttctcacatgttattgtttatgaatttttttgaaatagattttgttatttttggttctgggtgaaggacatttggcaaacggtagaaggtgaaaatccaagtaaaaataaattaagtgcccttaattgtaggaagtcgcggaaagtctatattaagctcagatatgtcaaaatgtcggaaaggccaagaaatttaccacaaggccaatcactgtctaggacccaaatgccttcccatccctccaggacctggtggagaccaaatcaactaagcttacatggggatacctgggagccatcaaagagtctaagacggatgccaattgcataagacaaactggaagtcttcctcgaagtgaaagctggatgactcttgtgacatttataccttttttgacacaggattagaccttatactctgtgtcagatcatggtagtgtacacacttcctttgaatacacctttttgtccaatggctcctctgtgcattttatctaccaaatgcaacctctgcctgacacgtgctctgcactaacaatggtcccagctgtacgaatcattcgctgtacgagaaagagccttcttgggggcccaatagtcagtatttttatgtattttaccctaatagtgtgtgggctttttgtaggaaaccctaggcaggtcatgggtgtgcccaatacccacaatgtagcctatataagtccctttatttcttcacaaagtgtggatgaaaaaattacatactggaagctctactaaaataatcactaagctttcatcttcttcgagacaaacctagagaactagagttaggatttcattgtaaacaccacttgtaatacatttaaacacttataaggctaatatagtgactcgtggactagaaataattaatgctcaaactacataaaatcctttgtctcatttagttaaccgttattaaattcctaaagctttcatttaataagtttttaaaagtctgattaaatattttggtgctttcattgagagctgatgaaagatttgagccactacttttctgcaaacatgttggctacacaaaaaacagtgatagaaaaaaatcctcaggagaaccctgacattgtcatggaagatgtaaccctaccaccttcaacgcacgcccaaccgagcaatgtgagggaaggggatacatctaaagttgacaatagaagggatgacccagctacatgtcgcaagcaagttgaaggcaaaggcattgacattgaagacaaggtgcaagaagaggaatgatatgtcataggatgttactatgaagacgggtataattatgagcaagatccagatctagttcgagtatccaacgaactgcgtgagacccaaaaaagttagcccctcaagaagagttctctcaaaagatggaaaagataatggcccgcctccaggtgaagttcaaaaatctataagaagattatgaagaagagccttcagtggaactagttgatgatgaaaatagagcgaaccctgcttgcattggaacctcagctcctgcaaaggacaaggggaatgagaaagttggtgagggtcaaaacaaaatagctcccttacctcctcgaaaagtcgtgaatttatcaaactagccctcacagacacaaaaggccactgatgtctccgggttttgccgcccttttcctctcaaaggtatgttgcgccaaagaggcctggtgcaaatgtatctaagcctaagagaaggaaaaattgactgagtgattctgttaatccagacggtgggatagaagaataattctcaaaagatagctggtccactatagacctctgaaggcgccttcacacaaagtatgaaaatactaaaggagagaagctaaggccatgtggaaacaacctaaggaatcacttaaatgataaggcttatggatgcgaccttccaaaaagtggcacaaaagagttagaagaataaattacttctctgactaagctcgtctggaagagaaatggggccctctgagatccaaaagatgaagacccaaaaccatgtgttaggcggatcaacaaagccccactacttaaaaatttcaaataccacaaagagagttgtaagatggtcatatggatcctaagacccacctgtcaaaatagaacaaaatgatgcaagtaacaaggctgagcaatgatgccaagtgtctttgcttgttgttaacgctaaccaagttcacaaaagattagtggaagagatttactcctggatcaatcaatagctggaatgagttaaaatatactttttggaagtagtgtattgctactagagattgtgatatggaagtcgagtcactcactaacatcaagcaatagccaggtgaaagcttgaagacctttattcaaaggatgatggaggcggtagtaaagaccaaggttagcgatgacatgaaacttgtagccctttaattgggacttacagttggctccttgttaggggggagatacaatgaaaaaggaatgagaccctgtccgagttcatgtccaaggaacaaggtatcatcaatttagaagatgctcatcaacaagctttcggagtccctccaggttcaactccttctgcatcttcaccagttttcaccccacaagttccaaatccaacaattacccttcctaaaaccaaatactcatcggttgtctattgacattttacttccgggcatgcacctacaaacccattttccttggtatggagcagcacaaactagttgttcatcctaagatttttaatctcatggtgaacaagatttcatgagcataaactcactaagtaaacccctttctccttttcaggttgatggtgtgaggtcccaaatcgatggtgtgaggttccatgatctctcagtactagcaacgtggggtgccttattggtgatggtactattcgcgttgactcgccttcaccctctaatgtgatagaagagatcacttcattttgttgtatgtccatcgggacctactctggattgttctcctcttacctcacctaagatcttcgacaatgatcaccttcttctccagcgataggtgctagggggtttcgcattgaggcaataagttgagggttgtaaaggttaatccccacaccttaaagaccatgagagcatctagacattttatgatgttatatgtaaggaagaaacttagtttgagcttgtcattgccacaaatggcgccaaactattgatggttgaaactcgttaacgaacttaaggccacaaaattaaaattaaaacacaagatttatgattaagatgaaagtgtgaaaatttaaaatcttaaataaatgtatagaaataatggtggaagaggaaatcttgaatttcttggagtcaagtgttacaataattatccaaccccttctcacatttgagaagagggaatttataggctttaatggccatggtgtaataccctataattaagaaatggattagcaaaaccctaattagataattattaatacttgaggaattatattattatatagttcaatatatgaaaattatttgatcaattatgtgttaagaccccattggtgagctaggggtattttagtaattatgacctgagaacggtaaaatgatgaaattaatttaattacgtgcttaataaaactatattattatatagtacgtctgtgttgtctttccaggtgtgttctgataggttggcgcggtatagtcacaaccaggtatttcgggtcgaaccgggttcgggcccgaaatgcaaattggatcgaattatttggcatgttatttgataatgagaaatctgaattctatttgaaaataattgagcatgaaatgactaaattacccttgtatgaatgaatatgtgagaattggcccttggggcaaaatgatcttttgacctatattgatttacttgaattgaaaattgaattttatgaaatgagtttaaaattctggattctctctctctaaaccgaccctctctccctctctaaccctctcttgaaatttcaagcttaattggtgtaaattgcttggagttggcttgattttgagcttaagacttggattttattgtgcttagccttgcaagaatttgaggtagtttctttaaagctttaattctagttttgttgctgaaatttgtggttggttgagcatggaaaagggattgtgatactttgatttgcatgtgttttaattttgaattgttctatgtgagtttatgcatcatttggttgtgagttatgttattgagctttaggtggagttttaggggtgttctctagctctaatccatgtgttttttatggtgttttactgctggaaattgattgagataattgggtttgaagctcttgttcaagagcttgaagttgctaagtttagcttaatttcatgcatttatgtgcaatctaaaatatagggttattattggattttaatgcatgaaaattggtattttaattacctgtcctttcttagcaaccttac

SEQ ID NO: 18292 - DNA, 2075 bp, Cannabis sativa
aggcggaagccactctattttatcagagccaggtttcgatcctgggacctgtgggttatgggcccaccacgcttccgctgcgccactctgatttggtgatatgtatattacatttatatattaatactttaatttaatttaatattcagtgtcacataaaaccctcagacttctaactgaataaataaataaataaaaccctcagagcggcaaaagagagagatttattataggaaagaaaagaagagaagaaggtccgcttcaatgaaaatggcttcatgggacgaagacactaagaacaaagttcttcgtcaggtactaaaatttaatctctattgtaaatatgattataattctttatagtataatctactccatatatgaaaatacctttgttttcaggttgagttttactttagcgatagcaatcttcctagagacgattttctcaggaaatctgtttctcaaagccctaatggctgtatccttatatttcgattactcgattaccgtctgtgtatatatttgcttatgataatgtgtgtatattatgttttcggaaatattgctttgtggttgtttcatgatctttgactatacgagggttaagtggtcagcttggctctgatatgtacattctctcgtatgagaagtttgcttggtttgagtcgtaacactaagcgcgatgatgttcctgatcgaattgtgaaatccgtggctaaaattttgcgaaactccaattgcttgaaagtttctgatgatggtgggattttcacaacttgtactttggctacttagagatttttgggtctatagatgtgtatgttagtctgtttagtttgactcgttctgtttttgttattttgggttcgtaaagggcaagaggttggtcgagctagagagcttaataaacctgaagaggttataaagcaagtagatacaagaaccattgcagcctcacctttggggtatgatgtcaagattgaagatttggaagttttcttttctaattatggcaaggtggtaccttttttttcttggtaaaatgtagttgtatatttgtgattattgattattcttatctggtttctgtttcttttttcttatttgtgggatatttggtttctctttcatatataggttaatagtgtgaggctacctagtcatgtagctgacaaaaaatgcttttgtggcactgcattaattgaattctcaatagctggagatgctgataatgttctgaagcaaactttgatttatgctggtaccgagttaaagttaaagccaaagtaagtcaaaataaaataaaaacttataataattttaaatctatctttaacgtggatagtcgatttctcagtaatatttgtgcttactgctgatgatagtccttctactcaacatgtaattcagttaaattgctctttcacaaatatttcttcagttggatacagtcaatctgttgatgcaggcattattaaccatctttagtttttcaaaagtgtactttttctattgtcttcttactaactcttttagttattctaacatggcttttgattcagaaaagagtttgattctgagagagaatcattaaccagtgatgctctaaagtctaattcattgagtgctggcgacgtgaaggatggtggaacgaaactaatgttagtttgtctttggcttcaatagtgtttttttattttttggacccaatatcaccatgtgcttgcagcctgactcatttctaatgtaatgaattcaggtaccagaaaggtttagttcttgcattaaaattggagagaaagttagatggagggggtaatggacaaaaaacatgcgaaagtacagatcaaagtgaacaaaaaagctctgttgatgaaaaaacaagacaagctgctgctgcccaaaaagaaaatgattctctcctgtgtgcggaagttaagagcacctttcaaagatttgggactgttaaggttgtttccacaacttaattaaactcctttatttctctatgaaaatatttttatgtgttaggaaaacaatatacgttatgtttttagttagcttgcgtcttt

SEQ ID NO: 18293 - DNA, 8279 bp, Cannabis sativa
acaataaaaatgtaaccattgaaacatcttccatatatgtatatgaagtagattttgtttgaactcctacattctctattgcaaattattatgaatttttaaaagcataaatatcttaaacagttacaatatcatataaaaaaattgagggtataactagtgttgtactttttgacatgacatgaaattgatataagtttagaaggtacgagcacgactaggcacaaaaaaatataagtttgggcatgacacgacatgatgcaacaaattagcacgacatggtacaaaaaatatatcattaagcatgacacgacatgagaagtatgaaaagcacaacacataagtacaaatagattagcccgaaaggcatgacacgtgacaagcccaaaaactacggcacgacatactcaaaaatcttataatttaataataataataataataagatatgaatgtattaattataaataaattacaataataataaaacttaaatataatactaaatattatagtgttataattaaaactattaaaatataaaaaactaatattatatattaatttatttatagaatgtgatataaaaatttgagtattaatttataagtaaatactcaaaatctaatgacgctaataatttttttatatgattatctataaaatattattaaaaagttatataaatataaataaagctataaaatatacataactttaataatggtaaaaaaaatatgaaaaaataaaggacgaatttaagctaggatatgaagatgggctagcctgattataaaatacgggcaagcacgagcaaaccacgacacgaattcgagtaccacatgaaaatatcgagcctatgggccgtgctgagcataccctttaaaaatattgacacgatatgacacgactcatatttttctgtaaaacggcacgacacatcttattttttgaaagtacagataaatatagttaaggtcagcatgatacgcacgaacttacaacactatttatacaacactatttataactatgtactcataagtaaaaatgtaccaatagacacatttttaggaaaagtggatgtagaagcacaagtaagtaattatataggaggcatatcactttttgttcctaccaataaaagtacctatatttttggtttgacattcatagaaattataacccaattttttatatgatgacttatattgtaattatagtagatatctcatattttgaaaaaaaaaaaatgaataatttaaaataaaaaataaagttcgaaatagttaattacacacctatgcataaaaaaatcaaacaaataaatatgtgtgcaaacaaaatgtttgaatcttgtttttgacataataaattatttttaatcatttttaaagcaactaaaagtatctactatatattaaaaaaattaataatcttaagatacaaaattgtatacaatatataacactataatatatataataattagataataattaaatttgcatatctgattgatctataacaattacaacaatttgatagtgcaatactatcaactaagactttctctttagatctctaaatcagaagcaaattttatttctatctgattatcaaaagtagacaattgtgatgaaataatatgtatttatagagttagagaggaaacttaactacataaccctagttggactgggtttgcccatcaaatattttagttaactagaaaagcctacatttatgcttcacttagactttacacacacagatcttaagctcattaattattgaccaccacaatatgggctaacacagcaaaaaactattcaatcaacctaaattttaataaaaccaataaatattaatgtaagtctaaataaaagtctaacattctcccacttgggttacatttatatcaaaataattttgtttgaaaatgactcatgtgttgaacaacaagaaaatatttgtagccactttacacacacagatcttaagctcattaactattgatcaccacaatatgggctaacacagcaaaaaactattcaatcaacctaaattttaataaaaccaataaatattaatgtaagcctaaataaatgtctaacattctcccacttgggctacatttatatcaaaataattttgtttgaaaatgactcatgtgttgaacaataggaaaatatttgtagccactttaaaaaagatagttctttgataacatcataacataccagtcaaattcaacctttgatattgaactacaacaatcatattgtttttaaatcaaaagacattcacaatcacaaataccaaagtattaaatcgacatggtccataattctagtagtgtggtaagaaattatgcttaacatgtgatcaattaaataacctaatatcctcatcagtcctcaacttcattgatactgtgatgcttaataaataagtcagtgaaattaactatatacactacttaataaataagtcagtgtcaataaacatgcttaaaaagttaagccaacaaaatatcattgtcattaagtaattaaacataaaagataataatcacaacaagatatcaactacatgtttttaattcaatcattctcgaaaatataataaaatataattgaaagcataaatatctaataataaaaattattagcccacaaaacaaacaaaatagttcataacaccaataagaaaattacatataaatgtaatctcaaataatagaacaagaaactcccactaacttaaaggaacaaaagattatttattaaacaacacatcacttaatccttttgttagaggatctgctaacatcgacttggtcttgcaatattctatcacaatatcttctttcctttaccaagtctctaacattgagatactttatttctatatgtttggaagcactaccaatctcttattctttgaaaagaaaatgtcagtattataatcatactatattagtataggagatgaaatataatcaactagtcatatctctaaattaaattatttaaccaaaaaacatgaaaagatatcctataacatgggacaaactcaacatacatagtagataacgtgattaaagtctatttaacactttttcaagagatggttgcactagccaaagtgaaaatataacaagaagttgactttaaatcatctacacaaacaccaaaatctgaatctgaataaccaacaacacattgattgtcgatattcttataaaaaagcataaaactcaggagaagacttcagaacaggtgcagatcaagaagcgtggaaactattattagatgttgcttcgaacgtgaatggctcgggggcaggtgttataataatatctcttgaaaacttcactatgcattaagattccagtttaatgcttcaaataacaaggcagaatacgaggccttattagcagaactgtggattgatttagccttaaaaggtaaatcaattcaatgtcttagcgattcacagctggtcgtgaatcaagtgttgggtgaataccaggtaaaatataccaagatggtcaaatattaagaggaagtttggaagaacttggaaaatttcaatgactataaaatcgaacaggtcccacgagaacaaaactctaatgatgatgccttagtaaagttggcatcacaattgttttagacaatttgaatctagttccagtagaagtgttgtgcgagccgagtatctgcgaatttgaaaagcaagacatagaaatgatagacgggagtcccacatggatgattcccatcatcaaatacttgttgagcagataactttcgacagacaaaggcaaggcacgtaaactcttatatgccatttcgagatacacacttgtcaatggcaaaccttacaaaagagggtattccatgccattatgcggtgtgtactcccatcataagccttggaaatcataaaagaaattcacaagggcttttgtggagatcatgcaggatggcaaagtctatctaaaaagataattcgacaaggttactattggcccaccatcaacaaagatacccatgagtttgtcaagaagtgcgataagtttcaatagtttttgcatatactgaggataccgcctactgaactttatatgatgacctcgccctacccattttccatatgggggttgatttaattggatctttaccaataaggtgaggaggtgcaaagtatgcagtagtcgtagtcgaactctttaccaaatagactgaagcagaacctctggtttcaatcatgtcaaaaaaattcatggactttgtgattaagaatatcatttgtaggtttagaatacccatagagatagtgtctaacaacgaaactcagtttgatggagatttattcactaagttctgcgaaaggaacaaaattgttaaaatctttttgtcagtatcaaggccacatgctaatggtcaagtcgagactgttaataaaaccttaaaagacactataaagaaaaagctcgatgcggctaaaagaagatgggttgacgagctacctcaggtgctctgggcccatcgaacaataaaaaaaatagtaatgggacatactccactttcattggcattcgctcggaagtaatgttgccagtagaagttaacattgtgacacatagtcatgaattttatgactatgaacataaacaagagctactcaaaatgtccttggatctgctcgatgaaaaatgcactaagtcgcaaatcacaaatgttgcttatcaacactgaatcacaagacacttcaataaaagagttcgaaagagactctttaaagtaagggattaggtgatacgatgtgtgtttgataatacacgagaccctgtagcaaaagtatttaaccctaactgggaaggttttttacattgtagaagctgttgtgggaaccatagtttacaatttagcatggcttaatggctttcagataaaaaatacctagagcagcgagtacttaaggccttattaccagtaacatgttctattgtattttattcatgtaaaagtaattcattttaataaatatatttatatttcaattaattataaagtttttctttaaaattacttggggcatatgaatatgcaataactaggctcgacaacgcctagaaatatattataattattaactaggctcaactcgataatgcctagaaataactaggctcgactcgataatgcctaaaattaaaaaaaaaattgcaaaagaattttttttttgattaaagttggtctagaaaagtagataatcaattaattaaatcttttttaagcagaaatgaaaatagcatttgtggtgaaagagattattaaagttttgcaatcaacattaagataaatacgatttgaataaataatgactcgcatctatagcatgtactgtaaacaagatcccatagtgagtcttgataaatagtacacaagctaaggtgcggatagaggactaactactcgcacatgagcaataaaaaatgatcaaagcagtcaagtattgttcaaaatatttaagtttgctcttcacttgcacataaagcgataaccaatgttcaaaaaatagtcaactgttcaaaatatttaagttcgctctttactcaattttgaaacctatgaaaaaatattttgataaagttatgtagacaaagcttagtcatgaacaattatacataacatattcaaaataattataagtcagataagattttctcaaaaatagagaaaatatgtacatcaaaatggcataaaactagtgtaattaaagctaatttagccatccaacaaaacaaaataaaattaattatatagataaaaaagccatgaagggccaaatattgtctcgaccaaaaatttattgttcaaaagatgaaattatttaaagtaaatctacatggtgggagacttagagggcacgtcatcttcttcttcttcggcagcctcaacttcattttccttatcggggccaacttcctcctcttgcttggtctgcttgaaatagtccaccatcgactcgacatcatcacccaaaaactgagatccatatctttgtttgccaaccaaatggagcacctgaccatcaaagtaactctctcatgggcatcttccttagcctcgtgaaggtctttttgggatttttgggtggactcgagtagttgttgtttcaaagtgtcaacctctgccttcagtgccttttcagagttctccaaagcttcaatgttcttcttaaaatgagtaatatttatttgggtactgctctactgagtagctagtagctcgcggtgatcattggccttgctaagctccaggcttaagtggttaaaattttgaagacttttctagtgagccataaatgccaaaaaagaagtatgcatcaaatacgaggttagaaagagaaatatgagaaggtatgatgacgctagaaagttgaaaaactaactgattgcatgaagtcaacacttctcgccaagaggccatataggcatttttattaatcaagttccagtcatcagattgaaaggtcctaaaatggcgacatgattgagtcacatatcgcaagcatgccttggaatcttcaataccagcatcctgaggcaatgggcaagtggggtccaacaacataacttttggcttagccgcagaaagagtgacttggtgaacagaccccaaacttcgcttgtttgtgctcgtgggtgcaggggcagaagtagaatcagtttttgcaacattatccttctcaataacatgccagaagatgtagttttctttcttctagtttccttattccacttgggaacctcgggttgcttctcagaagtatctgcctcagaggcacttctccttttaccttgcttgaccgagacaccggggctactgaggagattttacaaatcatccatctctaaaaaataaaaacaaaaagaggttaaaatttttaaagtgaggaatagcataaagtggagagatcaaaactcccacctaagtaattgccataagtgctaggcgaggaggggttgctattataattactaaactccctagaactagtgatcataaagagataaagggaattaagtggagacattactcgatcccaactagcagccctatgagtatttgtaccatattggtgagcgattccataataagaactgttgctagtcaactgaacatgtgatggaactcagggtaccaactatcaaatctatgagtgattaaatcgacatagtttcagataaaaaaattgtattgactatctttaaatttcactgaagttgttggcttggtcttaaggacggtaggagcccatccataaaagcaagaaattttaccttagggagccttttcttcaacctcgacgacttccgaagtggttacattttttaaaaaagtgggtgtgggcaacgtattcgtagtcttcttcttcctcaggcactggtattttctgccaagtaggatacttgaggtccttaaaatctatggtgcactggtcttttgcgagaaggccactagatttcaaattatcatcatgaagtcgaaatcagccgctcacaggccataagacagattcaccataattttgtgtcgcctttgaactactggtgttggaattggtctctttgaagcaattgaaaataagagatggaagaacagagaattagtaaaaatattcaataataaaaaaattctaaaactcaaaatcaaaattttgggaatgatggatacctacgtaaatttctaaaatgggtagtgtttatttggtggagtcctgtcgtccaaaagaaatcatctttgaactccttcttattgagaagtctaacaatgattttataatcattagaatgggtacccaagtaataaaagttacctgaacaattctttctcgcaagacatgccttaacggagtagaagcaagtaatctcaaatggggttgggcattcccacccaaagatgtggtagagtgacttctgacatgcgagaatcctataagagttagggacgagctaaaagggcacgatcccaaggtaaatacaaaaatccttaaaatatttcttaaggaaaggacaactcctgccttcacatgctcgacactccaagctcctatccttaaagagtcgttggtactgcaaccttcgtaattcaagagttaagataagggaaataactaaattttctaggcgcgacagaacgtatacgacaacccttctcattcttgatgtgtaacgccctaatgctaaggcacgctacagt

SEQ ID NO: 18294 - DNA, 7522 bp, Cannabis sativa
  modified_base (7457)..(7488): a, c, t, g, unknown or other
agcatgtaaaattcatacaaacatcattcacttcaaatttcttatattgataactaatcagattgtaaggagttttatttagggcataaaacccgacacaacccaccattacaactgcagtagcaacaaccacaacaaccacatcaacaacaacgacaacaacaaccacatccactacaacagcaataacaatagccactgtaacaacaacaaccacagcagcagcaaaaacatcaacttggacgtgtaccattaccccagcagcagcacactctatccaatcattagttgcaaattgtgttgtctcaatctgccccacgcccatctcagtctcctacacttcaacatcttcatgggcgtgcaactcctaggcctgcctctgttgatcgatctcaccacactgttttgggtaagatacctttgctaggtttctctatccccatgaggccactcattctcggccatgacttcctcacaaaggtaggtgagtctgctgccattttgaaaaggttccatgagagggagcaagtaaatcttcagaagcaggctacccaactgtcttctatcaagacagctgagattgcagagggagttcgtcatccttcttcctctagcccagtgttggatcttgctccagtaagtcataattttgtagctaaggtgggcaaagtcgtttccccttatgctttagagatgtttgacaacatgaactttagtgtgagggagcttacatctgagaaatgggctgtgagcaacagtgttgatccatacacactatcagtggccgctaagtaacaagcagtaggggtaaatctcaatattctgaaccattcttcctttcgatacaatttttattaccaaagtatgtatatgacattttccctttattttcctttctctagatggcattgttcgtagagatgatcgtcaaggaggtgggtaacatgcccattgaactaagcaaaatttgcgctaaagtccaatctttgataaccaagaatggggccttatgtgcaaaagttgagcatgtcaagacctaggctgcctccaacacccaaaaggtctaggaagattgggaggtcaagctggctgttgaggagaagaagtgggatgccaaataccggaagatgtacttagatcacaaggccaaattgagcaaggggttgaggggacttgacgctcccttcaagagaacctaagcaaggctagggaggagagagataaagctgaagcccgtgtgatgcttcaatctgagaccatcaccacccgattccaaaaagtcaacactctccaagaggatatccaacaaagggatcaactcatccagggccttagtgatgaatataaataagagaagaagcaaacagagtcctagatgacacaacatggcaatctgagcattcttctccatgcaacttgtcataaaagcaaccttgacaagagaccattaacaaattgcaagggaaggttgaccaaagcccaacaaatggtatgaatgcatatattgccctagatactatgtgtagatagagaaaaactgcccctagactattgaggatgcagtcgcggcagtagctaaagcatcaactaagacagagaaatatcacctttgttccttggagatgtcctatgtcgtggtcctttataacttgtgattctactatacttcagctcattaatgagaaagagagggtagatgttaccaggagagtactcaccatgcaacatgacacatacctcgaggtgctttcgctcttaattgatagtgataacgatgaggaaacaagtgttgaagtctcgagttataaggagttcgcaaaagctgaggcatcttctcgtagggttgaagagaagcttgtctgcgacgtagttgggcctaacaaggatccagaggagccaatcaatgccccagcccaaatcgacttagtagcaccttcctttgcttgagatcaatatgagccaccctatatttctcactgtctatcttttttgttaagacaattttaattccttctgtcgcggagttgtgtttgttttggcttggtccatagggctatacatgacaattgccttcgagaacaacttggtttgcctttctacaaggcaccatatttagactttaatatttcatgctgtttttaactcttagctttatgcatcaacctatgtagttattttaagggttgtcttcttaggctatttagaagaatgtggttccaacgtccaactcttcaaacctttaatatcagtcagccttctatccttttgctgacttaggaggtatttaaaaagtacatgtttcctattgccagacaagatggttttggtcttaaacgctcataaaaagtttttaagcctaagctaactaatagtttctaaaaacatgaatggtcttttaggctgttcctgagtcactgtatgatcacgaagccttgacattcttcggttgtttaggcctttttataatttaaggacgccaatttcacatgctacaaaatttagatgacattttcctgctcaggataaagctgaagtcaataggagttcaagctaggccttaatatttttaaattctaaacaactcttttttgaaagttttcaataagggcttttggcgagtatttcccttttctaggaaattgggctaaaaatgcttcttcttccaaaacatgtgcttattttcacttttggaaggaatttaagcagtcttcctttttaagaaatttggttgaaaatacatcttgttttaagaaaaaatataaattttaataaacaaaacaagtaaaataataaactacggcacacggtatgtttgggggcacacacggctaggcatgataccccctaagtgagctgagaagtatagatatcttcaacttcttgttcacttgttttaaacatagcttgtggcctaaaaacgtaaagtgtaaattcaaatgtaaattgtttttgtttccatttcatgatgcccgagggccattcaaacaaaacttaattacatagatttttacacaaaacatttgagatgtcgtcaaagcctagtcttctccgcctaccagtagtatcaacataagtaatttgcgttccaagcgtgagggacccttgatccatccatccttttcaattgaaaagtaccttgacccaccttctcaagtatctcataggggccttcctaatttggggtaagtacccccactctcggttcttgcgaagctgggaatactcttctcaaaacaagatcgctaacattaaatgtacgactcttcacctttgaattaaaatggtgggcaatttttccttggttaattgagaagcttcaagaacaatcacagttccaattccagatgtatcaaaagaaaatttccaggaatttcaactctaaagtcaagagtagaagattgaaaaacagcgacattattttgagaagagtgttgccaagggcatggaatgttgaccacctgtgtcgatactatcagtaaactagggatcgttaggttcctttttgtttttctttatcttttcttaatttctgtgtacgccttagggcacggattatttgaataaaagaagttttcatttcatatgtaacaagcgatcaaaagtctcaattatcgatcacttagggggtagcatattatgttattgtcattatcaattttaccctcgttcatgagaaaataattaagtcaaattctcaaatataatattagggagtactacctgaaattggaaccccaaggtataggaagtaagccactaccttattatatttgaagtttatctaacatttaacaaaatataagagtagggagtattacttcaaactggaacttcaggaaaccggaagtaagccactaccttattatacttggaatcaattctcgcacattaagcagttaattcatgttatcttgaaattgaagttcaagcttcatgcttaacccaggttaacacaaccagagtatccaggctacttaaacttattaatttaggtcagttaaaaaagtaagttcaaaaaggtcccattcttaactaattaactagtccaggttaattagttttttaaacaacaaacatattcaagtctaagcatttaatcaaaaatctaaaggttcaggcatttggaaccagaacctcacaaggctggaagcattaaaacttagcaaaattttgagataaaaatgcaaatatccatggaattaattaaatagtaccatgtacttaaaaaccccgtggtaagggtgtaaaagattgtctccgcatacataaccaggggcacccttgtcccctaaaaacaaaaaagaaaaactaaaaaataaagataaagttgtttgagataggcaagaatgatcaaggctgagtggtgtccttcagggattgtgcatcttaggtatgaactttagacgaggcctccgggatcgcagagttggtcgacataggaacttcatgggccagaaaagcagagtcatccacgttcttacaaccaagaatggtaattcttggattgacctcatgtatcctatgagctacttccttagccttatccacctcctctagtgccaagatcttgggcaacagatcttcattatctagagcatcgaagagatctattacaactttgtaatactggaagatagtatacactgagtagacaaacacctgttctagagccttggtatgctgagcttcttgttctaattttttcaagattgcttgttgaagacatcccttcaaatttgatttttcactctccacttcagtaccctttcctgggattcttcataagccttcacgggcgcactaagttcaatctcagcctcctcatccatttcagtaggttttgcctcagcctcctctgttacttgttgcaactgaagatggttcttcacctttctctctagagtagtctagctaatgtatctatcttgattaattttagcctatttatcgtactatagggatagtttggtaatatttttgtccttctcttagacatccagcttggcctagtttaggttggcttccaactctttaattttggtaatagtcgtggaatacaagcccttatacctatctccacaatccctctgtgtcttggtcaccttcctttcacaggtcaagtctttgtccaaaaagtcagacaccctttgcttaatagtagcttccatgttttcattttcctcagctaaagcattgggtgcttcctcttttctcagctcagcatcggcatgctccgccctcatcacctctagatcataggccagttgaatgaccattgagcaattcctctctgccaacaagccaatctacgaagaagaaatatgactgaatcaaataatgtaagaatacgcggtatatttgagataaaggaaaattaaacttacaatgttagcctgggatctcatagcctcagctatgtacattggatccctacttgccatcacggcgaacctaacaacaccgagcctataacttgtagtagtactctatgacaattagttagctagaaagtgtgacatgttggttttaacacgaggacgaagcctttatgtcaacttaactctatttactagaggaggacaggctttatcccacttgtcatagtcatcaaactcagcattacgtctgaaggagatgctgctggtcaacttctttagctcttcctactcgttgccacgccccttctagtagaacttctcgacggcttctaggcctgcattatctccttctatcaataataaaggcttaacaagaaatgtgaaagatgccagaggtaatgaagccagttcagtcctttctctggacaagtaagtggaagtggcaaggataatcttaggtggcggggatggtgggagaggatcctaattgtccttttatgttttggtgccttgcctaggcggccttgcaccatcagatttgtcagaccccttctaggactgaatcttcgagtctaccaactacaagaccttctccttggcctccaccctcgccttcttgctggcaccaccatcagatgatttagcccgcttcttgttaatcaggactggcccatcgtaatctgagctatctccttttgagttctccacaggaacctggctcagaggttttatgaccaagataggtttagttaggttgatgatggaagtggatgtagcttccatgtccagagccttagaagcaacctccgaatttcaagtcggaggtgctggctactgagatctgttcctggaagcctggttcttatttcttttatcttcgtcaccttaggagagtttcctaacttcattaaatcgggatttatgttgcccatgaacctatttagcagccccatttgtagagtggttgtttgatcggcacaaaacaaacaaaatatccatcaaacaaaaccacaacaaaagatatgatctttacaacacatcatcatataagacattaagaagatctaaaccattaattctagtataattgagtttcccctagaaagaagagagatgtcttcttgacctaggttagtctcatattggaagaagcctgtgaagtaattttactaaacgcatccattctgacatgatggtgcacaggtggaatgaactggttgggactcttgatgatgcaatctactttatctatataattaaatgtatgaatatctatgatggtctaagttcaagaaatatggattaaatcctcattgattgacagtctcgaaattagttatagtgggagccctaattatatggaagggtgtctcaccactaccggaggtgcttgctctcaaagcaccctcattacgcactacctccttgaattaaatagagagttcttcagcctcacttaggctttttaggaattgtttcctccaattcaccagccattactcgtccaccttcactaccttcagagcctcttcaatagtaataactgcaatgacctccttaacctcgtctgagtccctcgtagagcatcctagactgtgtccttcacggaaagatgcgccatatcctggtgtgcgataataagacctacatcctagaggttctttatggtcacaagcttctctacttgtaacccattggatgagatggacttacagaaagttatcctctcttccagctctagagtcagaggcggatgggaaaggcagtctagtagatgtgaaaaacaagatataaatatacatcaagcatgaggaaaagcaaaatcccaaagtctaaagaagggaatgaaacttacttgtagtattgaaatccaaacttattgtaggaaccctctttaggggaagccagaggtgtaaaagttgtagcccaccttctctttgtggcccctcatgggctgagatttgatcttgtagaagaacaagaactcctccagtgttggcacagatttgctatgttgtgcacaaaagacgtaccaccctgatagtaggcagtatgttttgggttttgtgccctaaatannnnnnnnnnnnnnnnnnnnnnnnnnnnnnnntaataaagatcagaaatcacattttatgttgcat

SEQ ID NO: 18295 - DNA, 3080 bp, Cannabis sativa
  modified_base (2915)..(2924): a, c, t, g, unknown or other
actaatcagattgtaaagagttttatttaaggcataaaacccaacagtaattttaaaaatactcaatatttacttggttcatattttatttaatgttaattaattatttgctaatagttgattagtacatgcatattgtcatacataaaatcccacgcagttttctattttgataatcatgcatcttatactagaaacatgattatttaggattgtcttatatattttatgcgtattgtatttagagaaatcaataacataaaatactaggttgatttaaataatgtaataacctggtaattcacaccaagtgactttctctaatagctagtcacataattttaactaatctttttccaaaaggagtttttgaaaattatggtaatatagaattaattaaattatttttaggcctatattatagtaatttaattaatatattacaagtggttagtacttataaagtaaaatcttttttcaaaatgattttaataatgacaaacacagtttaaaatagtgagtgggagagggttgtcatctgttaagaaactcatggtcttcacagatttgttgagcaagattagttcttttttgctcttgttcagcacgttgagtttcaatgtttctccagtactccatgaaccaggtttggaattgttcatgttgcttgtcaagaaattctcacatctgctattgtaagttagccactgattggctaaattgtttaacctgagggttgactttattagggtcttctaactccacgtgagggtcaccaagtggaatttggttactggcatcaacatcagtagttgttggtggccttggaagacgagctgaggaactggtttcgagacctccacctagcatctgggatgtaggtgttgtcccatcaccagctctagcaattggcgtgccccgagtgggttgactaattgtggtgtttcttttaacacttgttgatcttgttacaaccattttgattaggatctcgagttgtgactctcagttaaagcaccaaaatgttgacggaaaaatctggacaacactcgctcgctatattagtaaaggaaatattagcttaagtaaataaaaagagagccacaagaaatttatagtagttcaccactgtgtcctaacggtaatagaactacttctacttcaagtttttattgttcacgagaattacaacaatttgacttagccaagagctctaatttctagagatagaaagtaaagagagatgctttgaccttatggggacttagaagaatgtgtaaaataaactagtggagctctctatttatagtgaaggaggttctattataataataataataataaaataacacaaaaaatatgaaaaatttacttggggttgttcttggccattgatgatgatctgatagtgaaaattaattcttgatgaaaatcttcatttttcggagcttgaatcttagtaatctacgaaaaaagtcacacttgtcttgggcacaaattttagactcaaaatctttgaaattgcgttatgggtgtgagacatgacttgaaagagatttaaaaatcaagttgaattgcatcaattagatcaatattgtgggagttttagctgttttactgaaggttgctcaggacccaatgcccatattgacattctatcgtcgacctggacgctgggtgagtgaaaaaatatcctagacttgtatttttttgatgcctaagtgatatgtagacataacgtatccaacttcttagttctggtgaagttgttcacaagttctcagaaatgtaattttttttttgtgacatcgggtagactcgaaactccccaattttgtcgatattctaccttattgaaagggtaaaatatcaaagtgtgaaattgacttgccacaagtcatagctcttatttactaagaaaaaaaaatacttagatacttaagacagaatcaaaatttgataaggagaacccaatgcacttggccatgcgtcaacctgggtgttgggtgcttctcgggatactttctaggactcgttttgatacttatatggcattcgagattgcgaacgtagtctcctagcccattttcgaccaaaataagaagaatacacacagcagaatttatgtttgaggagttgaaacatgcggactaggttgcatgtaaacttgggcgcagggcccagtgcctatgtaaaccttggcgcatggcccagtgcccatgtaaacctgggccctaggtccctatttcgacccttagatgatcttgttcgctccttgagatcacttgtatctttgttatttctaaaaatggaaaagatgctcgaaacactttttgagaaaactgattggaaatagcccaggttgacaaaatgtcaatctggccattaagtcctaagggtgtacatctgtcagtttggttgggctatagtatatttttaccaacctaatataaatgttgggttgcaaatatctaattgtaacccgtctaatgaaaaaataaaaaatgtgtaacccgcccaatgatttttattggtttagtcgggttaacccgtttaaaccgatctttatttgttattttttttattattgttagtttttggtgttcaaataattgatttgaaaaaataaatgtatagtataagcctttcaagattaaaataactatagtttaaattaatattaaaaacaaatataaattaaataaatattaaagtattaaacaatatttttcaagaaatagaattaaaaaaaatatactcatatgtaaattataaatttgaacttaaatattcaaatacaatcaaaattatcaactataaattttaaattttaaattaaacactataaaatacaaattttaaatgtaaaatagtttaactattaagtgtaatttatatattatattatagataannnnnnnnnnaaatatgtaaatcggtttattcgagttatttgggcaggttagaatacgggagcgatgattgactgcaaacgaaagatggtggtgtttgagcccgacagtgctaacccagcggtgtttgtgggtaaggttcaaggggcatgcataccgagaatatca

SEQ ID NO: 18296 - DNA, 2403 bp, Cannabis sativa
  modified_base (2345)..(2349): a, c, t, g, unknown or other
ctgaatgtaattaagtatcgagttcaatataacttaaaaaaattatttttagagaatatcgctaactaatcgtgaaacatcacctataaaaaatgctgagcactacttattcccaataacaacatatataaatccaaacattacataccgatgagagataacaacaggtaacaacttagagtctttgactatacaacaacttagctaagctaagagagtgcaagatatttacaacaaccagcttaagattaagggtcagtatcctttacatttattgcatgattgtcatctacgaattataacttattatacagtattaggcattaacttttattattaaaggctctgacaagttggaaaaaaaaaattaaaggcaaaaaagcaaataaattcatggtaagtcagttgcatctacaatctgtaaacatttctcgacctttaatctaatagttaagaagttgctcacatagaattatggatggggggcaaaacacatgcccctcaccaaagaaaaatcttggtacttttattttgttgtagtgttgtagtgttgtagtttggaggtttgtctaactaaccattttcaattggacctcacatcgatgataattttgatggcacatccccatatatctaactaataaggtcttcaatacatccccatacatcatcttctcttggctgcttaaggatccaaaccacagctcaatctcatactcagaagaaacatcttttaggccaatatgcaattttacacggcttggagaaaacattctagtgaattcaaacttcccttcaattaaaaacattagactttgcatgaaaaccaaggaattatgtgaacttccctcacttaaccaaaaccagttacccaactcacaaattcccaagttttaaagtacagaaagagaatcatgaagaaagtttcaaacagtttcatattgatgcagagggaaaaataccaaacaatcagtgcatgtacatatatgaaggcttttgtaatgaactcaccttctatacatctttgtataataactgatattttggaattcgttctggtggcaggggacaatgcacaatcagcttccctttcatggctcctctaaatatagcctgcaaaaaatccatctttgccttagtacgaagataagcagatattcaaagctcatagagacatacatcaaatagttaaatcaaagcaaagaaagctatagtacagattcatagaactcaagaacaatagtgagaaatgttagtaaagaaaaaaaaaatatatgttacagacctctactacatctatgaaatcttgcttttggtgaaatgctccaacccatttagtatgatcagcggtactgaacgacaaaaaaaaaatagataaataaataaatggataatagtgttgatgcatacatatatacacataaacatatccaattatactgaacgacattagatgatattgttatccgattcaaatttcaactccaaaatatagggtttcgacaggtttcaaaaggggcttcaaaagctaatcatcctacaattaagtataattgattgatcgaaaatttaaaataataagaaattaataataaataccccgagtccatcttcatgtgattcgcattgaagaaaaaaatggtggagggtataaaagtaatgtcaaaatacttgacgtaaacttgaacatcttcagaatcaatatctaccagagccacacttgcgaacttagaaacctcccgcactgatttacagagctgtgttgaaaatataacaagaattaagcatcttttctatctttgtttaaaggaaaaaaaaaaaaaaagaaagtagagacatacgacgtcgtcgacatggaggcaaccagagtcggaaggtcggccgaagcggaggacaagaaccttatcaatggtgtctctgattatggagtctacctctttcttctttgtcagagttttcagcaggtaactcattcttctacctctttttcactcgacgggaaagaatgctttttttttttcctgtaaaatgttcttaactaatttaggtgagtttgttaatatttttttttgattaaatttctgcaataggtgaaaatatttttcaaaaatatattatataaatctgtttttactatttaatttttataaaaaataaaattattttaaaaaaaaaatttaattaatatgttggactccgaccctaacttagactttaaaacccaaataacagtcctgactctagtctcgaactcgaaccatggttccgaccccaaacatgaatttggactcagacttaaataaaatcaaaaaataaaaataaagttatagaacacatttttattnnnnnaaaataaaattttaaaaatacaaatttactttttttttcgtgattaagaaatta

SEQ ID NO: 18297 - DNA, 2970 bp, Cannabis sativa
attgttaattatgcatattaatgtgagcttattttatttgttctatattcagctagttcatcttctgttgccataatatctgctcaatattaattcttttcctatgcttaatagaaccaatttcaagaattagaaaaggaacctacttatagttaatggtccattcaaactgttgtaactgatatatattgttaatgaaactaaataattattaattaactattttaattagagaaaaccataatataataaaaatttattattagctatatatattagctctagccatcaccatatgacgcaatgaatttgaattttgcttcaaaattataattaaatggtataaagaagttattatctattttatataaagtctgtttatataacagtatttttggtttatgaaaaatttataagtgactttttatttatactaaaaataaaatggtttattattaaaagtaaaatagtttatgagaaattcatgggtcactaatcgtatttttttttggatttaatgggatttattttatttattttatatataataaaataaatcacattaaatccaaaaaaaaaaaaatatgattaggtttttgcgctgtggtacatctacgattggattttctttaattatttattgtattccttttcctattacaattcagacatttccattttaatttatatcagagctagctgagaaggacttccactctcattaacccgaaacccatttatatctcatctcttctctctttttttccatcccaatatatatatcagaatcagatatgccaagaatgcattctcatcaatcattatcattacattgaatatttttaattttaaaattatgatattaaaaaaaattaaaaactaaaataaaattaacatatgtgacttggcacctaacatctatatagtatatatatatatatatatatatatatatatattgttttccttctcttcatcttaatacaattgcagtcctatcttctaccttttaatttgtgctttaagctttttattttgaatatcttattgttacttgttttaaaaaggttatggacaacgcaactttaggttgcatataacaaataatccatatataattgagcaatttacactaattacaatttgcctaacttcaagttctggcatccatatataataataaccatgtcctatattcattattgtaatactacttatacccatataatttgcctaataaattcataatattatttgaaaaagcaatataagaatattaataaagaagatacttaatctattttaaacaaaaaataatatgtagtagataccaataatgttgatgaaaccaacgattttctctatctcatcaattaaactctacaacaatagtatttataataaaaaggaccctaataaaaacgtgatcaaagtacactcgaaaagatgatcaggtcagtagttctcacgatcatatactaacagttctttttctcataaagaaattaagtacgtactatattgttataacagaaagatatataaatatatatatatataaaatacatttatataaagttacaatgcatgaggagaatctagatgagtcaacatacctgaaattcttatctagaatggtcactacttgaagttttattggaacaactagttcgcagcctaactgtcataattgtcatatttattttgaacaacttgaaagcatatttgttagttgtgccttatatatatataaataaaaaggggatgaatgactatggtataggggctggccaaaattccctatgagtggggaaccttttttaacttttgatttcatatcatgtggtaatagaagtgtagtgtagataagcaaaagatatgtgttttctattcaataaaagtttgatatattatttaaatgatattttgtaaaataatatttttatatattaaaagtatttatttaacgaagattcttgtgtttttttatttctgtttaattttaacagagtattctattatgtgtaatgatttaaaaattctaacctttaatatgaactcacccaattagaaatatgaattcctgttccacttaatcacaacaacattcagtaaaatttgagaggaaatgggtgaaatgaattctcagctcaatgaaccagagcctgagatgttgatatttatattaacatgagtaaatgttttacatgaggtaaaaagggaataacggctccaatacagaaagaatatgcagatcctaataaagattgcatagaggggaatattctaacagaatgcctaatcatttcttcacacattcttggaccacaatgacacctgtcgatacactgcagagcacaatcaagtgcagtactctgttgctgaactaccttgcaccagcagccaatttctcatttctcaacacattcattattgggatagtatatctaaattgctatctcatcccaataattgtcatttacaattggtgtgagttcttaatggtttttcatccttctctgctctatcgccattcttggtttcctctttcgccaaatcaatatctcgtatgtggatttaactctacctgaggacattacatccattgagtataagtagatttttaagaagaacagaaatattaaaggaaaggtaggaacctttaaagttaggcttgtagccaaaggctacacacagtgagaagcgtcgattatgacaaaaccttctctcctgtagtaatacttaaatctattcgcatttttcttttcataactgccacatatgattatgtgttactaaggaaagatcaaaagatgtgcaagttacttaaatatatttatggattgaagtaagtctctagatcctttttttaaaaaaaaagtctctagatcatgaaatatcacctttaataagactattaaagagtatggcttcaaacaaaatgaggacgaagcatgtgtatacaaatac

SEQ ID NO: 18298 - DNA, 5812 bp, Cannabis sativa
  modified_base (937)..(938): a, c, t, g, unknown or other
gttttatttagggcataaaacctaacactcgtaccccaagtaccactaagtattgtaccacatgcacttagtacccaactatactagtgttggtaataccagattgcaccctcaggctgtaccacactcactcagtaccattattatactagtgttggtagcttataaaacatacaatcgcatgcatatattatccatacacacatacacatacatactttatgcttatcttaccttgtttccagattcaagcgtgccgatcgacctgaatggaaactcacttactgaacggaggcccttcgtcacaatcgtaaaaatcgatgaacaactttctaaaatcttttcggggatcaaaacttaaaactaaaagtctccctagcaataaaaagcataacagagctctaaccatcgaaaaaactcaagaaaaatcctaaaacaaggaacctgtccaaaaaacggtaagtcatttttctaggtactgcactagaaaaaatggtaggccgtttctgctccaaaaacgaaataaggcccccaaataaaccaaatcaaccccaaacttcaccaaatgctccaaattacctataatcatcaaaataaaccaaaaccaagcaaccaaaccaagtatagctcaaaattacaaattccaccatagttagaactcaaacttgctcaaacccaaaatcaaacaacaaccatagctcaaataagtttacaacgtcaattaaaatctgttaaagacattaggggtgtccgcggtgcgggtggtgcggtttgtgaccattttttcaaacatacccacacatgcagtttttccaatttcccaaaccacacctgcactgcaaaattaaaaaatcacaaaaactgcactgtaaaaaatggtgcggtgcagtgcagtgcagtttttacagtttctgcggtttggactatcactaaatanntaaactatcacaaatacaacaaagcttgagcaacacttgtcaaaaataccacaaggcttgaaaataaatatgaaaacaaaaattaagtttcaacaatacaataattagtaggttttgggttggacattcacatattgaactaaataaatataaaagttggtatttttataatatgcggtgcggtgcgatttgaaccgcattaacaattaaaaaccgcaaaccgcactgcaccgcgcggtttgggaaaaattcaaaccgcgactgcaccgtaaaaaaatttaaaccacatttttttttacggtgtggtgtggtgcgggcagtttgagaggtttgatgaacacccctaaaccaaattcaactaaatagcaccctaattcccaaatttagctctaaacctaacaatgtcatcaatatgctaaggataaggttctaggattacctccaattcaagctactccgagatctagctaatttccccccaaaatccctgaagttacaagctccacctctaattttttcttacagccgagtaagagaaagagagtgacaagaatgaagttttgttctgtttactttcttgaattttccacttagaataactaagagataataccttgatctcttacataactaaaagccagctgccaacatgctaaagtgccacctattcctctaaataaaaagaccaaaatgccctctcttaagtgtctaacttaataaatggcttaggggtaaaatggtccaaaaccataactctgtctaataccgatatcttaaatgtcattaatgaatatccctctaactaaaaaggttttaactacccacgtgactaattcagccatccgtcgcattttccatcgccgtcgggcaaaaattataaaaactgtaaaattttcatataacataattaatatacttagagtttaataaaatctctaaaattgagaaattataactctaatgctcatttttaaaaatgggattcacaataaacacaatataaatattcacatataatcaataataaccaaaattaatatctattgccatactaacccctaattaaatcatgcggtcattactattcccctgttaaaaggatttcgtcctcaaaatctaacctaaatagctctgggtggtgaatcctcatgtcgaaatatagctcccgagtggcctccttcactttgctatttttccaaagcactttagcaaacactatggtttcattttgaagaaccttttcctttctatccaggatttgcaccggtttctcttataagataggtccgattgtaattctagggcttcataactaaaaatgtgggctgggtctgacacatattttctcagcattgaaatatggaacacattgtgaatggctgacagtgctggtggcaaagctaatcgatatgccacttgcccgaccctcttaagtatttcaaagggtcctataaatctaggactttacttgcccttcttaccaaagcgcttgacccccttcataggtgaaactcgcaggaagacatgctctcctgcctaaaatgtaatgtccctacgcttcagatctgtataactcttctgtctgctttgggaagccgacatacgagctttgatcttgtctactacttcatttgtcttctaaaataattcagggcccatgtattttttgttctctagtttcgttccaatgaattggggaacgatattttctaccatatagtaattcgtagggagtcatccctatagtgctctggtagctattattgtaggagagctcaattaaaggcaggtatttactccatgaaccctcaaagtccatgacacaagcctgtaacaaatcctcaagtatcagaattgttcgttcagattatttgtctatttgaggatggaaagctgtgctaaatttcaatttggtacccatagctttctgaaaacttacccaaatttttgaagtgaattttggatctctgtccaagataatagattttggaactccatgaaggcgaactattttctttacataaagctctgcatactggtcaaccgaataagttgttttcaccggaaggaaatgtgccgacttcgtgaaacaatccactattacccatactgagtcatacattcccgtggttttaggcacccaaccacgaaatccatcgcaatatcctccgacttccattcaggaagtgttagaggttgaagcaaccctgcaggtctctgatgctcggctttaatttgttgacaggtcaagcatctagtcacatactcaagcacatctttcttgagcccgtaccaccaataatgaagcttaagatcatgatacatcttggcggtacttggatgcaacagataaggcgtagtgtgtgcctcatccattatctcttttctatgctcgacattatttaaaacacataatcgagtcttaaataacaacatcccactatctgagatcatgaattccttagctttacctgctagtacttcctcttgagtcttgattaactcaggatcctccaactacgccattctaattctttctaatagatctgactgaagtgtcagattatgtagctttccaaccacgaactcgatatttgaattaaccatatctaaggccaactgaggagatatcattaccgtactgtaaacttgatcagcgcccttcctacttaaggcgtctaccacaacattggcctttctagggtgatacaagatttcacaatcataatctttaaatagttccaaccaccgcctctgtctcatatttaaatctttctaggtgaagaagtatttgagactcttatggtcagtataaatctcatattgttccccatacagataatgtcgccaaatctttaaagcaaacacaaccgatgtcagttccaggtcatgggtcggataacgttgttcgtagtcttttagttgtcgtgaaacataagctataaccttatctgcttgcatcaatacacatcccgaaccttgtctggatgtgtcacaatacaatatgaacttttcttgatcaattggtagggctaacactggcgctgtaattagtcgatgtttcaattcttggaaacttttttcacatttatccgtccatataaccctctgattctttttagtcagctcatttaatggcattgagagtttagaaaacacttctacaaagcattggtaataaccagccaatccgaggaaactccgtacttcagtcattgttttcggtcttggccaattcttaaccaattcaaccttcgtggatcaaccataattccatctttcctaacaatgtgtccaaggaaggacacttgagacaaccagaattcacactttttgaattttgtataaagtttatggtctctcagtcgctccataaccatacgaagatgttgctcatgtttcgcttctgatcgagaatatacaaggatatcatcgataaacacaattacaaaattatcgaggaaatccttgaatacctattcataaggtccatgaaagcggcaagagcatttgttaacccaacatacataaccaggaactcatagcgtccgtacctggtttgaaaggtcgtcttaggaacatcttcttctcgaatttgcaattgatgataacccgaccgtaagtcaattttagagaaaaaaagtcttaccttgaagttgaacaaacaagtcatcgattttaggtaagggatacttgtttttaatagttaacttattcagctcccgatagtcaatgcacatccgaagggacccatctttcttctttacaaataaaattggagctcccgagagcgacaccacgttgggtcgagtaaaccctagatccagcatcccatgtaattgtatttttagctccttgagctcagttggagccattcgatatggcgcttttgaaataggctcttccccaagcactaacttaatgttaaaatctatttcccgttgtggtggtaaccctggtaattcttcggggaaaacatccaagaactctctaaccaccctgacttcctaattaatagtgaaaaatatacatttaataagcttaaaggataaaataaattaatatttttatgaaattaataagatatatttttatgttgaaaatatttaatttagatttaatttattaatttttttaggaattaaaattattgagagttttaaagagaattgaagaattgaagaaaaaggattatttttacaaagaaaaaaataagatcatattttcggagctggagaggcccactcccacgcaagcccaaagcctcatctaggtcgtctgtgcgcgaatccaaagggccaggagggcgcgtgtaggtcacagccatacagaggcgcgtgagcaccttcttccctctgaccaaccgccagcatcagacgcgtggggtcccacctggacccgcctgtcccccagccagctctccagcagcctgacacgtgtccgcccgctgcagccttctctctcccagcagcctctacatgctcgccacctgtcactctctccttcaatccgccatttttcaaattattttgaaatgcaatttcaaaatacataataattttatattcccttgcatttatttggttcactttcctatttctctcagccaataaattgcaccttgtatattttaccattttaccctcacctaccttatttatgccagcaatttttagaaaatattaaaataattaatttattaattattttaattcactcattttggctataaaaagagaagagatggaccccttggagacaatcttagacactctctctttagtgtaatttttagagtaaagaaactatagcaaaatttctcttcacttttcttctcatatttctttataagaatgattagcataatggcctaa

SEQ ID NO: 18299 - DNA, 1828 bp, Cannabis sativa
agtattttcatttagtttggatgagtaattaaattttatattgttatacgtcaaatttatatgtatatatgaaaattaacattaaagttttaccaatgaacacccctaagaataaatattagttagtgaagacaagtactattaagtattattatacgaagtaattaagattaaaaaaaacaaattaaaaagccttcataggatctgccaatgtgtttatgtgtagggtttagatgaaacaaattaaacaaacttatataaagcaaataacactatatgagaggatttgctcacttattttgttaagggctttcaagaatcacaaatgtggcactaatttgatgaaataaaaaaactacttggtttttttaattattattattagaatcaattatagaagtagcataatatattattaaattcaacatggtttataaaggtatatatatgtgtttatattatgtattggattctattgattttatgctttgagttcaaactaccctaacctattaagtcatgcttttaacctttaagatgggattaaggaaccaaacaacaatcttcttttagtagcaatttaaaaggacaaagggatcaacaataatataagtgagtaataaatctaaagtagtagtaataataataataatacttaactagtattgcatcaacatttttatgtcatcagttttgctattagtacattcaaaacaatgtttgatcaaataatggtaagaatttttcttttaaggaatataatggtaacaattttatgctataggaaaagagaaaattttaaggtacccaatactagaaggacatgttataatgatattagtgggtttcatatattataattataagtaatatataaaaattgctaaccactaaccactcataaattggtcaccttaatgtgtttaatagtaatactaaaaggagaaatgttctaaaatatgagtgattaaaattacaataacataagttccgagaaatttacagcgtttaatagccatactaaaaataaaaatattaaaggacatcttacggtgattaaaattctgacaagacaatttataagaagatattaataattggcgcaagaatttctttaaactaacatgattcattatatattctaataatatgtttaaccaaattataagctgcaatattattgtgggacacatgagacacaactaaactgcagtatttttatgggacacatgagatacaactgcccttggaaatctaaataacaaagctatgatattcacaaacactatttcttgtggtactaagcatcttaaagtaccttaatagcaataataataataacaagggtaaataccatttagactctatgttttgaaaaaattattgattgtaccttttattttattaaatgacaaacttatgtattcctgacataatgtttttgtttgtttattttcttttgtaaagtacttgagttcccacaatggctgcaatgcatggcttaaggttgtacttgtacaacttattctcttaaacacctcatatattctttcattaataagtgtgctattatattatgacttttttacattttcataacattaattgctgattttttttttaatattcacaactacatcataaaatgaacatactcacactttgcccccctaaaaagaataatttttatgattttattatatacaaatcttggccagcctatatatattgtgtaactttggataatgatgacaacaaaagcaagatatggtatgaaatgaagtaccatgtaaagaaaacgaatgtgattcaactaaaatttaactaa

SEQ ID NO: 18300 - DNA, 8311 bp, Cannabis sativa
tttggatgaagtttcttttcaagtttatggggtgttcccctcggtgtgaccttctaagagaggattggctcgggttgccttcgctgactcgtaggacacccgtctcgcacatgtcttttctatggttatcttaagaaatatcattagtagagagcatggagttccccccattaacacgtgcaatggattctcctctctcttgttgtttgctttcacacttggtgagagatacttgggttttgcccccaaatatgccattcaacaccttttgcatctagccatcgtagtctctaacctctggttcttccaacagaagttgtttatctcctcttcataataacttatttgggagcttgagctcacctagtacatctacttctctctttcgagaccattgtttgataggcccaagccttgtagagtacacgacaataggcacagtactagaggcattcatttaggtgactggatagcttcatcgatggggttagtcgctgatgacatcatcgtgccatgtggtgttagaagcttcctcaaagaatttgtttggatttctcttttggtggttagagatactcgatctttcatggtttggtcttccaaacttcaattgtttacacctagatgacactcagaggctagaggcagggggtctcctctggaagtgaccaactggttgttgtccacgaggatctcaatgtcttgtagacgttgggaaggtctttacatctttgaatgttagtgaaatagaaaggaatcaacacagctttaaactttgtcattctcacagacggcgccaaaatgttgatgatgagaatttgtcaaataagtcagttattgggaaactctaagtatgtatgttggtaagtaagacagtagatgaaataaaaaaggaacttaagaaaagttgtaaaataacaatggtaaaaattaagtctcttgtattatcaacttaagaactctaactacaagaattttcaactctcttttaaatctgagaaatggagtatttataggtgagccctattggctctcatttacatattgatcctctaatggtccccaagttccaaggaaggacgttctgctcctgtaagctgcaattgcaagaggtggtcttgcaacttgtactgttggtgggtgtcaagtggtcccgaggcaagagtagtggctgcagcgtacttcttgttaggacatcaaagcttgcaggtgagacacttccactacttgtcctctccccatgctaaggtgttgtaggtgaagtgtagcaatatcagcgtccgatgtccttttgcttctccccctcacaacatattaaacatcagttacctcgctgagagatgtgatgattcaatacaatgccctgatggggttcatgaggccatgagtctgaggcatgtgagttgcttgatgcatgggagggcctgatgtatgggagtggcacgaggcatgcaagtggccttatgcatacgagtggtctgctgcatgtgagttgctcgaggcatgcgagtggtctgctgcatgcgagtggcacgttgcatgcgattagcatgccgcctgtgagtggcatggtgcctgtgagcgggtatgttgtcgaacgatcccaccatggccaactctaagagtgagcttcattatgctcttgaattagcctagataaatctagaggattctaagtgctaattttcaaggttaataatttttttgacacatatacattagttgattggacaatcaaaattgaggtaaagaattattttccttatcatcaatatgcaatttatgttcattaaaagcatgtctaaataacatacttaaaagggaactcgatgaggagattatatagaccaaccgaccaaggattgagttttatgagataatgaacacaaattatgcatgcttgttttaaagagtgaattagagcaagcaccaaaataatagtatggaagttgtttatattgttaaatttgttgaagttttgatacaataatgaccatgtcattgagatgtgtctacaaattgatggtatgttgattttgataaattaaaaaagaggcatagtaaaacaagagatttatatctaacactatttcaattgaaagactttggaaagttaataccttttgggcccatttggtacgtagaattggactggattagacagcctaatttgtctagtataatgtttaggcatgctggaagtctggataactaatccagctaatttcatatgtctgagatgatttaccacatccagcagggtgggataaattggacgggataaatgatcccataaatgtgagattttttttatcgttttttaattttgattttgttgataaatcttaaatttattaaaattttaatataagaattatcataaatttatttgcaactttttttatcaaaaacatattcattaaaattagtaaaaatctataattttgaattatcatacacaagttatcaaaatttaaaatattatcaaataaataatagtaacttaattgattctaaaataaacactatgataataaaattatatattccttttaaactactagaaaatttatatcaatattttagaaaattaatatttatattaaattagtgatgaaattattatttagcttaaatagttttatattattcaagtatttttattttattattttaattatttattaaataaaaatatgataaattattttattataaatttatgatatatatttgattatatatgatatgatatattattttataatataatatttttattattcattttaattttttttgtgggagttatttatttttaatttatttattattatatattttattttgattaagtatttttttttaaaaaaataaataaataaaatagttcagtctattcttaaaccaaacacaaaattactttcagcataatccaatcttatccagttcagtccaatccaatctgatcatttttagtctaatcctgagttttaaacgggtcggatatataagtgaaagaaatagtgggggttttaccataaataggattaactttgttgagaaagtagttgataaatttaattattttaaatatcaaatagacaaataaatgctctagttatttcaatcctaaagcttgtaaataataaagaaagagtagagactcttaagtatgcaagtgtatttaacgagttcaaaatacattattccttgcattagtgaatgttgcatatattaaaagtaaactaagagggtttactagaaattcaggtatagaatattggaaggttattaagatagttcaatatggtacctaaaaaggataatgaagttatgccttcaatattcaagatttcctaaatacttggagaatattccaaaacgagttgtatatcgagtgtgagatttattctccgccattggttgagtgtgttactcaaagaggagaagtttcttatgagttaagaaacaaatatgtaatttacactctagtaaagaagccatgttaacacacttaatgggaaaacactgaagagaccgagtgacaaagggatattccaaaatacatttatggaaatatgtatcattagagtatgatattgcgagaagccaaataaactaaattctagaatgtcatacattatgaaaagtgtagacatataagtctaagacatgattatgtaagagaattaattcaagatggaatcaaaatgtgagaactagtgagttattatagaaccactcacaaacctttgaaaaggctaactagttctacatctagaggaatgggattaaaactccatgaatagaaattcaccatgatggtaatccaattctaatcttgactaaatcaagtgaaaaaaattcaatgggtaagaacaagttattggtggatagtttcaacactaatacaattttgaatctatctaagaatgattagtgttggttgctaccgttgagagttaagcttagaagttttcaatgaaattcagctgtgttacaacaagcatctttaaaggtagcaaagatgttgtaagaatttcacctatgtgaacctagaggtggtgtcgcctctcccatgagtgaattctctccccagaaggttcatgaattggatagagcacatggccatgtgagtgctaagcaagaaatagtgagaagtaacaaaatgtaaccaaattgaggtgtgtgaggtattgtcgttttatcacataggagtcattggtttaattcctaggagaccaatcacttcgagataactttgtagtgttgtcactaaggtaacatttaaattaaaagatatcttattttatgtaccaaaactattaaggtaatataatcctctattttctaacttaatagttttggtgcataaaataaaatattttcgatttaaatgttaccttagtgacaaccctacaaagttttatcgaagtgattggtctcctagagattaaaccaatgactcctatgtgataaaacgacaatacctcacacaccttaacttggttacattttgttacttctcactatttcttgcttagcactcacatggccatgtgctctatccaattcatgaaccttatggggagaaaattcactcatgggagaggcgatacctcctctaggttcacataagtgaaattcttacaacatctttgctacctttagagatgcttgttgtagcacaactgaatttcattgaaagcttctaagcttaaccctcaacggtagcaaccaacactaatcatccttagatgggattcaaaattttattagtgttgaaactatccaccaatagcattgaaatttttttacttaattaaatacatcaatccttgtttggggaaaaaatatgaacaaaaagtaaaagcccaataaaataaaataaaagtgctaaatcccaaacaaagtggatacccaaaaacccgagactcgaatacattaaaaagaaaggcccaacactgtgtggcccaacaagaaacccagaggatagatatgaacgaaaagtacaaacgacaagaaagagaaataaacgccgacggaaactagaaaaaagagagatgaaaggttagaaccaaaacttaccatctcggaccgatgcaggaagggccaggtacatgatatattaaagatgggggagacccaaagggagtcttctgtctagcttgccgacggaaaactcgtttcccgaacaatatagggcgacacagaacaggagcatcttaataagggacgagtacctctgttgggaggagacatcaaaataaagacgtgggatcgcgatcccccattcgccttaggtaagaaaaggaattccgacggaaaaaaggaatgcagtccaaaaagggtgagataaacaactcagaagaagggtacaacgccgccggacccaaagaaggcaaaagaatagcaggaattggctaaaaagtagacacgtagcaacgtagaaagagcagagggaaaaaacacgcgtcaggagaagagtaagtgaacaatagatcatccatgaaatcaaagtacgtaccatataaataaaaagaacccacgtaaaagaggcaagattaggaactggaaaagagagaactcacacaaaaatgattttaatagctaaaaaaataaaaaatatatataatttagtatatatcaaaatttaaagaataaaaatcctagctaacttttatatctccgtgagtggccttttagtatttctcaacgaaaattagaatgtatttgggatttgttttttttttttttttttttgcaccgtagaatttctgagaaaaaaaattagcattgttatgtgaaagtgaatacattaaactattatatgaaaccggataaaaaaatactagacacgtaccttttagcatttctaaaaaaaatttatataataacgacaagaggaagaagagaaaacgtacaggattataataaaagctactgcactccaccataccacctcgaaatcatatcagacagaaagggaaagctagatgataatgtcgattccgatacccagtaggcagctcttcatcgatggtaaatgggcagagccagtcttgaagaagcgaatctccatcatcaaccctgccactgaagaaatcatcggtctcttatttctctctatctctttctctctctcctttattttttttgctttccatttctgctatcacttttcactgccgtttgagtttttatggatttgtttatggtgtttgtttacggattttggtattttctatacttaattccgtggcaaaaaaaaaaaataatggatggagaagagtgttgaacaggatcacggtgcttcgctatatgtactgaaaaatttgtgaatagctcagttatatttgtactaagttttgttattggtatcgtttaattttttgctctctaaatctctatgtatcaatttacttaatatatactgaattatccgagaacgcagattgagatattatggattaacattttttttcttcttcattactatgtttgaactgggattagcaatgctgcttttgggatttctgatttattttcactatggtaactgaagtgttttctggatcgtgcaataggtaacattccggcagctacagcagaagatgtggagcttgctgtcgctgctgcccgaaaagccctttctagaaacaagggcgcagaatggtctaaagcacctggggctgttcgtgccaagtacctacgcgctattgctgccaaggtatttgctatgtgatcttgttgattgcaataaccaataggactgaaattgattatactaaacagcatatgttattctgctaagtgtttggaacattcaaagctgtccaaaattttggaccatgcctataccaattatgaaattgagcacggaaaccaattagttagaagatctgtttgtagactagttttcttaaaagaataagattggcttataaaagaggaatttaaacgcatattaatgtgttatcaaatgtttccattcctcctacactgattctgatcttttctaagttgcacgtgtaatgtattctttaaacattttcatttaattgcataccctcctccaatataagaattgattgagatcaggagttttacctggtctagcctacagatcatcacatctttactagaaatgcctagatcaactatataataaaccaaaaatatcttatgtgccttatgctgtgccaagttttttccatgttgaaagatcactatggatgtcctagttttctatagtaattttgtctgaatgcagatcatagagagaaaagaagttctagcaaaatatgaagcacttgattgtggaaagcccttggatgaatcagcatgggacatggtactgtggagcttcttaatacatttattattattagttcttctatactttttttttcctggattcttttatgtctacatatggaataagtaaccttcataagctaaaattgacttttaaggagattaaacacctaaatgttgggagattatgcagaagattatattcacttgtcatgttcttacattgctatttcatgttatccaggatgatgttgcagggtgttttgagtattatgctgaccttgccgaaggtttggatgcaaagcaaaaggcaccactttctattccgatggacacattcaaaagccatgttcttaaggaacctattggagttgttgggttaatcacaccatggtattgctgcttctaggctttatttataaagtgatggttctagaagttggataattttgggatcatcagatttaattagatgattttcattaaagtgattacatagtgatgagataccaattttctttgttaaggaactatcctttattgatggctacatggaaggtagctcctgccttggctgctggatgtgctgcaattctaaagccatctgaattggcatctgtgtatgttcttattaatatttgcttactcttgattttttattattatgtttcatgatattgatcgtgcattcaatcctagaacttgtttggagcttgctgatatttgccaagaggtgggtctccccgctggtgtccttaatattttgactggttatggacctgaagctggagcacctttggcaactcatccccatgttgataaggtttgtcttttgcttggcaactttgttgttgtctattttattgacttgaaccatgtctttaatatcttaaaattatgttttataaatctctggttggataaactaacattatgacttattgtactgcatgtacaatgatggatcagattgtttatcatgcttagtaac

SEQ ID NO: 18301 - DNA, 3870 bp, Cannabis sativa
  modified_base (2426)..(2429): a, c, t, g, unknown or other
ttaaaacaaattgtgtatttttaaagggaatgttcttttttttggagtttttaattttttttttttttaaatactgtgtaaattttatattgtatactgtataagttttatattatgtactgtgttatgattttattattgttacacggttattttttagttcttctactattatatttaattattctattttgttgtttcacggttgttttaagttgttttataaaaatatagtatttttattaaaaatttcgatgtggtagtaaaattataaacttttacaaaagaatctactatttttgtaaaaatcccatgtttttgggcctccaagttaaatagacctaagttagcttaggactggccctaatttgaggttatataataataattataataataatagtgattattgtaaactatgtataatcagatttttttttttttctgaaaataaacttcattaatatacaacatttgaaaagaaagaaaaaaaagatagaaatcagtttactattcactctaagtatatgcataacaattaactaatttatgagtacaaatataaaataggaatgccttaaaaaaattgaaaagtaaactaacaagataaagatcgattttattaggagaagatgaatgtattgatcaagtataagagaccaatccaacacttccattaaaaaaattgtttttgcttgaatgattgtgagactctcatatataccacatccatctgaataattgaattatatcctcccatgagagaccagtctagcactatgtaccatcaattattcaactgcttcaacttgaatgacagcaaaagaaaaaatgtaataacgttttgtacgtcatcccttttcaagatcatatctaaagtctgaacataggttcatagaaaaatcttcattgaaagggactgaaattaagcattatttggaataaaataactacttgaattgagtagaattggaggagtcatttaagaaagtccacttctttgatcaacactttctagcttatgcacactagtgttgaacatcagatttgtttttaagcatgtagatccaagtgaatctaaatttattgaactatagtgagaaagtatttataatcttctgcacttgttatgtaaaatggatcccaaatgtccatgtgaaccaaatcaaatatatctttagaaaagttgtgattcgaaataaagggcaatcgtttttgcttagccaagtggcagatgtgacaatgtaaattggaactaggatgtgaaatgttgtgttctttattgaaaaaacttgaaatacacattgatagatatccaagacgattatgccattggtttacattgtttttattcaatgaaaaagaagcagtagtagtagcagctgctgtagtgaagttgtcttggtgaagctagtacaattttccacacttttcagctatcccaatcaccacattcagagtaggatcctgaataacacaacaattttggtgaacaagattgaattaggggtattaagcatgaaatctggtatggaaaaaagattaagcttaaaccgtggtaaataaagcacattctgtagtgttattttcgaattaatcttgacaataccaatgttttggacaggtatatgttgtccatttggcaaggagacatattttgggaatggtatgttagaaaaagatgaaaaacaagtgagatggtaacacatgtagtgggtagcaccactatccacaatccaagatgttgagaaggaatttttacctgccaagtttgatgcagcaggggtcatggtagtaggatctgcatttgttgtgttgttgagttgctgacttaaaagagagattaagtgctggcattgggatgatagatcggcatgaacagagctgcaacattggccttggctttgcccttatcttgcttctttttgtcaccataaccaagaggaaacccgtgaaggaaataacacttgtcaactagatgaccgggtttgccacaatttgagcaagatggtctaggtttcttggctcttgaggggttagtggaacttgatgcagcaaccaaagggatcgaatcagaggatccaagggatctttgacgttcttcttgaacgatcattgcaaacacacgggatagattgtggataggttcgttaagcaaaatttgagcacgaaccgaagcatagaattcattcaaaccagtcaagaattgaagtacttgattttggttgtaataatctaagaaaattttcattgcaccacaagtgcaagttgttataggttgaaattctttcaactcatcccatagggatttcatctttgtgaaataggtagaaacagaacaatcaccttgctgaagccgagtgagttgggtctgtaattggaatattcgagggcctttgccttcattgaaacgctcagcaagatcnnnncacatttcagtagctaaatcaaagtacattatactttgtgcaatctcagatgaaacagaattaatcaaccaagacattaccatgttattgcacatgaaccaagagttgagattggtattaccaggttctggacaagggagagatccgttgatgaacgcgatcttgatcttgactgtcaattccatcgtgattcctcgtttccatggctgatagttggttctgttgaggacagtactcacaagaaccagaccgggatggtcgccggtgctgaggaagaaaagggtggaatgatcatcagcaactaatcgagaatggagtgcctgagttgaattgtcgtcaacaatggtggaattgtcttggagaccatgatctgcattctgagattgaacccgtactggtggaatccgacgaggaacaactgaggaatgaggagcagcgatagggtcggaagtgacatctgctgcagggttgtcgatcgtcgatggtgtagttccatcctgagaacgagtagttggcctggccatggaaactgtgggccggagttcttctgataccatatgagaaaagataggaaaattagagcctttggtattctatattgttgaactgattttacaatggaggaatgagcttatatagctcgatacaatcaagaattggttagttgaatctaaccaatgctgtaacagaattgtatagctgtattaacaaaacataactaacaaaactacccttaactaataacttaatccaaagctaattctgaaactagcttatgcacactagtgaaggacattaactctattgtttgagcttgaatgactaagaaactccctacaataacaataaagttaataatgagtccttataataaaagtaacattcactataaaattttgataaaagtttaaaaaatagaaaacttatatataagtgactccaaatattatggtgcatagttcctccatatagtcgccaaacataaacaaaaaatacaataacataacaatgaaacacaccataactaaccatacaactcaagagaattttttaaggaataaaataaataataataatattcattattttcatcacttatcgctaaaaataataacacacactaaaatatattaatgacactgagaatggtttttgaataaataactataaataattacgaataaaacaattatcaatcaatcattatatacgtttcaaaaaaaaaaaaaacaaaaatcaatcaatatatatagaagaataaaatggtgatatgacactctaaaattgctttaaagttattttttttttttcttttatttccttaattcattaattttttaatttttaattttttttttggaatattggcggctaaaccacctgaactttacggtttgtaacacttaaccacaaaaaccgaatttttagcggctaaactacc

SEQ ID NO: 18302 - DNA, 6856 bp, Cannabis sativa
tttaccttcatttttatattctttgagatatatccacttttataaatgatgttcctatgatagcccttaggttgatgtaaattatgtgctaaacttaagtaaagagtaaaggtatatggggaaatccactcacaaaagtgggtactttttaatgaaatataatatgagggtattttttattaatgaaaataaaaaagaggtatttctcaacttatcacttttttttaagaccgaaccaaacacaacctttgtccttaaatgcatttattttcatctcttaatgggcatttccaactggacttcaaaacaccaaatatagtgcagtttcatactatttttattccaatgggacactaaaactactcttataaataggtttgtctacagtgtcccactaaatttagtggagtactgtagaccacactatttttgctttttaagtttttaataattaaataatactttttaggagaaaaaactaaataattatatatatttagtattaaaatattcttcttatattaataaaataatagaataataaataatataaaatttggtgtaatttttaatgttgtgattggaattgaaaaaaaattttgtgttgaaatagtaatattttggtgttgatttaacaccaaatttatattttaccattcgagatggcctaagtgccaaataaaaaagtgggataaaatattccaacctactttttatcttattttttatttgtctcaaatatataaattgagataaaaagtcttatttcttgtagtgatttttttgttattttttaattatttttccaatttttgttaagaaaaacgtatttttataattttaaaattttacaagcgtattttaaactgtaaaattataaataaaacataaaaaagaatatttttgaaaaaatttctttttaatttatggattttcgccaaattgaaactaagttttttaatttagggatttcttttttcaaggactaaaatgatcacaattataaattatgggattttccaaaaaaaaaaaaaagaaaatggtgtgttgcaaaataaataaataaataaactatgggcaaaaatttaaatttaaaacagaaggcaaccgaagtcccgctctcaactctcaaatctgaattgaattctttcagtagcttaattaagtcctttaacaaatcatggccatctacccagaatcccaagctgccaccgctctacacgaccctctcttgccatggctaaggtaatttcttcttcttcttcttcttctccctcttttcatgagattcgccagttttataaatgtttgttaaaacccaggtcgataaggaaagccctcgaagatttgaaatcggggaacgattcctgcttggaactcaccaagcttgtttccgattgtatcaaaatgtttaaggacaacgctcggtaccgagacgacatcagattcctcaagatttggttcctccatgtacttgcttacaccttctgtttcattaattgcgtttcgattgattgtttcgttactattttctacaaatttggagggtgttaatcagtaaatatacgaatgtgtatgtatacgtgtgtgtgtcaaagtttcattttgttcaatgaagtatattcattcaagaaattgacatgtatttatgccattataccaaaatgttccttcttttaaattttttagttaatttatgatgggattatttcgtttttgtacttaaataggtaattcttatggtttcttgaaatatttggttcttctggatttgtagatcggattttgtaaagattatgctagcatttttacagaaatgctggagaagaagatatgtgttggccaatctttactttatgtgtggtatgcttcatatattgaatcgaaagggaagctgtacgaggcccagatggtttatcagatgggaattatgaggtctcgtttgctcatatgtgttttttagtttttttttttttaattcgtctgtatgccctttgtattacttacaattacaatttggtggtctttatacaagtgttttacttctattttcaacaaggctcatgcattattatggtgtcattatgctaccaggaatgctgaaccaattgactggttgaagaaagcacaggccttatttcttgatagaatgtctaacttggtcaatgattcttcacttgagaaggtaatccagttcttgtctatgtatgaagagatatgtgaataaaaagagtaaattaaagataccaagaggtttccttaggcagtaatcaactctatcatggttaatatagtgaactaacgcagaactggtttttgaaagaaataagcaacactttatgatgatggttgataatcttatgcggtttgttgcagattgatgttggtcaagccattcagtccgaagacagtcgtctcaatccgtggtcaagctccattataaaagatctgttaacgaggataaatagtcaaattgtgaactttgatgtgagatagtgcaattgttgcatatgtattttgcataaatgcttggttaatttattagttttacaactatgctatatgttttagggataccgttctagtaataaagcttactcaggaaaagaagctatctctcaccagaatttttcaagaaataagatcattgacataggtaattttctttactatgttttttttcaacaaatatatggatcaaaactaattggcgagactgagtattatttagagatattttactagatgcctccaacagtggttcttaattggaaaatgttttgttttgttagttgtagcaaattttgtatgtgatttttcaccaaggtatatttaactttaatacctagtttaacatttttttattgatatatatttttttaaattacatttctagcatatgtttttataatgattgatatatatatttacattggttacaccaatcattcctgatcaacatagatttagtcatgagaccaatttgacaggtcactatacctttttccctgagctctaggcacaaattttgtttgactcgtgttcgtgtaggagctaacattttgtttcttactgtccttattgcgatactcacaggagggaggaagtatcagatcaagggtcgtgcaggtcagggtggttttgctcaagtctataaagcatgtatctattctaatcctgatgaaatagttgcattaaaggtaatttccactttatagtcttctcaaaatgtaattgcaaaagaatgttattttttttctttcaaaaattgactccttgtctagtcttacaatattctatattgataaacctaatcttaccatatttgagaacaacaaactatagcaattgtaatggaaggacctaagacttcaggccttgtgagaacaaagtatatatattatattgtatattaccttttgagcagctcacatgtttcgttttgtcttgttgtttatagcgttgtgaaaattactttaacatgaaacactatttaaacgagaaaactgtacaataaaatttaaaattagaacacaagatacatgaggtttgggttcggctaataaagcccacttccttgggaagggcagtgttttgactatcacataaatccaatgtcaccatatgagcttctcctccatgaactctttgcctctaactcttttttacccattagccattacaaattttttctatacccttgttcttctctaagtgtatacactccttggattttctgtatttcactcaatgaaactattgtatcaactacttttcctaactctcactattgcattctatagaaccaatgtatcaatctatattaaaactaaccatccaatcataacacaaaagggcataacaacctcaactaaataagtacctttttgaatcaattatgcctactaactgttttaagttttaacaacttctcaaaacatctttgattggcactgtggtgcaactttccgccttggcactgacttataagagattgtttcctggatattggtgctatggtactagagactggcgtcatgctgccgaatttctgttgttgagttgtaaattttaaatttgagaggtaccatttacttatattgattataatttacaatatttcctgcagatacaaatgcctgctttcccttgggagttctacatgtatcgtcaactagatcaacgcatctctgctgaggaagtatgttaatcccgtgtttctcattttcgtatttatacacgctggctctctgtattttacgtaatctcttaaatctcatgttatcagaggtcaaaatttggttttgctgagagactgcatgtctattctgactgtagcatcctcgtttgtgattacctagccaatgggacacttcaggtaggtttatagtgccgtagagtaccgtaccatactaataagtatagtttgtattataactatgctgatataagattcttgtataggatgctataaattcgtacgtggtcattggcaagtccatggaagaggtgttatgcatgtattacaccatcgaaatgcttcacatgctggaaactttgcacggtgttggtatcattcatggtgatttcaagcccgataatttgcttatacgttattctaggtaccaaacttttcattatttagtatgaaacgttttgttttgccgtgttgttcaacataacctatttaaagaacagatagaattgtagaaataatttttgtttagttctacccttatgaacgtgaatcaatttcggagctataagagtaatgatatgtgcactcattgctccaaaatactacacacagtgacgtgttagtgttctttttactgtagatcccatcttaatttatatgattgactgaaattgattactcattttgtcacagtttgccatctaatgactaacaatcacatgacccctctcctctgcagggatgacctagtagaagatggtttcatagaccgaaatagttcttggcggcaccaggtttgctatggcagtatcttataatgctatatctacttgtatttttttttttttgtcttctttgaaataaaaacttgtatgaatattcttgcagggtctttgccttgttgactggggaaggggaatagatctaaccctttttcctgatgatatagaattcagcggtgactgcaggacttctggcttccgttgtatacaaatgcaacagaacaaaccctggaaatttcaggctagttaaagacttctctctctcttatatatacactgtagactatatagactaattcgatagtagtcctgtcacttttcaccaggttgacacgtatggcctctgtgttattattcatatgatgctacataattcttatatggagattcaagagaaaccttcaccagatggtggtcacatttatctacccaagtcaccttttaaaaggtattccatccatttctgtacttttggacccttccatactctcgagctctgctaatgttaaagtttagtgtcaattcctaaatattgtcctatctctctctcatttaactttatttatgttctaacttattttgttgcatatacagatattggaatgttgatctctggaagaatctcttcataaaactgctcaataatcctcattgcaacaacgacatgaacttgttaaaagaaataagagagtccttccaggattacatgtgctcaaacccttctctcataaagaaactaaaggaattgctattgaagcaaagagcttcattgtgttctgcttaattcctcatcttctcatgttgattgtatttgtgtttattttaaccaagcatacccataaaagggtaggctttattgtatagataatgtaacagagttactcccaaaatctttgaactgtggccagctacaaaccccttgtgtaagaatgtgctcggaaaacaatgttacaccaggaactaaataatattattttgtgtatattatagttaatacttgtattatattaaataacaaataatacgagtaaaacattgtactatatttattattatattcataaaatttaatacaatgagtcatattatttaatacattacaaaatatctgtattagtttgtattataatgtttataaagggtttgggtcaaccttaaactcggggtttggggtcaggacgcgaggtttggggcttggattcttggcatgtttcggggtgagggtctaagttcgagtccaaattgtggttgggttggggtttgggtttgagtttagaccgtagttggattgggattgagtttattgtaaagaatttataattttacaaaatatattaatagataaatattattttggactatatgttttgtaaaagttactaattggatcctttgttttgttaaatgacagatcctatatttttcaaaatggtaaaaatatggtcctgagctcaattttcaagaattttattttttaatataaataactttaaacaatttctaacacgaaaagatacaaaaaaatgtaatcaattttgtcataatatctctagatcagattattattaagttttattttgataaataatcagtttagggtcctatttgtataaatttaaaaaatacatgatccattttcttatttaacaaaataaagggtataattgataacttttgcaaaacacaaagtctaaaatataattttgtattaaataatactaatataatataattgaatactatacaatataatatataatacattgtagtgtaccaaataaagagagttaagtgaaaaagaaaatgaaaatgaaaaccaaaaatggaaagtgatacaacaaaattacaaacttttctccccatacaatttaaatta

SEQ ID NO: 18303 - DNA, 8258 bp, Cannabis sativa
cgacaagaaatagcaaatatagagccaagcaacattggtgttgtatattggctagcatatatatagctataaaaatataatgaaaaagacattagccgccatccttctactatttcagtaatgttatcatacatatatttttttatctgaaagaactgaaattgtaataatcaagctaacaaaaatatttataagggtttcggtctgaacgttcacactgatatgatgtgttggattgagaagaaaattatatatatagctagagaccttgtcagagaaaaaggacattgcatctaccgcgcaccaaaacaaaaattggtgggtctcattgtctctgggctcaccccacttggtaacaaaatatcaaatcgatttcattgtgtatatacagtattccaatatatatcaagtcctttcattttaaaacgttacattaatagtacaagaggtgagaaaattatacgcattgctttaggactaacttgctctttacgcaagaattagtcaaggaagaaaagatgatcaatatgcatgttcgtgctccttacgggagagaaaattcatacaattgtgctgttaccctcaaatagtaaaagttgactgtagagaatttggtggattgggttttttgcgaacactaaacgtgaaagcgtttggattttgaataagtgtgtacaaattaagaatagtgccaaagcagagataattaagcatatgttgaatttgcattatgcaaggaagctagtactatatacttgatcggtacgtaaaaacagagttatcatacatatgcttttgaagttttcagttaaaatgatttcatataaggtacattatgtcagatcgagctagtcttgaatctctctttttttttttcttatcttcggatggtacttaagtagaattattagaactatgtttaataggtagtaaataacgatctgctctatattgactgacagagttcgtttatatcatatgtatcttttttcctgtcattttagtgaatagtacagtactactacacgttgtccaatttcttcatatgatagatattaattacatgacagtcgactggcatatatgatatgtgtgattgaatattattatatatgtaagaatgaatgacactatgagtctttgactgatgcataaaggggtgttttcttattcctctcaaaattaatgaagccaaaaatttagtctggacatatatataatttatcaatatacttaagttatcaatagtgttctcaactcctgaccccacaaattgaaaaataaaataaatcacatccgctcaccaaattgagcattatttgttttcaacgtttggaagtaatatccccacacgacagcccaaaggtgcccccagtgcccactagggcactagctctctcaatttggtcccttttttggctaatcaaacaaatttattaaggtccagtaattgatttaaactgagttatatatatctctatggaattctggattagtaatgtttcacatatatacattggtaccactcaactacgcgtgcattttcatatagccaaataagtctgttgcttccaaactccaaagcttaattttgcaatcacttttatctaatattccaaccaaagtggcattgtggtccaaacaaaaccagttgtgaaaaaggtatataaaatttccccacttgctccatataacaataattacttcgtacctatttgaaaaaggtacacatggttatatggttacttctgaacatgtaactgaagaaagtgaaaagtaaaataacaatacttatttgaaaaaagtaggcatggtgataaggtcacttccgaacttacaactgaagaaagtgaactaaaatgacaacctcagtttctctgtggaagtagttcttttattttgtgtgtgtgaaaagattggtcatctcaattctcaaatcacaaacatgcattgggcttaattgggccttttgctcggcccctagtagtggtgcagtgagtgtggtaattatcgtacgtccaagtcaaattattatatttgctcaggtcattttcactttaagtgttccaaacctttggtagtttagtcagtctatacttgagtgctgtactaaattttagcacaatcggtggtaatgcacgcgcgcatataattaaactgtgcattacctcatgcacacacatatatatatatatcaaactaatatgtcgttattgatgtaattatattatgagtacacaccatcactgcgtatgaacgaacttttctaccactttctgttatatttctgccaaataaaaaagtattgtcaatctataacagcaccaccgggagtcctgccaaaatgatatgaaagcaaatataaaatgataatggacagccacttctctttgttaatattgtctacaagttttgatcttagcaatttttgtaaggatagtaaaaaaaagaaaccactcaaaaaaaaatgtccaaataattaaaatttcaaaaggagatcgaccttattttatatctcgtaataatatgccttggttagttcaactaaccacctttcttttgctagctagctgggtgtaggtactgtgacactttcagaaaacatataatacaatgcaacttctttatccactaatatactttttatttgttttgacatttagaataatattttagtttaattgtttttacatatttatatattaaaatattttataaaattttaaaaaatactactaaataatttacaatataaaaaataatcttaacagtttatttcttaaatgtataaaaaaataatcatgcgtgcaatatttaaactttatttttggtgtattaagttttttaaatttttttgaaattttacaaattatcttaaataaatataatgtaaatgagtatgagaaaaaatttaactaaaaatttatttagaatatcaaaatagattgaactgcatcaatgcattccaggtacagtgtcaaatttttcaataatatatatatttatatagatacaaaatctgccgccaaaatgacttaacagttacatatatgaattattatgacacaacttagtttgttcagaaaaaacctacacatacaatactacttggaactcacagacgtacatttatatataaatatgtccacagacagaatagctttctaagggatgcccagatggcataaggccaagcttgcttgatctccagttctactccttttctagtgtcagtatatcttattattacatagaaaattgcatatatagttggcatgaaattaaacaaatgacaaaagaagagaagtagacacattaatttattattagaactatttgttggtcacatgagggagcaagcgtttgggttctcatcactaaacatctgaggaggaggataagcgtactccgaataatacttggaaggccaatattcatttcttttgatatcactcttcttgtcatcttctgctcctttgtcctcttcttctccttctttcttttcctcttcttttttctcttctttcttttcctcttctttcttctcttcttcctttttctcttccggaactattgatgcctgtttctttgttttcttgtacacgtcatccaccaactttgcggggtccaccacaccctttactaccacttggttattagccacatccgtttccactgattctacacctgcaccacgtggcacgtacaaaacaaaacttcttttattccactggatttatatgggcttcctctaaagcccatttctttcattatgggcctgattatgttttccgttaattttgaatatttttgaaggctttgtttcagattagcttcccgaatatatttactggatttagacataaatggcatcacttttctattgttaatggttaaaattatgaagacagaagcagtagtgaatcatatataaaaaaaatagtaattatcaattaaatattagttgatcttacctttaattaggtacactattggttactacaaaaagcataagatatactgtttggaatttctgagttttgataaaggtaatgttattgttatataagtttttggattataggacaaagcatcaacgaaaagattccagtgcatcttgtccaagtaaaggtccttttgcgaagttgtcattcacaactatctatttatttatttttatttataaacatcaaaacaatgcggaattgtaaattttccctgttcttaataaaaaattcactactgcagcataagaaataaacacggaggaaaaacagaaaacataaaaaaaagttttatacttctgaagtgaaagactattagaaaagttatcttaagtcacatcgtagaaaacataaagtaatatgatagaagaaaaatttcaaaaaaaaagaaaagatcgaaaagaattaatagaaagaaaggataagttcctgccattatatgttattatgcctctacctatcgccgaccaaatcaaataaataatattgaaattctgtcagcccctacaactgaccatggtaaaaatcttttttttcttaccaccaattgcattttttttttaattcttcaaaacttattatgtgcatgttttgtgcaagttcaacgagaaaaatattgtacttgtcatatatatagtcgttaacagtatattacctgtttttttcaactttatttttttcactcaataaatattacctatttccgagcttatccacatatatttattgtagtactagaaaaaccataaatgggctatatagcattaattattataatacaatacatgcatatataggtaattatatagtataaataagtaaataattaagatttagaataattaccttttatcttcctgattcgcttctgtaaaccttgagcgcaagcttcacagtgcattcgaacttttaatataaccgtaataggagttggaggctgccaatcgtatatatataaggtcgttaaatattacgtacgtacgtacgtactaattaggatttcatatgtaaaaatacaatttgcttattatagagagaattaatggatcatcagagacaatatatatcgaaaaagatgattttgttagttagagaatgatttgcgaagtcgtattgatgaagtcagaaagggatgtatgagtggtccatatgtagtaatagatgtaggtcagatgttaaaattaaacagtcggtgaagaaagacaaattaacgaagtgtacaaatatatgagatttcattgtctgatcacctctcatgcaaagcatgtcagttttctcatcttaaatatgtacatgcatgattattttttattatatttatttatgtaaatgaattatataacactaaaaatcatgtgcctacttttgacatacatatatgagatcatgaataacccaacccaaccaactacttcaaaactcacacatgtatagatttatgagaaatggacacgtgaagcccacagacccaactcccaatgactcgatgagagattgtacaaagagaaaaggaaaggatagttaaaaattgctcgacaaagcagcacacaagtacctgtcttagagcactaattttcactgttcttatcttattataatagttctctaaacgcacccttatgggtcttttttgttttagatatcaggctttttttggtggaatatatattgagtaaattaaaagaattgtttaattaatagaaaaaaaactgttaagacatttacataaaattaactggtggttgtacccgtgaacccaagggtttggcagtacggcacaactagtgggtggtcgtggggtcaaagctttcttaaggacagtgtccatcctcctagttaaatgtgtactctgttggctggggtctcattttgctgattttgtattgtttctttcatgtcagggtggaaatggcagtcctctcagaattcactgttttgggaaatgtgtcaaactcacactccaatttagtctcttattttctcactaattaatcttccaaatcggtcaataatagactactagccagcaagtgttggaaaaaggagtgttactttttatgctaattaaaagtcttacaattgttgttaattagtagtactaagtggactaataaactaaactaaagtaaagttaaattttagtttaattagtatattgcattattattactttacctcctcttttttctcctcttcttttttctcttctttcttctcctctttcttctcctccttctcggcctcctcaggaggtttaggcaaaggcgagattaactccacttttcggccacttttcttttgtaatctctcgcacacctttatggggtctgctgccttgcctttcaccaccactttgctagctttgctatctgtcattacatcctcaacccctgttccaaagtttaccaactcagctccattaataactttaattaccaccgcccactttttctatatatagcggataatatcaaatttctaactttaaaataaaaaacttgcttaaataacataaaaagtccaaaaagtttaggtgcaacttttgtagtactttaataacatatgaatatgtatattttatatatacttgtggcctgccttaattaaccaggtcttaatattttaaagagtttatatagtttatatactagccagtacctacctagctagtttatgtttaactatgtttcatctttcaaaatttatgtgagacagtttatattgagattataaatagaaaaagaaaggggaaaaaaattaccttcgaaacccttcaaggatctagcaactttcctagcgcaagcttcacaatgcatatcaaccttgagcacaatttctggaggggcttcttcctttttctcttcttctttcttttcttcttctttcttttcttcctcttttttttcctccttgttctcctgattttgtacgaaacatagaggaaaacagtgtgagtttcagctcacacacacacacacacaaaaaaaaaaagaattctaatattggtgttaaggcttcagataataacggagataaagtaagcaagatcaagctaaaagcacaaagttcgcaagtgaataatgtatttataaattattataaaaagaaaaaaaaaaacgaaaaaagaacgagactaaaattatcattaaaatatatatgagagaactactagactgtacaacttacttcacccatattttgtgatgattgtcaagtactctgtatggaaatttttttttgaagagcagcgcaaagttttcggcagcaaagtagagagatttactcgatcagtaactaactagctagaagctcctcttcctagttgatgctatttaaaactctctctctctctctctctttctcatcactcactctttaatcgagtgtaagtgtgtatgtatttaggtctgtgtggggaagaaagcatttaagtaacgtggggattcggaaaaaaatgtgacgtggaatgtataatgcgtactagacatccgtccttgctgactcagcaacttttcaaattgccccttattttcttccaaattatccttgctctactactattattaactcacactagttttcaatggattatatatatagacacagatagaattgtgtagatatatatatatttatataggtctgtgattggtataaaagaaaactagaaattatttttaattagagttggaagaaaatagaatttatcgatctaacagaattgtaacattaatttgatgtaatattaatttgtaaaaacaaaactgtgttataagaggaattaaattaaagtaaatgagcaatgattgatttgcatgtgagtactatttgtttttcgttagatcgcgcgattattacaatcataatgtaaagctgcatgttctaattcgatcaatcatgattattacaaataattgatgagcaaaacctttttctatgtatagatagatagataattaggttcttgcatattgtatccatgtactatatcatcactaccaaacaaaatgttccacccgacccttaaaaaaagtttagacaagaccccatgatcgatctctagtctcaaccaatctcaattcgaatgcatgacatctattcgaatagtttggttattaacccaatttaagagattcaaataaattgaccgatagaatttcgattattacaaaaaaaaaaaaaaacaaacatagctgtaattcctacaacaacaatacaaaactattaaaacaacactacaacaacaccttttac

SEQ ID NO: 18304 - DNA, 6601 bp, Cannabis sativa
taacggccaaaaaaattcaggggacattatttggtatatgtcaaagttcggggggaaaaattgctaattagcctattatcaattatgttttcaagtttgtatttcagagtttttataacaattctttcaatattgatgtatcttttaatgttgacttacacttttggatcagacttaatatacttaatcagactttaacaaaaggatcagtgaaagtggatcataacaggagtgttgaatcaccatgtttcactttcttctgtgtatatattttttaactgaaaatgtgtgctccttcctaagtaaaaatgacacttatttcttagtttgatgcagaacaatgtgtggtaattttctataagcagatgtttttctcagtaagcaaaatcatataaaaatggaaaggaaagaattgaaaagaacaatggctgtaaaagaatcatgagtacaattttttgaatgacaataataatcacaactttaaaaatagtaataaaaatacaagtgtacacattagccacaaactagagttcttatcataatggacaacaaacagtatccaagcaaagcaccaccaaacaaaacagtactcaactgaaatcaatggaataataaaccacaaaataaaaagtaatgcaaagaaaaacaaaataaacctataaaagaagggtaacaaatgtctttctagtttttacaatattgagtatttgcatgcatgcttgtaccttctatatacacatccctgccaaaagtaggagccaaaacagacaagagtgaacatcaacaacactaaaatccaaccactgcattatgcatgtccaagattgcataaacatgcaatatattttctaaacttgaccattgttttctcttttacttgactttaatgtcccctttgccatcagaagctggtgtttttgagcttggagatctcccaatgatggcttttttagctttaataagtgaacttttcacctttgacagaatggtgtttgactgcttctgactggacttggttagaacttctttttcatctgtagctttgtcagatttttcaatgtcttcaactttttctttctccaaattatttgcttcagttttcttctcctcttctttaactttggactcttcaattggtacttcaagcttttcatcagcctctttttccttaacttcaacctcaggttgcttagactcatcaattgtttcttttgccaactcaactggagtaccttcttcagttttcttaatatcagactcagctttcttggactcttcaacaacttcatgaacatctgaacctacttcatcctgggatttatctgcattagctttctcaatttctttttctttaacatcagcctcagccttctgtggtacttcaatagaaacatcaggctcatcatctttaactttagtctcagctttttgggattctgaaacaagctcatgaacaattggaactacttcatcctgggacttgtctgcatcagtttgttctggtttcttctctttaacttcagagtcatcttgcctgaatttttcttcaagtgtttcgcgaacagcgatagtaataatttgatcctgcttatcctctttttttgtttcagttgaagctggtgtctcagttatcctctcctccaccaactcaatatttctatcagcaacctgaaatgaattctcgctatctttggctatagaagttgaaatgctagcatcttgttctttagctacttcagttggcacctcactcttcttttccttttcttcttgagtttctactttcttttccacagactcttctcctccatccttctctatgtcaagtcctccctctttcggtatgttggccacaatatcaatcttgtttaaatccttcttttcttcctctgcaacaactgtttctacaacactttcctcaatcgtgctaaccgtgacagcctcttctttaggtggttgagttaaatcttcagttactatttcgcttttttggctctcatgaatttccactttcttttcagcagactcttcttcaacctttgatgtctccttctcagcctcttgaacttcacttagatcctttttttcttcctcagcaccaaccttctctgtgtcaccaatcaaaacttcttctgatgcttcgaccaaactggactcatcatctttatgatcagtttttactgagtgctcaatcttatcagacagagactcttcatttactaatgtttcaatcttcacactttccttaggctcaatcacagaagacttttcttcaacttgttcagtgactttgatttgttttgccaggttttcctccactttaggttcttcagtagatttttcaacttctttcactattggttctgattctttgacaggttcaacattcactatctcctttggttcctctatagcttcattcgacaattcaggaacattaatcatcctcgatggctcgtctaactctttctctaaaatctcaatttgttcttcctttagttcttcttttactatagcctcagttactggttcttctttcactacaacctcagttattggttcctcttttacttccgctggatcttctttcaccgcagcctcagctactagttcttctttcactacagcctcacctacgagttcttctttcactgcagcctcaacaactggctcttctttcaataaggcttcagttactggttcctctttcacaacaactggtactttcaatgcagcctcatctactggttcatctttcaatgcagcctcagttactggctcctctttcactgcagcctcagttactggttcctctttcatcacagcctcggttactagctccttttgcactgcagcctcagttattggctcctctttcattgcagcctcggttactggctcctctttcactgcagcctcagttagtggctcctctttcactgcagcctcagttaccggctccacttttagttcagcctcatttactggctccggaacaacatcttttgtcttatcctcaagcttatcagttatcactgctggaattggtgagttctcatctttagatttttcttcttctgcaggtggtgtctccaaagctggaacagcaacagacttctcagcctcaaacacagaagactcagctggcttttcctctgtagcttcagatttaactgaagggtcagctagaataggtgactcctcagctccactaatcttagatgaagaaactatatcttctttcaccttattctcaagctcaactttctacaaaaagtaaaataaaaacaactaagaaaacagaccaactaggattaatgtcaaaacagaagaagcacaccaagtaattcactgaatcaaaccataaacatctttacttgatccaattacaaatagagtaacacaactgatattcaataccaagatcctcttacttattgaagagtctttatttatattttgttatctcaacttataaatttatcatatttttctttttctaattttcacatggtaagacaacaaattcagaggatttaaattactcagagtgactaacagactgtaaatttactcatcatattcatgcatgttcatcatattaaacaaagatcatatgtgtatatagaaaatccatgtttcaaaaaagaaaaaaaatcaaatattataataatcaacagcatagaaatatgatccgatgatatgaaactgggatataaacaacatacataacatacttgatcactgaccttaactatagagtaatagaaactatacatattatgtgactaacctcatcagtaatggaagtttcatggggtacttcagtctcagtagccatgagaaattcaagaactagtaaagtgagagtttgagcttgtttgatgggttttttgcaatgataaagaagaagatcataaaaaaggaaaaagaatgatatggttggcaacaacccaactagcccacctgaactttttttatttattttttctttattactaaaattgaagaagaagaagaagatgaagaagagggtaccacactccacacagatactcacaaaagaaaagagagaaaggaaaacaggttgtcaatgacagactatatcacatgatctggcatgcttggaatgattagcaatttgattccatttaattatttttctctaataacaaaaattatatgaagaaaaagaaagaaattatgtgttttaaatataaagtggccttgtttttgcaaagtgacaaactttaattgtgtaggggaccaaaaatttatcattttaaacggtcgaaatattaaaatataagcatgattgatcaccttagccacagtggttgtggatcccagcctagaaagtagaagttgtatatatatatatatatatatatataaagatatataatctatatctatatctatatgtatgtattcttaaaaataataagtgccaaacagatattattgttaagttaatagtaagttattttggtgagttgtattatggaagatttgataaaaaagagaatatcttacacttgaagggaaactaaaactatgtgtttgtttgtaattaataaagtaaaattgtgtgataatatttataataaagtagataaataaaatacagagagattaaagtagaatcatcatcatcatcatcttttcatacaaagacattgatctgactgttgaaagtgagtgagactgagattgagaggattaggcagatcatgggccttgggagcccatttacaaaaggaaaaggtcattcagaaaaggcttttctccacatgggaggccctgcagtgataatgttcctcatctttatcttttttttttcttttaactaagtacttcaactttgagggcatctccaacttggaacaagttggaagtttggaatctgacaaaagacagataggttaaaaaaagtttacaattattttaaattatggcttttaatttaatatatgaaaatattgatgtttgttgtagctgaaactcagacaatgtcattttaaatgtgtcgattgaagttcaattgtatcttaagttggaatttttttagcactgagaagagttggaagcaacataactagtccaacttactacatactaacacaattggcataaaacttagagatttttttttttcataaataccgataaaatagaaaaatcttacaaaaatacaaatttacagttttctttttaacatttttacggatttggttttttttttcagacaaaaaatggattgttgttttttatattgttttaaaagcaatattatactatgttgtttgcatattgttttcatatttgtactatgttattatacattgttttcatcttaaagttgtaattaaaaaaaaaatacataagaaactaagtcatagtctgtataaatgttaaaaaatatgtcattttaggtattttgtttaaaaattcctaaaacttatagtttcatcattttaaagagcagattagaatctaggcccattaaaatttaggctctaacaaataaagacaaaataaaatgggcttttagattgatcaaggttaagggatttttacaccactgacatttttaattattttactcgtatttttttttttcaaaagtactatattgtttttaaaaatactgtgtaccatgttaagttttcacggttattcaagagtcattttttagttgttccactgttatgttaattgttttgttttgttgttttataaaaaattttgtgtgacagtaaaattgtaaatttttatctaaaatctagtatctttgtataaacaaattacatactctttgatttttcttgtatgtattttaatctattctaagtaactaaaataatatattattttatttatataaattttgaaagaactgatgttcaaacgtaatatattgtttatgttatcaaattacccttgttggatatttattatggtaatttctatcttcttttgcttttttttatttttttttatttttaagtcttaccaatgcttctaggtcttatatactgtataaagagctacttttgtagtaaattaacatgctaccataaaataaccaagagacttagtaaggtgtcgttctaacaaagcagatcaaaataacaatttttattttttagtgtatttatacttatgggaaagattatcatgacttaccaagtaacttagcaagttaatactagtaacttgcaagtcttcatatttcatataacaaagtaactagattgtatatttttggcaaaaacacaaatattgggagcacttaagtcttgagcaaagaactagaaaccattgttactggacactgaatttattagtgtactttggttctcatttagtaactacttattgattttgctgggtaatattgagctagcttaagttaagtggttaaaaataaaaaacttttactgtttaacaaaatgttagcaaaatggtaagtccaaagaggtaatgccagcaagtgttgagaatcatgaggttccaactcaaaaccaattggttatgagtggagtaacccatgttcttgaatcaccttatcataagtagtgtcatttgctcgcttatt

SEQ ID NO: 18305 - DNA, 5147 bp, Cannabis sativa
  modified_base (5080)..(5102): a, c, t, g, unknown or other
ctctctctctctctctctcggttgcatttaattttgacgacactatcttttctacatttaatgcactctcagtccctctatctctccttctttcttcgacgaatccagccagatacgctaaccgtcgcttcctctctctcaagatcacccacatctgtaatcattaccttcctccttcagacggctcctgcagaaaacgaagagttggccctcagagcgattcaacactcgagatgcctcttctgctccaggtattttctctcctccattattttactgcctatttatattcacacctgcttccatttccacccaccacctcttctctctccgacctccttgcttactttccccctcctgattcccatggcttcttcttcctgtaacccaaaccaccttactgcgctcgaagatgaggaaagtttaatacatgactttgaccatatctcgttgaatcacccaagcgattcaaactccttctgcttgttcttcaagcttctcactgcaaagtccgtcaaaccttcctgaatagaaaaagccatgtccgaagcttggaccctgcgattccctgttcaaatctctgactaccactcgacctttatcttgcttccttccagtgcgatggtgatcgtcgccgtgttctggaagaacagccatggcactttgacaagttcctcatggtcttcacacaccatgatgtttcccccacagctactctagattctgtccgctatgtcccattctgggttcaagcccaccatatcccctttggccgtaaaagcccacagctagctcagttcattgctgatgagattggggaactcattgaaatctaccccttgtctctgcttgaaaactttggcccctatctccgactccgcatattatttgacattaccaagcctctgaggcgcggtatgaccatccgttttcgtggtatcagtaatccgaaatggattagtttcaagtttgaaagtctcccgaatttctgctacttctgtggacttgtcgatcacacctataacaagtgcaccaaatatctcacgcgctgtgacaatttcccggttccccctctccttgaatacaaagacaccctccatgccactacccaacccagcgacaagaggaatccttttgagatttctaactccaccccttttgaagaatttttccctcgcagcagtgctaatgatcaaagcttgcaacacacggttgatcagttccttcgtacggacaatcctatgactggtttcacttcccctgtgtcttcagctccaccattacctcactccactgtccccttccctcacacgaaccctactaccactagtttcacccctccatttactcacagcaccatccctcctcctattatgaccacatctgtcattacccacaatgacaaaggcaagggaattgctgtgaccacttccactccccctcagcctcaaagtaccaggcctccaggccccgttattcataagccttgttcctttgcttcccctatttcttctccaggagccagacgtcctttcactcgccaatctgcccaagtgggtgactctatccgtagcgtcctcaagagagcacgggtagtggctagtgaggaagctgtagttccttcagtttctgatgatgatgcaacgacgggtgctgctacgtggccccgctgagaaaaatgagtacctgtagctggaatgctcgaggtttagggagccctcgagcatttcgtaatctctccctgatggtcaagcagcaccagcctacgatgctttttgttatggagacaaagctgccgccaggtcgtggaacttccttcaagcacaagcttcattttgacaatgttttgaaagtgcctaggcatggtttagggggaggccttttacttttttggaacaattattttgatgtaattattatctcctactcccttaaccatatagactgtattgtaaatatttctaatgatataacatggcacttttctggtttttacggttccccttatcctaatcataatacttggactcttgtgaatcgtttgtatgatactgctcctcttttaccttggttagttataggtgattttaatgattttctttctgttagtgataaaaactctcctagtatccctccttctcacagcatgcatcacttccactctttttttgtctactcgtaatctttcccctcttccgtatatgggaaataagtttacttggaagcactgcagtacactggaacgtattgactggtgtactatcactcgatcttggaaggacctctttccccatgcttcccttctccacttgggattctatggttctgatcatagagtcctcaaagttctgttggaggatactgccacagcctctcacaagtctactcgtttccatatggaaaatatttggctaaatgatccctcctttattaacattgttcgttcttcttggcatattcctagtgtgaccactttttcccctcttcaatccttcctgaataagcaatccatttgtctttctgaataagcaatccttttaagatccaaatctccagaacctaagctgagctgaatcgactcttaaacgattcgcagcctacgtccagtcttcaacacaggctgttcatctgcaatccgagttagataggctgcttcttaaagatgagatctactggaagcagagatctcgagtggattggcttcgtgctggtgacaaaaatacaaatttttttcaccgcaaagcttccctcaggaagaagactaatttcatccatagtctcactcttcctgatggatcagttactcaggactctcccactatttttttcctaatttcagaatttctactctcatcttttcactactcaaggggttagtgacacaactatccactccattctcaatgggattactgctaccctgtcccccctactcaaactgcttatttatctgagggtttcattgaacttgaggttaagcaggctatgtttagcctctctggggataaagcccctggcccagatggccttaattctctcttttacaagaagaactggcataccatggggtctgagctttctcgtgctcttttgcatattcttaatcacaatggagacatctctctgattaatgaaacaatccttgttcttatcccaaaaaaaaaagaactccaaaactgtccgtgatttctgtcctataagtctttgcaatactttgtataaatgcctctccaaaattcttgctaataggttaaagaatgttcttaattctatcattagccttaatcaaagtgctttcctcaaaggtagacaaatcactgataacatcctcattaccaattagttaattcatgccattcaaactagaagaactggaaacactagttgggaagccattaagctcgatatggagaaggcatttgaacgtgttgaatggaagtttcttaatcatctcctttgtcatgtggggttcccctcacattttattggccatatcatgaaattcctttccacggtttcttatcgcctttctctcaatggctctctgtctgaagttttccattcctctcgaggcattagacaagggtatcccttgtccccttatctttttctcctagttgttgaaagtctttctgctgcaattcatttgcaggaaattaggggaacctttaatggcattaggatttgtaagggagccctttccttgtcccatctcttatttgctgatgacagcatgctcttcaccccggtcacccctagttcgagtcaagccattaaccatgctctcagtctctataaccgagccacaagtcacttggtcaaccgttataagtcttccatccttttctctcccaatacctcccctaattcccagaacgagtttcggacggctctacacttggcgggtgaagggtttgttagtaagtacctgggagttcctcactatgtgggcagggtcactaattctgttttccattatcttgtccaaagtgtctcctctcggttgaatctttggaatggtaaacttttctctcgagcgggtaaagaaacactcatcaaagccgttatccaagctatcccttcctatgcaatgtcttgttttaagcttcctaaatccacttgtactcagattcagcaattaactgctaaattctggtggggctctaatcctaataaacataaaatgcattggaagtcttggtctactcttacggtttctaaattttttggtggtttgggttttcggactctccatttgcacaatcaggcccttcttgctaaacaggcatggcgcctttggtctaaccgtgactctcttctgttctctcttttgaaggcttgctattttaaacactctgattttctgcttgctcccaagggtcacaactcttcttttacctggagaagtattctctgggtccgtcaactccttaaagggtctagtttggaggataggctctggtcgcacgattcctttatctgcttcaaattggattcctggcatttcttcccctaccattctccatcctattgatccctctctttcttttgtttctttctttataaacactgatcacacttggaatgtctctcgtctttaaacactatcttcccctttaccaggtcaataagattctccaaattcccctccttaatagtcctgctgatactctcatttggggctttcataattcaggcatcctaacggtcaaatttgcttatcaccttgcctttgctacagcgaatgttcactccccttcttcctctaatccaaaccccttcgaaaaatggtggaaaactctctggtccctttccatccccccaaagatcaagcatttctcttgaaaagctttcaatcaattgcattcattctgcctgccttgtgccttaaataaatttatttcaaaagaaagttcttctgcaaccttcttgccacttttgcagcaacactgttgaatctgtctcacatgctcttgttgattgttccagagcccgccacatttggaagcattcaaaatttaaagattttcacactcaacactggggttatgactgttggaagttattttaccaggaactnnnnnnnnnnnnnnnnnnnnnnnatttaacaacctaaatatgatcttctaaaacgatagaaaattaaa

SEQ ID NO: 18306 - DNA, 4042 bp, Cannabis sativa
ttaaagagtgttttttttttcttctccgaagaccaacatgtttgataaaatgccacagagacttgaattctttaaatctgtcgctttttgctataatttggtattattgtgttatattggtgccgttgttttattaaggccatatgtttaacatttgcctggtatcaagagagcaaagtactagttgatcaaatttagtagtttctttgaacaatttagaattttataaaattttttccaaatgcgttttgaattttaaagaagcaactataaaaactctactttttaaacacaatcattgtttatagaattttaatttcagatcatgtatcaaacgtttccctttcttaactgtaggaaattactggtgtagtagtgaaatgtcaaggttccgagccatgtggcaagcatccctgaatgcgacgaagaaaggtaacattactttgcttttgcttgtctctccccattatagccatatgtactttaatgtatataagtttgtgggctgtcctaccacttaagaagcagtaatccgtgattcagtatgaagttgcggtataatgtactgaccttcattgagtatttttgctgacattttatgttctctttatattacattctgtctttgagtattaggaagccatcatcttataccatgtgagcttctcgttttttcctctatttttttataattaatgcttcatctttaatcctttctccaattaaatgtttcatttgggcattagtagtaggcttatttatcgattagggaggatagttaattctttatttttgtacactggtgttttcgcagtccttatattcttcctttctaatgtcaaactgtagctctcacgtggagtgctgaagatctgatgcctcccactgaaagacatattttcaccttcaattcaaaagaagaggttaaaaagtggcacttatattcagattctgaatatggaggtattatagtaaacaattcacttttaatcatctttctaagcataacattgagtacatattcaagtttgatttgaatcgtgctgttaaagccttggctaaaataattctatcaacgaaatttcccttttctttctattttattttgttttaatagagttggctttgctaatgtcattaatcaatatgcagatgctaatcacaaatgcaccctttgtatattttatagggttgtcctcggcgtctttggagatcatggatgctggaaagggactaaaaggtacaaaataaaagttaactttaagtcggcttcatgaaaggttatagagcaagattattgtttgcctacgcactttcattttatgtgattatgaatatactactgaaacaaaggggcgaagtagaccatgtagttgaactattaaatttctcagttaagctgtgtaaagatacggtctccattcttaatatcttttcttctctgttttgatgtaggagttttctctggcaatctctcacttgatgtcattccaggctcaaaatggaatatcagtcgaagtggtttctgtggaatgaggtcaaggaaggtgaaattatttccaaaaattataagtatatatcatatgtttggagtcttgattgattattattatacttttctacagtgtcaaagcatgatttagtttatgctttcacattgttaggtgcagcataacaatgtgtcattttgtgctttactatttaggctggtggaaacaatagcttgtcttgctttgttttctataatagatgtggatgagccattgataatattgataacatgaatgatacattaagttgttctgcatgtggtttgctttattgagattttagtattgatattttgagcaaaccttcgtaaaaatgtgttagagtttcctgcctttgtttaatgagaacatttatgaaaataaaaccactttccccccttctctttgattatactcttttggctcctctttttggagaggcggcacttggctcacaagtgtactttttggctcactatcttcgaatcacagatcttttggtttatctttttggaccggttattggatttggttcgaatactcgttagaattttgtttggttatgatactatgttaaaattgtaagattccgtagagttcaatctcaaaatcaattggcaatgagaggagtagcccatgcatcttatgtatggtttttagtttccacacattatcaatgtggaactctctaacacaataaaaactagtttttgttggtatattcccttcatgtgttcgtttcctttcctttggcagtttaatggcttcatcgatttggagccgtttgacacagtagcaatgaagataaaaggagatggaagatgttacatatccaccgtaagtattctgctcatgccacggagattttttgtataagcctttattttaaaccttcgctgctttttcccagtctttttaatgtgataggactcatgcagatctatacggaaaattgggtgaattcacctggacaagaggaggataattcatggcaagcctttgtttttgtacccaaagataactggtacattgcaaaggtaagtttcggctacctttagctttattggctttctcatcatacaagagaagatttctagatataagtctattagtaaaatcaattagctcagagttctagttcactattcagttttctcctgataatcacttcactagttactcgtctcaactgcctaaaaatcaatttcgatcggtggaaaaaaaaataataaagttttgttcatatgctgtgttactcttgttaattatacacgtaacagctgacttagcttataaatgatattttcagattccactggttcaatatctaccaacttggagaggaagtgttatagatgcagagatggaaatgaatccatctcgggtagttggaatgtctctatccgtgaatgcagagggtggaatgcctggtgccagaactgggccaggtgatttcaaaattgagatagattggatcaagggcttaagaacacagtgattagtgaagtgaaaaaatgtagctgtatcaaagcttttaatttgttttacatgaataaatcttatccgatctctctgtacagtaccaaatgatgttgtaaactacaaaccatcaacttgcactggttggaattcactaggttgattccaacccatctaagtttttgtggggtttagaattttccttttagaccataaaagttggcaagattttgagagaatatatcttttggatatgtggttgatgtgttccatgagtttgattcattatctgaccagctttggtttctttctcatgaaatatctgaggcaattgaaaccactaacagacaattgatgtgaaagggtgcttgtctttttggttgataaatagatttgatgtgtgtgtgtgagagagagagagagagaagggttaataactaataagaggtcttttcatgtaggtgaaaactaaagaaagactgtgaccatcctttagttttgacgtgctttggtttcaagagagggccgctccaaggaccaaatattattacttgtttctgcaaattgtagtgtcgatacaggcctagttagttcccaaatttagtggaggaatataaaccctttgtttgtttgtatcaaataataagtgaagggaagaagtagaacctcattgttaattggaccattaatcgtacccttttttttctgtttaatttgtattcttcaaaagatgacctttcacaatcaattgaaacaggcagacagctttcctaatattacaaccatataacatttcactcttattttcttcttctctttttactcttcattttgttgaaaagaaaaagcattgatcacactgtcagaccattattcgtccgtacaaagtcaaaaaatttatcagcaaagtattttctagtagtttcacgttcagcaaagttgctttcaaactttcaaggacgtaatgattttaatttttacttggaaaattaggatttgaagccatggtacattgtaagaacttcaagtacaaa

SEQ ID NO: 18307 - DNA, 4371 bp, Cannabis sativa
ttttaaataaattgaaatcgggtcagatcagatccgatccagaaaaaaattaggctgggcagagcggatctaatccaagaagatccatccaataagtatccgaaagttttttcggattagaggtgattgatccgtcgatcgaatcggagctccaacccgctccaactaaatagatctttttgacatgcctaatcctaattaagtagcgatttatacaaatatatttatgcttcatcctcctaattattaattcctcgaatgttcttatccattccagtatcataaatttctaatccaaataataaattgaaaataattataatgaaaatgaaggaaaagaaaagtaaaagggaatactagagagaaagagagagaaaattgcaatgcacgtgggtgtggtctgtgttgagagtgacctggttgtggctggattaaaatccaaccatgattttgtttatgtgaaccggatcgaactgaaccgaacccaaactccaaaagcaaacgaacatggtttacttgtgtcgtacgggattttgggccgaaacatctgtcactttggtcgtgtcggacccacccaaacccagtagtcccatggatacgtttcggtcaatactaatactaatatataatacatattaatgaattcaccgattttactacacgcgttttcattcttcttccttcttttaaattataactaacaaacattcacacaagtttctctctttacttgttttttattttttcttttgatatataatatatgggaatatacatataaccataaactgtcggttttaggaagtttgattagaatatggacgacctgggtcgatttgatcggacggcgttgtgggtgatggtctctctgttgttgtttcttcagaattttagcttgtgttactctcttcacaatgaaggtctgtgttttgaaagctctactactccgtactcccgttaaattgttttgagttttttcttcgacagaaagaaatgaactttgttgtaaaaagggttttcttttcatcactgtttggatgcaggttcaactttgttcgagctcggggagaaaattattagagacccttttggagcttggtcgaattggaataaggatagcggtgagaagaacccatgtaactcatggttctgggttgattgctcaaccggaaaagtcgtgtccttgtgagtgttctcagctaattctacttatttctaaagctcaaatataacgatgcttaactaatttacgttggtattgaaataatttagttacatttcatggaaaattcaagttttaatgtatgctaatcattccctcttatgagaatgaactccatttgatgattccaagtatagcaagctcactttcaggatattggtactctagatcgaaatgttgatgaaacattagattaatgttacatgtatacattgagaaagtttctatcttctttgtttatcaaatttcatggttcaattggcattttttataaagtcaattttgagtatctttgtaggaatttgagggatcttcatctttgtatgacattgttttcttatttttcctttgttaatattaggagcactgctgaacctggagatatagcttataggaggcttttgcaagggagaagttccccaaagtctagcaaaccaaaaccaattagagaaaataaagaggatctaataccacaatcccgccctttcccaccatcaccatcagcttcaaaatcaccttcaaattcacaaaattccccatcaccatctccattcgagtcaccaatatcatccccatcgccatctcccttcactagtccttcgccttcaccttcaccttcgccatcacctagtgcagtccctccaattcttgcgaaaccatcagttgttgaccctggacaaaagaatgctattccaatgttatcaccatctccatctttagctccaaaggttgccaaaaaagacaatcatgtaatggtgatttcggttggagttgttggtggcgtcttgtttattctaatttcagctactggcattcttttcttacaaagcagcaaagttgttactgtcagaccctgggctaccgggttaagtgggcagctgcagaaggcgttcgtatcaggtcatttttcttcttcttggtacctgagactattagtaaccaataccaaaattatgatttcatttcttgcaaattgaggcatttgtaccactaataagactacaacaaaaattttgactcttggggtgcaatgcagctatatgatattataagttctcatgtttgaggttctccatttcaggtgttcctaaactcaaccgatcagaaattgttgcagcttgtgaagatttcagtaatattattggtacattttctggaggcatggtgtataagggaactctgtctagtggggttgaaatagctgtaacatctagtgcagtgaaatcacgcgaagactggtcaaaaactttggaagaacattttaggaagaaggtaaacaatactagtttttttcatcagcctttatgtattcaaaatcagtgtctaattgttgattttcatgacttcttacagatagaaacactgtctaaagtgaaccacaagaattttgtcaaccttatcggcttttgtgaagatgaagagccattcacaaggataatggtttttgagtatgcaccaaatggaacactctttgagcatctacacagtgagtattaccgcaaaagcattaacttgtggctgttttttttacagaaaactcatgatttatgaagccttttgataaagatagacttgtgcatgattttgacaatgttgaaattttatgttatcagtaaaagaagctgagcacctggactggggaatgagattacgtatagccatgggcacagcatactgcctagagcatattcaccaactgactcctcctatagctcatagggacttgcattcttcatctgtatacttaacagaagactatgcagccaaaatttcagattttcggatttggaatgaagtaaccgaagcaaagatgcaaccagaaaccaaggagctcttggaaatcccatcatctgatccagaaagtaacgtctacagcttcggtgtgattttgtttgaaatgataacaggtaggattccatactctttggacaactgctctcttgcagactgggcattgaactacctgaaggctgaccattcctcaaaagaaatggtggatccaaccttgaaatcattcgaagaagacgaactcgagaaattgtttcaagttataaaagattgtgttaaccctgacccgaaagagagaccaacaatggtagaaatcacttcaaggctaaaacagatcacagctatggggcctgatggtgcaacaccaaaactatcacctctttggtgggcagagcttgaaattatgtcctcagaaggatgctaagagattttggtcacaaatattgattcattttttcctacgtttattcttttaccttactatgattataatttctaatggcctttatttttgcattatcttttctgattctgatttgttcatgttaaccatggtatgtgtatatgattgtgattgctaattaatgcttgttaatgtaaatgtatgtgtacataagtgagaaaggccaaagaaagggattaagcttgttcttccctccactcaatcatgtggtttcaggctgtttgacgtttaaaacttaccattttaatatgtactgatgagatataaataaatgagatgaactgccaatgactttggtgtctgcctttggtctcatttttagctctgtaatgatgcaccaatcccaacctactccccttgcttttcatatattttttaagaggtagaatttcgtttcctaagcataaaatcataaacatatatacatggtttaatgacgaaggaaaagaaaattggaccattttttcttactttgaagtgtttgtgtttcaaaatgttgattttaattaaacacgatgagcataaataatcgtctaaatcataggtttgatcaacacaagttcatcaacaagtttattaaatagaaaatactataagtgcaagtggatcgagccggcaaaacgataccattttgaagtgttttctactgcacggcatatgtagtcacggtcccttttttttttttttattattattatttttatatatatataattaatatttatattattgaatttataaaattaagaatttattattgaaaaatctacaatgcacctttttattgtggtatgaatgtacttctatttatttcgggatccgatagatttttttagtctttttttatatagttgtctatattataattatttacgacatcctgtaaaattttaaaaaa

SEQ ID NO: 18308 - DNA, 8156 bp, Cannabis sativa
  modified_base (2510)..(2510): a, c, t, g, unknown or other
ttggagggaacacatcaatttggttatgtgaatttttaaagctccaagtttctatggtttaaagcattttttgtggattctcacgacaacaattgagaagaatggtcatcaacttttcttctttcccgtggctctcttctttctttcttgtcttctcctcatctctttccatttcacctagtgtgcgtagttctctttgtccccctggtttgtgtgtttgttagtgtgtctttgtgttgccttgtcttccctcttttctggccgttcctaagttgttccctcttgtcttcgtgttgccttttgtcttgtcccccttgtctatcttggttggcttttgctttgtcttgcctcctatctctttcacttttctctttttctttcctttttctccttttccctgtgttgtggggtggtcttttgtgtggggtgggagggtgttaggtgtgtgtgtgtgcggttgttttgttcttgtggtgtgtgtgggtggtgttgtctccttcctctgtggtgaatttgtcctgagctgtctgcatttatggagttagttaattctaccaactcccctcttaaaggcaactgtttctcctgtcatgaagcatctgttaacttggttccctgtgcctcttctcttgaggctttatctattttttgcttggttgggaaagtggtggcccctatgtttgtggatgaagctacaatcaaggagtttgtggctaaattttggaaattaccagtggctgttgtggctttgactgatgactctaaaatctcaaactgttttgagtttggttttactgttgcagaggatagaacatgggccttggaaaatggcctatggtgcataagaggttactctctcattctgcaagcttagactctgagaaatactttacaagtgaagtttgattgtatgcggctgtgggtgcaagtccataatctcccccatgaatatttctctaaatcaaatggttatctattgggaggaaaggatgggaaagtcattcaagttgatttagaggaagataatctagcctcttggagtaagtttctaaagattttggttgaaatggacattgcttaacctctcttttcgagttggtttttttgacctcgatgctggtatcaagcgctagctccaattcaagtatgagcagatcagtattttttgcaataattgtggttgcttgggccaccaacgtagaggttgttctttgtcttctccagtcacagtggccaatagtaataaagtccattttcccctgtttgggccatggctgtccacttcttcttcttacctagacgttttttcaggtgccaacactttctttcctcatcgtgctgcatctaaaaagctagtgtcttttttgtcccgttgtcttctcactctggcgtctgttggcgatggtgatgggggcttcaaggggccagtctccaatgctatccgtagctcgaggcgtatcaagatggtgactagtcgtgatcgtgagactgttggtacttctcagcaagccgtgtggattcccaggccgcagcttaggcatcgcgtgcctctggtttctccttctggtaatggggttgctgttggggatgaagaattggcaaaggggtctgctgatttacattgtttggatttaaataatacttttaatattactggtcgtttatcgattaatgagaaaaatttgaatatgttggatgatgagttggtgggtcaggacacgaagtactcacccattgctaatggaccaaccttgtctatttctgggcctggtattattaatgatcctgtcattggacctgatcctattatctatgagaaagaccctattgcccgtgaaggtgaggttagcgtgggccctagtagtatttttaaagggcctattggaagtgggtcgtgtgaagcttttggacaagataaggtgataaagaaatataatggtgtgttgaataatgctaagtatagctcagtttgtggacaagaggccaactttcagcatgatgaataaaaggcattatctaattttttccaagcccaagatactttgttaccagaacttaaataaattcgggagaatttatatgagatttgtgcgcttggaggtgacattggggtcaagcctacttctgaaactaatgctagaactactccttttcaagaaaagaaaactatgatgtttcttcctccttatactccagaccctataagcttcttcgacaacaccttgaagttatttgcgactttccttgggatacgaacaatcaagatcaagcttctaaagtgttggaagaaacatctgatgaaaactcgaactctttcagttgctttgatgacccgaatgaggggagttctaaaggaagaaatgttatcttatcgcgacctatggttggtacttttctaattgatgatctggttctattgggtcgactcactctcataaccctgtggaggagaatgttatatctcctccatatgagtcatgagaggcatcgcttggaactgtagagggttngggcagacctctacagttcgggagttgaagtccctgatttggtcacgctccccggactttatttttttaaccgagctcaaagttaatgctacttctctggtacatactcttaactccctctatttttattttaatatccttgtgtcgactattagtattgaagggggaatcattttggcttggaagatcaggtttgtatttgaatggatttcttggtcccaaaaccatatttctggtcttgtctacccaaaccccccgtcttacccttggctcttatcttgtgtgtatggccccccttatttcaatggtaagaaaacattctgggctaagttcatgaagattggggataggtttggtggcctgtggctaattatgggagacacaaattttgtgcttagcgaatcagaacatgttggttctaagggtagggaccagtttgtctcgttcatctctaacttggtgaatttaagggggcttattaacatgcctattcatggagataagcttacctgggatgatcacctgtctagttcgaaccatgttaaattcgctcttgacaaagatttagtgaatggtgcttggcttaagctgttcccgagagcggtcatttgctcttctcagacttgcaactttgatcacaaacctctttgccttcttactggtggcttggaaaaataaatttaaaagaagctttaagtttgaagaaggttggactcgagacgataggagcaagttggtggtttgatatgcctagaatttggtttttcactcttgggctcccgtcagggtcttcaagaaaattagggcaactcgggtcgctctcatgcactggaacagaactcaatatggtagaattaacaccttaattaaagatctggaaaggaaactcaacttcattcaaaattacatgtgggatagatattggattactgaatgtgatatccgtctatctctcaacgaggcctgtgaaagaaaagagttataatggaaacaaaaggctagggtttcttggctcaaggaaggggataaatgctcaagggctagggtttcttggctgtcttttggcaaaagttgcgaaaattaaaggtacctccaaaaataaaaaatttgatgtggagggctggtatgaattatttgctcgcaatggttcaattgcgtactaaatatgtagatgtgagttctttgtgttatgtttgtagaggggtggataagaccattttccatggagtggtttcttgtccaaaggggcagagctgctgtaatagagtaggtattgatacaactataataccttgtagttctttccttgactattgtatcacttcttttaaggtttcggactcggaacaatgttgtgttttagccattgtttgttaggctatatagagtgctaggaacgatttggtgtggaacaaaaaggtggtgggagtcggtgacatagttgtttatgcaaaaaggtatcttgaacaatggagacatgctccaaactcttagggagagttgtcatggcctggtgtaagacaggtaatggggctgagtattggattttattttaacacatgctaatagtattaaggttaatatagatgcattttcgttaaagaggaatcacagtgttggctacgacatggtggctcaagacgcaaacgattttttaattgagggacacacttctttccttcaaggacaagtggacctagaattagttgaagcaatgtgagagtttgtgaggctcttacttagattacagatcatcaatggcaactggtctctctagaaatcgattgtctatgtactgtgcaagccttacaaagtaccttttgtatgatatttttatttggacatgctattaattattgttagcgtctatttactcttttgagaaaagattcgtttatttttataaaatgatcagttaatatagtgacttataattttgctaaaatttttgtattatttcatgattgtcgtctcaatttagagtattctaaaaaaaaaataattagaattttgacagcaaaagttaataaaattgaatttttcattcaaaaaaaaaaaaaaaacaaaatataaaaatttatttatttatttgatggaactatttatttattattatcattttcatgagatgtaaaagcatctaggattaggacactctctacgtctttaacctaaattcacctttccggcaacccaattcagtgagtggagcaaagtctgaatctttcgaaggagaaagctgagggagcaccaagctaagtaccactatttcattttctacttcattttccaaaccaggtgagacttgttcacaatccaatccaatgcttcgtcgtttactttgcaataaactcactcttatagattccaggctatccccctctacccatggcttccatttattcaattactttctcagacccatgtcagaaattccaaattcagcagacccacaaaactttacagcctcttaccttcaaaactcatgtgggttttcccggaattccgccatttcaatttcgaaaaagctaaacattggaaaccctgaaagagctgattcgaatttggagctgtttagaactcacgggttaactcagacccacatcaaaaagattatagctactcgtcctgcattgcttttggctgacttagaagataagcttaggcttaatatgaagttgttggagtcattggggctgtctggagcaagacttggtaaattgctttgcaaagagccacgcctactcctaagtgacatggttgactcagttgacttctttagagctcggggtttcagcaataagcaaatttcagttttggctatgaagcgtccaacagtgcttttgttcaatgtgaacgacatacttaagccaaagctggattttttcaagtctaagggctttacagatggggatgttgcaaagcttttgtcttttgagccttatattcttggaaggagcttggagaatcatatcattccttcttttcaaattcttagtagggttttcagtactgatgaggagattgtaaaggttgtaaaagcagggcactggatacttgaatacaatttggaaaagacttttgagaaaaacttgttgattctgaagagccatggtgttcctgatcctataattttgagaatgttcactattcattcaagaacattgcttttgaatcctccaaaggttatggagatacttgatgaggtagtgaagttgggttttgatcccaatactgtgcattttgctctcgcttttcgttctatggctgtgataagtaagaaactatgggagcagaagatgaaagtttacaaaagttttggtttgtcagaagatcaagtctattcagcctttaagattcaacccatgtgtatgcttacatcagagaagaagatcataaaattaatgaatttcttcattaacaaattgaatatagagccttcactcatttgcaagaatccaagtatattgatacttagcttggagaagagaattattccaaggagtttagttttgcaacttctgatctcaacaggttttttaaaggaaggtatcaagtttatttcttatttcaaaatgactgaaaagtattttgttgagaaggtggtaaaaaagcatcagcatgttcttcctgacattgttaaggtttatgaaagcaagaaagattttcaagtgtttcccattatctctaaggcataaagactacaatgtcatttgaatgatgagggaagagtatcaaagatactaatgatagtgtagattgttgaattcaccatctccttgattggctgctcaactaaatattctgatgaaactttatacagattgatggtgtcttgtggatttaggtctctagaagtttaagttatagattcatttgtatggattttaaaatactagtattagatggcactgatgaggattcttaaattttgaacagttaaatcattctttgggtgttgtcacccattattgcttgtatccttttattatctattaatacaagctgaggttttgtttcaaaggagaaagagttcatcattcttgcaattaagccttacctgtttagtttttctttgcctaagtttagctgtataatttttacattttgattctaactgtctcagcatctgttccttcttattttggttcttactattttacatttctttgtttttttgagctaaacactattttacatttcgatacttcttttccccttcgaaattaattgtgttgttttacgatgtatagagttacttgtgaccaagttattaattttgctgtactttgtactttgttagctttactgtacttttgcaaggcttagaagaattttaaggttgagccattatgcttattggagatggtggtactataaattttgcgataacagagccttatattctaggaagaagcttggaaaaaccatctcattgttttcaagtgcttaggagggcgtttggtactaagctgcaggaagccagatactgagacagccacagtgttcctgaagagatgatctcgaggatgctcacggttcgtgtcctagaacactgctcttaactcagcagctttcagaggttcttggtgagcttgcgaagtttggttttgatccccgcactctgctctaagttctgacctttcgagcatagcgttgttaagtagtgccactcagttttggcttgacaaaagtttaggtttattcagcattccgaatgcagccaattttatgctgaattcagtgaagatgttgaaaaaaatgatggattattcaatagtgagaatgctttcattttgcaggtggtgagggggcatcaaaatcagcttcctgacataagatcagatagtctttaaagggttttactgcaaagtgaaaattgttatcagaggtgggagtcttctagataggtcatgcggttcatccattaggcctgtactttcttgatctttaagaactccatcaagagttgtgtacaaagattttcaacttttgctggtggatttttttgttttcttaatttacttattttgtacttttttttttgttttaatcaacctgttataaaatgaaaataacttttttatttaaaattaaggggttttttttttattattattatttcattgaaataggtattttgctttggtgtagtgttgttaagaattcagggtatttaggatttttactttttaattattaattatgtattattgtacctaaattttttagtccgttataaataatttttaaattattcaatattatataattgatcattctctcagttttacctaacgtgacaaatataaccataacgtaaatatttatactaattctttagcgctatttttattttaaaaaaattattaaattaaaaattaattaatatttttaaaaaaattaagtaaaaataaattgaaacattttttttttcaaattaattacaaatgtagccaaatagtcaaaggtttaaacaaaattttacagaataatcactttacatgaatgaacaccacatttttacccaaaatacattacaggctaattactaatttttcctcccgaactttgatatgtactaaatcgtgtctcctgaactttttttgccgttaaaaattccctcataactattgagattgttaa

SEQ ID NO: 18309 - DNA, 5603 bp, Cannabis sativa
tttgagtgttttaatcttgtctgtgtgacatggttttattttgttttgtttcgttgttggttcttctttattcttcgatgactcgctatcaaataaatgttagtggttggaaatttataagttctctgatattgaaggggctattagtagtgcagttacataccttatacaatagttgagtggtcaagctacaacgaggtttaatgaacctgctacaacagttttcactattgtgtcttctgagcggtagttaaaattgaatataagtattcttaaggctatgttgcaatcttttaatctaattttatttttattttttttatcaaacgattagggaattaggatggtgattattttacttattttttaattcaaatcctagtcgtgcatttaatggggagatgtaataggctattattttagtagattattattaatataatattgcatgatttattaaaaaaaataaatataatacaaactttggtatagttaagctattttacacgcatgatttatctttaaacatgtttatagataaataaagtaatttaaattaaatgtaaaattatcataaagtccaataatacaatagtgacctataaatcaataatttgttaatgaaaatattatacatttcatgtgaaacacaatgctgtaaatatgggctgagctttttaattagattgattaattataaattagatgaatttatacaaatccctacgcaggggacagtaattctttaaaagaaactatataaatatataaataaaattaatgatggttttctatttacttttattttcttggaaaggaaaattaatgataatttagaatgagtcaataaaagagaaaatactaaaagggcatcaatggtgtcaatactaaaagagcatcgtgagccaatcgcaacgcgacatgtcgagaaagtgctaagaatcattagtgcctaatgacaatactctctcatgtattacttgctagtgcatttataatattattagtgcaattaaacattaaattctacacaatttaattaataattattacaaaatatagcttaaaataccagtctgtttgagcagttctcttttataaagtactgtgatattgacgacttcttgtaaggtgtaaggtgtaaggtataaggtggggttattgagaaaattgtatatatatttagctgacttgtctccattcttcctcaatacacacactagtatactatatatacagtcaaccaaaccttaattcttattcatttattaattcataacccatatcatatatatagtatatatagttatcgttcgttatatatatatttattagttctgaaaacaaaacaaaaaaaaaatggaggaagaaaatggagttgtgataattgtgggagctggaccttctgggctgggcgtggctggttgcttaagccgattatcgatcccatacataattctagaaagagaagactgttacgcttctctttggaataaatacgcctacgaccgactccattttcatctcagaaaacaattttgccaccttcctcacatcccctttccctctgattttcccaactacgtccccaaaaccctctttctccaatacttaaacgactacgtttctcatttccagattcgacctctttaccggaggaccgtcgagtcagccatttacgacgacgcttccgccaaatggagcgtcaaagcaagatatgtactgaacaataataatgatgatgatgatgatgatgatgattatgagattgaggaatattccagtaggttcttggtcgtggctaccggagaaacggctaacccttttgtgccggagattaaagggttggatggtttcgctggggagattcttcactcgacccagttcaaatcagggaaagagtttaagaacaagaaggtattggttgttggctcaggcaattccggcatggaaatagctcttgatctttccaactacgacgctaaaacctccattattgtcagaagcccagtacgtctctctcttttacttaatttaatgtaatataatattaaatgtttaagacagccaactacacctagcttatatgctttaattagtagaatttttgtgctgtttaataatataaagaataaaacatgtttaatgtttaaatatacattattttatgtaggttcattttgtgtcaagggagatagtttatttggcattgattttattaaagtatcttccattaaaaatggtggactcagttgtggtgatgcttagtaagtttgcgtatggagatttaaacaagtatggtataaaaagaccctctgaaggccctttctatatgaaggtcaaatatggtaaatacccagttattgatgtcggcacttttaataagatcaaaaccggtgagattcaggtacgtcaccaaatcaaattagttaaatattattttcaatcttatattaattattaattatactccatgttttgttaaataataaaataaattaatcttgtattttttaaaatagtataaataagattctgaactaaattgattttttttttcaaaataaaatttaataataatcatattaaatgtgttatgacaaaattatttatatttttcgtattacaaatattttttaagttggttgtttaaaaaataatttgttaaaaattaagtttagtgtcttttttttgctattttaaaaaatacagtgttcattttatcatttaaatagggagtcaattaacttgtgccaaagacaatctaactgttggaaatataaatgaaagaaaaaaaatagtgtagtgattcagacctggtttattggtgcaggtattgtctgcagaggtagaaagcgtagaaaacgacgtcgttttgttgaagaacggcaagtcgtaccaattcgacgcaatagtgttctgtacgggtttcaagaggtcaacaaatttgtggcttaaggtacgaaactgataaaaggtccaattaatttttcaactaaagaaaaaacatgaaacttaggctacaagatttcattcattggccgttttaagacttttatattattttgtttcacatggtgaattctgaaagcaaagatctgacattattgtcttacttttacattacgaaaagagagttcttaattcattttttttttattattttttttttttgaagggagatgattatctgttgaataatgatggaattccaaaagtaagttacccaaatcactggaaaggaaagaagggtttatattgtgtgggcctatctagaagaggtctatatggagctacagaagatgctcaaaacattgcaaacgacatcaagttgatgatgagtgatctccaaaacgacgttaccaaaaattagagggcatattgttttcaaaaatttatctctataatcgacagtgagtactaaagttgagtaatataataattctgttatgctttatctgtgaagcttctcaatatgtgtgattgtttttttttttttttgaaaagcaatatgtgtgattgttacttcgtgattttcctagctggtataataaaaaataatattaaaaaatatttgtgattagtaccaatcataaaatcataaaatgacacatcttatctttatattagaacgatgctgtttaatagtaaaacttagaaatttatgctgtgcaaaatttgattattattattattaataataaaatcacactttcctccaaaaataaataaataaataaataaaatcatactaaatatatcttcatctaattattaaaattttatttatcggaaactattaagtataatatatattttgcaaattattcacagccacaaattcttttctatttttttttttttttggtaacaatataaaaaattatatttagtatgaatatatatctattttttttttctgaaacgtgagattatctctatcaaaaaatttccaattattattattattattttgctaaggttattattttttcttaataagatagttgttatagttattattaactttctcctttcattggttgatttttaagtttgtagcagtattataatttagcttttctgaatgaaagtgaaagacacggtcattgtgccttgtctagcaataagaaaagtcatgggtctcttttataggaatgctaacagaaatgctaattagcatgcctagtattattagatatattactattaatgtaactaatatcactaattaactatttgcaagacgctaccttaacatatatgaaattttaaggactcaaacagagtcttggtgcactagagtctagacgctataaaatgaatactagaaaatgccaagatctaaagataagacgagatatgctcaaccccaaacctaaatgccgaaaagaaatgaccattgtcaaaactccaccaactcaattgttatcccaaaatttgtacgaatgacgtgacacttggcaagctgacatgtggtaggaaatttgaccctggacagagtgttacactagaatataccaaccaggcatgacaatgctaaactaaattgaagtataaatgctcaaagtaattatcacctgagcgggctcaagatctcacctcgcgctgagcaaagcgggcaagccacgtaacgcgaatggcctacgtgaagaattcattgaaggtatttcaggatagttcccttaaccgtttccacaaaaataggaccaaaataaaacttcctattcgcatgggatttgacttaacagaataaaaaatttatgggatttacatataaatccccactacctcatctcttattattttgtaataaatgtattccctctcccctataaatagtgaggtcatttcactgtggaggggacagacttttttacacactttcaagagagaaaaacaatctgcaaaatacttgtaaccttttcaagagatattgagaaacttatttggtcagactttgtaatcttactattctttcataagttatcgaaattttcaaaaaactaataattcaacattagaactaaagaaaatacgattaaaaaataaaatatgaagaatgcgctcagactttttacatggtatggcctttcattcctttattcattttaatcaagctttgctagcaaatcaagcttggaggctctataagaaacctaactctcttcttgatcagctgttagtagatacttttcaatagctcttttgttgaagcaactcttaaaatcagtgaagggagaaagttcaggtgtggtttgatccttgaatcccgggacacaacactttccgtctcatttggtatataggtcctttcgatggggttgtagccaatttgataattgaagaaagacaaaggaatgatacactgctacaacaaactttttctcctttagatgtagacaggattttgactttgcctctgagctttttcagcaatgaagatgcacttatatgccatcatcacaactttagttttacacattcagttatcatcttgcttcatctctcaaagacactgatcaaagttcaagctccacttctgcttcgtaatggtggaagtttttctggtccctccagctgcctcaaaaagaaatatttgt

SEQ ID NO: 18310 - DNA, 3765 bp, Cannabis sativa
taaactaaatctgagttacgagggaaaagcatgcccgttgtgcaaatagtaagaaatcaaaccttggagtgcagtccagaaaacgcattggtatattgcggtgcagggtggagtagtaaggtgttgcatgacagggcattaggaaaaggatactttcaactttttggttgagcgcctctttcgataaatagttcattacatcctcagttcctctctgtctaacatgcacatatcagaaaagtacaaataacccgagcagaagacaactttcaacgattacttagaaatcttttatgcttgaataattattgacaattagacattgaaagtggaagttaacttaaaactaaagctggtaatggtggtatgttgcccaaaagaataataacaattgttattacagaattaacaaatacaaagatgtccataaaagagagaaaaaaactgtacctgatgatacaaactcatatacaaggccattggaatattggtagctagcaagaagaatatggctaagagcatttttcgaggccatttgctagaaatatttgaagaacccttccttttaccattgggagaatctgatatgcttattctagctaatgaatatccagaaaacatcaaggctataggaagcacaggcaggacaaatctgtaacactcagagtaggggaatgagaattataaaccaatggtcaaaattgttcattttacaaaaacaatgcttaagaaataaatatgtatattatatatttatatataaggtatacagacctgaattctttgtgacccagcacactgtaaagtcctaaaacccatgctataagaccagaaagcttccattttttggactgcataattccagcaattgagaatggtaagaaagtaaagagcatgacagtaaatccttgactgaagtaccaatgccacttgtgagttccataataatctccaccagaggaaagaaaattgaactttagaaaattaagaggtactattatccatgaaccatacatcaatcgatccaaaatagatgtaagcccaagcaccaagaccctgacatattagccaaatagaaaaccaagcaaatattataaacttcacataaaaactaacataccattaaatgaatttgcatgttgaaggttgccaagaattttgtactgcccagtccactaaagctatctacttctgcaataactgtaataaagactattgctggtgttcggataatctaacttacttgagtaatagaattattgtaatgcatccattgtcttccaaatgtgtctagaagaacagagatataggtagatggtttatacaaacattatcacaaggaagactttaataattaaaacagtatctcagttgatctgttagcaatctaaagttgttgcttccttttcttttatgtttcaatcatctatttatactcaataactggttcatcctatatttaaacttcatttccaagtacatatttgctgagaaaaaacatttttcttagcctctgctagtacaagttgcaaacgataaatcggtaaaatagtcaaaattatattaaacaaagatggattagtacctacccaattggagccacttccagaaaaatgaatctgagtctatcacgcgtctcatatagctcaagaaggcctacgtacagccaaataatagcactcgttggtcgtataccacaagctaatgctgccatagccaaaccccacttccttgacatcaagggaagtttgctggaagatggtcgcaagcaaggccagtagtacaggctaacaagggtaagaacagtttctaaggtattcgacaatgtacgggtgatacagaaaaacatgaaccaattcgtcaattgggcaaagagctaaaagacagttaagtacgtagtacatttcatatattaaaaaaaaaaactcttggtgtctaaaattgttgtctttagtaaatagtaagaacaaaaaatgatgtaaagctctatataagattatatgcagaaggatacagtccatttggcaacacgctcaccaaaaacaataacagataatttgtacaaatacaaatcacctacagcagaaaacatggattgcagcaaccttggagcctttatctacaaaacattgagttaagcatgtaattacaacttcaaaatatcataaataacgcactatagttgagcaaaagcagtccaatgtgaaaaataatgcaggatacaacaacctaattatcatcaattcattgtcatgaaacataacctaatgaaatctaactattagatgttactttagaagacatcatttaccatgaacaaaggagtatccaatcccagcaaggccagaactttgtaaaacaaagcaaatatcaatggatgcaaatagctacgaatacccttcttccattcccacgtcaaatgaccatatctagagaaaaaaacaaaacaaaaataagaacaaaaacaatacccctattgactcaaaagtaagaaacaacatataaacaatgtaaaaccagaaatacccaaatgcaattcggtgagcaacttcaagggcttgccaatgctcatctgggttgaaataagtctgcaccaaaagagcatttacgaatcgaaaagccaaacagattgcgaatactcttctgggtgagagtgaggagggactgaagtcttgatcctcctctgttttctctgaaagggaaccatgtaaatttgggtttccagtaaacacagctttgtttctctgcctcattgttttaccaacttgtgaaactgtccaaaacccaattctaaaatatcactgcttgtctttatagatgattaagactcagatgttggtcattcacaaaagttcaaagggtccacgcctatgataaaaataccaagatcaaattgaatcattactggaattgaattgaatcatattgtggttcttcaatcctcagctcttagctcaacgaaatcagtttcattttgttcacaatggaaaattcaaacagtactacgcctcacgaatcgtgatccctatcattataattaattaaaaatatatccaattataattagattagataattttattttataatctaatttaactaaatctgtataaaaaaactataaatttagtttatgtacaatgagtccaattcttttactagtgatcttagtgaaatttatgagatttaggtagtgagaaaatggttttaaagctttggcattcataaatatgagattggaggaaggagaagaaaccatacccaaaggcagaaacactttgaaggcatttcaaattaggtgtaaattgatacataaatttcaagcaatgatccttacaaacatataccagctaaagagaaaaagcaattcaaactgaaagaggtaaagggaaatagaaggttacgtacagagaaatgggagtgattcgattgaaggatccttagtgtgagtgtttctgggagaggtgatgcagtttggatggggtagagctgaggccggtgacggtgacggtgacggtgacggtgacggagggacggtggcgatgggggactcaccagagtttgggtgtattgggttgctccggaggtatcgggagtcaatgaataacttatgtgagggtatattggtaaatcaattataaaaagatggtatatttcaattttttaatggaggagactttttcatttttacacttcaaaatagattttttttttttttttcatttttacagaattctacatagagggctcgtttggaacgccgta

SEQ ID NO: 18311 - DNA, 5848 bp, Cannabis sativa
  modified_base (1839)..(1843): a, c, t, g, unknown or other
aggactaaatgtatgcatataaaattatacaaggactatttgtaacaagctgaatagattaagaggcataatagtatagtgtcataagtacaggaggtaaaaaagataattactcttttaaaaatttacaaataatcataaataattactttgtacataatcattgttattcgtgtttctagatgaatgtcacgtgtaattcagctcagttgcttaaagcccaatcccaggcccaaccaagataatggattagatccattagcaaagtcaagccttctgaatactaaacacatgattcgttcaaataagatacacctctgacacaacgtatctctggatggaatcgaacatatctcctggatgagtgattaatgaacatccaaatatctagttccgtattgcattcattaattgacaaatctcacaatattaggaatttatttttagaatcatgtctagaatttgtatcttcagaataagaaaataaagtaattgacaatcaaacatttacgtatctttattatttacaaaagtaggacacagtttaacaactatcattgtgatgtggcctccacctcaaaagaagatcaaagtctcacttgggcctcatcaaatcaactcaaatgtcattatattatatgtatttactctatcaagataaggtgtacatataagaaccataacactataaatataagaaaactcattcatgcaaaggattagaatctcattccttgagtgctcaggtaaattctatggttcaaacacttgtgtataagtcattagcttttttagtcttaacataataatattgactcgtggactagaggtcattaattcttgaaccacgtaaagatcttggtcatattttatcagttcttaaaaatcttggtaatcaattatgaaataaaaataaattaaaaatttattctgaatacgaaaccaaataataggtataccgtaacattcttagagcactcacaacaacttctttaaaatagagaaattttaaaaaaatattaaagaaccatactaaaaacacgctacaacagatgctttaaactcattcttcattttagttataaaaaaaaaaaaaagaagaaaaaaagaagaaaaaaaactcattcttcattttaatttttttttaaaatacattattcatgctctatatttatagaataatatttattgctctaaacatattttactaattgttttagattttaataattatttttgtatttggatatgtgtatatattaatattatatatttaaaatgaataaaatacaataaaattttaaaaaagtagaattttagtgatgtattttaaagaagttgatgtgtgttgtaatgtaaaagtatattgtaaaataaagaaaggagaattttggtagtatatttttaaaaatagaataaagaaccaacaatgctctttgagagtttacaatacacaattttctaataataaccattgaaaaaaaaaatgtatacttggtataaaaaaggagaaagaaaaaattatcataaacttaggatcgtttggtaacactattattttctaaatttttaattacaaaattaaagtaaaattttgttttcaaaatttttgtttttaaaaaataaaattgcgttatgtaaccacttttgtttttcaattttaacaacagaaaacgaaagtgtgttctgtaaaattcattttcatttttattttttgatttttatttaagtctaatctaggtttggagtcaaatttgcatttgggtcaaagaccgggttcagtgccagggccgtgggggattttggtctgggtctagtcagagtccaaaatattgattnnnnnaaaaaaattgtttaaaaaaatattaaaagtgatttttttttgttttcaaaattttaattctcaattaaaaaattgaaaagtgaaaataattttatagaacatatttttaataaatatttttacttttttaattttaaaaatagataattaattaaaaaaaatattaccaaacgtcaatataacaaattatgttatataatttaataatttgacgtacaaaagaaaaaaaaaattaggatttgcaaaagaaaaacttaataacacttagagattatttttatttttacattttaaaataattttttttattcatataaaaaaacaaaaaaaaaaattaaattataatataaattcatataataactcacatagcaattattgaagtaattcaaatcataaaaatataaaaaaaaaatacaaaataatataagagataattcttacttattacgtacaaatttgcataagataagttaagaaaattgattaataacacttcctcatgaaaaaaaaaagaaaaacactccgtcgtctataaaaaaaattaatcaatatataataacactccataattattataaccctagcaacgaagaattgtgaaacatttttgtggtcaatatttgagtcaacgaatgaattcattcgaaattttatttaatttgatgatattattttttcttaaaagaaaaccatataattggattttgtaataataattaacttatttaaactttaattaatacattacagtttacaggtcccttattaatgactcgtccttttgacgtgccgacaaggtaggcttcgtgacgggttctacgtgacagagcacacgtgtcaataacagataaaacaagggtcccaccccttccctcattgggtgccacgtgtacaatttctattctattctattcttttttttccgttcttctaatgtctcggcaagtcaaaattcaaaaaggtcctactttgtcatttcattatttattccataaaacaattaaaaatttaaaaataaaaattagggtcgtactatgtcggcagcatagattttcttccacgtaggccgaaaaattaggggacatgctcttagcttttgccacgtggcatcattagatgttatccgttatttcattttatccaaatatgatttattgggtaaaaaaaaaatagaaatttggatgtactctatttgtccccctatccaaataaaatatctgaattcaaaggccaatagagaaagccctgcctggccaaaacaagaataaaggtacattaacaaaagtttcacagtcacatttttcataaaagagataaagaacatctcttgaaatagatgcactataattttatatgttatagtatttaaaataatttttagttaaattttttattgtaattatttaaaatattttgtaaaattttaaaaaatatttcgaaaataatatttaaaaaatatgttgtatgcatgattatttcatttaaaatagattttttgaatattattttttatattataaattgtttaaaatttctcaaaattttgtaagatattttaaataactataacatacgtgaatataaaaaaaattaaattatttttctttgaatgtggaaataaataaaaagtacaatgtatctattttaagggattatattgtgaaaataccttatattatttatttatttatttcaagaaaaattcttggtaataatattgttagaaaagaaaaactcataaattgaaagttttgtaatgacaaaatttactaataaaatcttcttcttcttctttttcatttctttttctggaagaacatagaagcttatgaggcattggtattgattcgtgcactaaagaaacaacaatgagatggaatgttttaatagaaagaagaggctaatgttttaatttcaaagaataatattaaggaggcacctttacttttaaaattgggtgtaaagagaaagggtgtttttcactttattgccttccgtttttttttttatcttaaatgagagggggaatttgaacttatatttttatatacatgttatttgtcaaattggtggacctcgagtgaggtggcataagatgagcagggcccacatgtggctcccgaatattatgacatggaatacatttcgattgttgttttatgaaaaatactacaatgaatctatttgtgctgcaaaagcgaatgagtttgtacagttggtccaaagtaatatgattgtgaccgaatatggtactaagtttgaccggttggccaaatttgcatctagtaaagtggccaatgaagtcttgggaaaggaaaagtttattcggggtttagaggagcacatagttggagatgtgattgtgacgactaatcaacctggggttgtacggtcgtatgctcaagtagtagagttggctcttattgctgaaggggctgagaatcaaaagaagagtagcattagaagagattcgtggaagccgccttccattactagtttgggtaggggttttgaccctagtgatcgaaaaaggaaaccaaatgaccccagttatcatgatttctatcaaggtgggaaagagaagtggcgaacttatcctaaatgcccgtggtgtagaagacaccatatggtccactgtcaagctagagcctgcttccagtgtggggtagtagaccatctgaagagaaattgtacacaattacaaaaactagatacgaagaaagaggatactatagttcctgctcggttatttgctttgacccaagcagaggctgatgctggaccttccactgtgacaggtcagacttctattgatggcaatatgtttactgttttgattgattttggtgctatgaattcatatgtgtcaagtagagtaattaatagtctgagtagaccacatgatgtgttgtcaaatgggtttggtacattgttacttactggagaattggttatctccagcgtgaaggttaaatctcttccggtagatgtaaagggtatagaattgtgggtggacttgataaagctaaacttggaagatttcaatgtcatattagaaatgaattggttagtcaagtataatgctaccattaattacaaaaggaaaatgttaatatttgaactggagggggagactctgtttgtgtttgtgggaaaatttcatcaatctcgaattccaataagatcaacgcttaaagcaagagacttgctacaggaggagtgtatatgttatctagctagtgtagtagatgctacaaaggaggtgtgggacccgagaatgtacgagtggtatgtgagtttttggatgtgtgtttggaagagttaccagggataccaccaaagtaagaaattaccttcgagattgaattgataccaggggcatagccagtttttaaggccccgtatcaaatggtatcgtcagaattaaaggaactaaaggttcagttgcaaaatatgcttgatttgcggtttatcaggttgagtactttgccctcgggtgtgccgattttatttgttgagaaaaaatgacggatcattgagaatatgtatagattaccgggagttgaataagttgacgatcaaaaacaaatatatttttccaaggatagatgatctgttcgatcaactttagcaaaagactgtaatgactgcatatttagacatggaaattagcagtttattaataatttaattattatttataattttatgtgcattagtagaaaattagtcatattgtcaaaaataggcatttttgatataatttctcaattatagagattttattgaattctaggtgtgtcatgcatgttatttgtagattatgatattttcatattttatgcccggtaacaatgaaatttgacgatttggccattagtgtcactttaatactgtttagtatctaaaaatagcaggggcaagatttatagataattttgtgtagtcccatacctagttccatacatacacaatcaatccatttaagccctcttcaactgt

SEQ ID NO: 18312 - DNA, 3786 bp, Cannabis sativa
  modified_base (3377)..(3386): a, c, t, g, unknown or other
tgattaccttactattgattcccattacttattagtaaacatgccataagactaaaactatgtacaaataaaaataattggaaaggtcatactaatgttataacaaaacagtcgaatatgggagtagaaacactaagcaatgttcagcaactagcacttggttttgtactgaataggtactttgtgtaattttatttaatttcaaaggatttgaattaaaatgtaattataatgtgcatgattcatgacctgagagaatcaggcaatgaattctcttcacagaacaactgctgcaagcccataattttttgtttcattatagaaatatataattttatgcaaaagctggtaggaccccaaagtatttaatgatcaaacaccaataaaatatacataaatatatacaatagaagtatctctctctttctgcaaaaatatattttaattttatttatatatcgatataccatcttgtagttatttttggattttttttttgggtcaacttttagaaaattgcaaataatttgctatactgataatatagaaacaatttattagtaaacgtatttttagcaccacatgttattatttaaaaaataaaataaaaaacttagtttatagaaagactcaagcccctaccaaaagctttccctaataaattatattatatacataattaggaatatgaaaatatattaaatagttcaggcctacaagtagaaagcacttaatttggtggaatccttaaaatatttttgtaagttaatatgattagaagtataataattagaaggtctactctacacagcttttggattgtaaatgatatatcctatagtagtatcaaggacttctacaaacaacatgatcgttaccggtaagaaagcatatataaatattatatatgatatatattttataataattcattaaatgtatgcattattactaaattataaataacaaattaacaaaaaaaattaggagaattatttcataagttatttttttaattttttttttaaatttaccgtttgggaataattgtttaagtagtttttatgtggatttttatgtgatttatattattttgttgttgctatgtaggttattatatagactttcgtaaaaatgtaaaaaaaaaaaaattgaataaattaaaaaaaaatcaaagaaaaaaaacaatatataatgacaaattaatactaattagaatcctgtgtctctaagtgttaatttatggttgttagtaatcttattatttattaaattaaaatgtaaaacatctcatgctataatgcattataacctcattcagaattaaaaatgataagaataatatatgtgtccacataataaatcacacaaacttgactaattttaactcattccatttttaacaaagtgacaagccagatatttatcctagttaattaattgcttgaatttaatgtatcaataatacccccaataattaatcaagcatcataaacaaaacactataatatatatattgaagaaaagaaaaatgcaaaaagaattttctttacagaaaattagagcaaaccagaagcaatgaaaaaatgctggcacattatagaacgtggttgtcaaacgattcatagttcatacacatacttttgaaaatagcatataatacgtctgcgtaatgtatacatatatagagaagagaaattttacatgcatcttttttaagggattaagctctgaaagtgatccaaaataatagttatcatcaattcatatgtagtaactgaattcgaattaaagaatgggaatggagcaaaaaatatataatataaatataaatacgcaccttattactttcaatcccaaattgaaaaagtcgaattccattagacttaaggaactccatgtttatatcagggtacggctccggacacaggcatctaataatcaattaaaatcaatcaaacacgcataagaaaagccctaattaaattcatcaatctgattcttttcttttcttttcaatgaataaataacacaaaagaattgataaaacaaaggttaattacatgattgagcgaaggccaagagtttggaggaatgagaagttggcagaatcaggaaatccagacctgaaaatgccattatctaccatggaaaagttgagagggggaatgaaaaggccttccccttcgactaattctccgctatcgcagtcgtcctcttcagcggtaggaacggcggagatcggtttctcgggaagagtcaagtggcggcaatcgaatgcgggcggtggcggagtggcaggagagggcgaaggatcgacctcgatggttctgcacatctcgtagtcgccatgagcggattccttctgatgttccaatttcattactaatcaacagtaaagtccagctcaagaccaaagaccaagaacagggcttgggatcgctgaggatattctctcaagagtttttctttttctttttttttaaaaaaaaaaaagggctgcgcggtttgagttttttttttttttttttttatttaaagagtgacagttgagaagggtttagagagagaggcaatattatggtgaaggatagagatgatggtgcggtgggctgttggatatgatgaaatggtaaactgtgtatttatagatttagcaaagggggcaagacgcacggctccgcagtcgatatttttaattaaatttattatttttattaaataaataaaagttcaaaatatttatttatttattctgaacaaaaaaacttattttttaaaatggacaaataatttgaaaaacaataataacaataatttataacgaattgccaataatacgcgcctgcgcgtgatgagaaaaaattaatcgaattcaatttgttggaaggaagtggataaaggaaaggtgttttcttatttggcggtggctcactctaatgttcgctaataaaatattgttaatcactattattaaaatagtatatttatgttaagtgttattttattttttatttaaaataaatacacaatttaaattttaattcataacacatatcttttatcttttattttatattttataatatatataattctttttaatattacaatttatatttatattctataaaatataatatctttctattatcaatttcttaactaaattcacattcaaaattatatttttattattattaaaaaaaaataagataaatgtataatttttttaaaaaatatatattataaaattaaaaatattacaattaaactaaaattataacaataaattccttcaaaaaaaaaattacaacaatagataattcataacatatttatatttagtatttagagcgttctatgtaattaagagnnnnnnnnnnaatctatagtggagtcaagagaaattaataagctaagaaatttacttgataaatttcagatctactaatgaggagcttagttacataggctcatggttcccacattatctgagataatgtcatcttgtagactcaactaattgataaattcaattagaattcgaaaatagactgtcttatctaatataatttttactaagtttggacaattttgagaagaaaagaaaaataaagatttatttgttaattagtacactttgtaggtctaattaataaatatatttaaattttgttttatttaaataattagatgagataagtggtaaaataagtttagacacattattttatttaaataaaataaagtggcatgaatctaactttaaagcctgtagatggt

SEQ ID NO: 18313 - DNA, 3591 bp, Cannabis sativa
agagagtagagttagaaggaggagtaaacttggagggaatatgaagaagtagtgttggagaagattaacattactactattttaatttaaaaagtaggatccacttggaaacacaaaccccttagacgtcattaaaatttaatttagtctcatattcaagtctaaacctcgtaccaaacgctccctaagaatatattagcaatttcttagtagtatgaaatacctataaatatataattgtatagttattaatagttatgaaatgagataatagaatttggaagatttgtcctgtctcaaaaagacccattacctatcagtttcatttgtatttgtcaatttttttatgaaaatcttctctttaatttatgagcctgttgtaatcataatcatgttgactctttttcatctttcttaattggtgttcaaccagtttccattgttatccaaaagtggaatgttggaaaaccttattggagaattttctagaagagaagacaaccattgtatcttacaactaaatgatttgcctggtggagccaaagctttcctattaatagccaaattctgttatggtgtgaaagtagaactcaatgcatcaaacattgttatagtaagatgtgcagccgaatatcttcaaatgacagaagattatggagaagggaacctcatttctcaaaccgaaaactttctaaatgagatctttggccattggacagactcacttaaagtgcttctaagttgtgaagaggttttctcacaagctgaagagcttcacattgtgtcaagatgcataaactcgttggccactaaagcttgcgcggttaatccaagcttgtttagttggccagtctcgagtggaggagggctgagttcagtacagagtccagaaagtggtattttttggaatggaataagtagtaataaaactaaacaaaatccaagtggtgaagattggtggtatgaagatgtgtcctttctaagattacatttatacaaacgtttcattcttgctattgaatcaagaggaatgaaacctgagaagatttcagggtcattaattcattacacaaagaaacatctttgtttattaggtagggaatcaagtcttagaaatggtaacaataatgtagcttctgtctcaacaatttcatcaccacctgattcagatcagaggaatctccttgaagagatagttggattattaccttaccaaaagggtgtcactccaactaatttccttcttagactacttagaacatctatgattttgaatgctaatgcttcgtgtcgcgaaaatttggaaaaacgaataggggttcaattggatcaggttgttcttgaagatcttttgataccaagtatggggtactcaatggagacactttatgacattgattgtgttcaaaggattcttgatcatttcatggtaatggaacatgagacaagtgagagtagttcgaattcggttgtggtagatgaagaagggcaaatggttggagctaataatggtggttctcattcactaactcctattactatggtggctaatctcattgatggttttcttgctgaggttgctcctgatgctaatcttaagttgatgaaatttcagtcattggctgctgttattcctgaatatgctaggcctttagatgatgggatttaccgtgctattgatatttacctcaaggtaaaataaaagaaaactaatgctttgaattttaacctgttcgacaagactatagtaggaatatcactccttagagtgttatcgtcaacctcctattacaatctcttagtcaatctttatgcttaaaaaaatacatgctagaatattttttttcaatttttttttttcacggtggtgtttgctatgcttacaacaccatccctgtaaatttctgaaaaatttcgaatagtttacagtgccgaaaatacgtttgaaattttttgaacacgcgtgataaattggttatcatgaactctattttcggcactataaattattcgaaatttttcaaaaatttacagggataatactataactatatataacgattatccttatgaaaaaaaatgttccaacatgtactttcgaacgtggaggttaactaagagattgtaataggaggttgtaattagcacaactctatcacttttgtccttaatgttttgaaaagttttgatacatgtgtgcttgtgcttatttcttttttctaaaatgctttagatgattttctaatttaatttgtgcgcatactataatttaatttgtaccttttttctaaaatgctttagatgattttctaattttcaggctcatccttggctaactgactctgagagagaacaaatttgcaggcttatgaattgccaaaagctgtcattagaagcgagcacacacgtagcgcagaacgaaaggctaccgctgcgagttatagtccaagttctatttttcgagcaacttaggcttcgaacctcggttgctggatggttctttgtctctgacagccttgacaatgtgcaaaatcaaagtgggaatcttgcacttgccagagccggagcatcaaatcgcggtgcaacgggcataggcgcaagcacaagtgcacaaggtcaagttggtgtggttgatgacatgagggacagagtttctgagctagagaaagagtgtttaggcatgaaagaagagcttgaaaagttggttaagaataaagggagctggaatatgatatttagaaagcttggatttagatcaaagtagtattattattattaatagttctatgatggagttgaaggttaagaataaaatatgcaaaagaaaagagatataaagttgaaaaaagaaatcatattttttttggggtatttgaattagcttttggaaggttaattatttttggtttagtcaataaggtaagcttgttgtattcattgtagtactactaactaggttcctacaaggctttctcttaacatttttttttttttttttggtgtgggaagtcgaatttaatcaatattatatttgttattttttaatttaaattgatctctgaggaaattccactgaattgtcacaaaaagctacttaggatttttatttagttatacatagagaatttgtacaaatattatcatgtggtggagataatctaattacaacaaattaggcacaaagcttttataattaagcaatggttctccaaaccgaattagcacaattacacaaaagtgaagtattgaagagaaagatgaaacaaacaagcataaactaaggtcccaaaagacactaaaatatggtgataaacaccattattccaacttaaaactaaacaaaactaacatacataaacaaaaaagcaaccccaccaccatcaccaccgttcgaaccccgcaaccccaatgccaagagagcaagggactataccatcatatacaggcaacaaccatgagatatggtctcacctaaggtagaaatttacacaaatacacctgaaaatagatttttccttcgaggaaattacattttataccctttttatattgtcctcttttatttttatcctcttttttaaagtctatcat

SEQ ID NO: 18314 - DNA, 1881 bp, Cannabis sativa
gcattgcattgcataattctcatttaacagccatggtaggattctcctttttctctctacccacctatcgatatgatcatatgatactctgctttatgtctttacttatctatttttctgttcaacaattttcagattattactgagaagaatcgtaaggagatctgcaagtacctcttccaaggttccattctatatttccggcaattttgtctttttcgtttccttttactgtgctgcattatattaactgatggaagaattggttaagaactagaatcactgtgtaactgtaattcttattttccaccaatttgccatgattatattttattttgctatttttgcttgataatttatcactctattttgagcctacctaaatgatgaagtagactagtggtaacgtgggttttatgggggtacttctcaattgccccattgtttattctattgctgattttttcccgtgatgaaatgatcatcaaacaaatgcttgttctttgaattgtgttgctttttttttgtggaacattaacaatcaagaggagtatgttttactaagaatcttatggtggagtatgttttactaagaatcttatggtggattttcttgttttaatctaaagagggtgtatgctatgcgaagaaagattataaccttcccaagcaccccgagatagatgttccaaacttacaagttattaagttgatgcaaagcttcaaatcgaaggagtatgtgcgagaaacttttgcatggcagcactattattggtaccttaccaatgatggaattgaacacttgaggacttacctaaatcttccatcagaaattgtgcccgctaccttaaagaaatctgcaaagcccctcggtcgtcccttgggcggcccacctggtgatcgtccacggtaattgcatctatattatctttgataatgttgcttttccatgtagccattactccatggttaaagggactaacgaaatgtttgcctataataatgtgtcagtggcccatctcgttttgagggaggttcaaggtttggcgatcgtgatggataccgtggagctcctcgtgggcctactggtgattttgctggtgaaaagggaggtgccccagcagacttccagccttctttcagggtaaatattcagtatctctgtcaagctcttttcatgattggatagctaatttctaccacattcactgaaaaattctagtatactgtaagaaagaactgagaattcatttttgtatactattaagaaagaatttaccataaatcctataaagaattaacccccgaaataatatttcactttatctttaccttccacttggaatgggatttgatactctacaaactcagcgtttggcttgtagtgggcaatgtaatttgtttgatttttatggaaatttggttgtgatatttcagggtgctggtggaagagctggctttggtcgcgggggtggaggatatggcggtgccgaacctcctagctcaagtttctcttgaatctttgtatttgaaggtctagtttagcttcttcgaaagtctttaagaactgacatgctctttaatttcactgccccagggaattttgtaagatactaaagtgtttagatcttgatgttaatgaatggagttcttggaatgtcatattttaactagtttattactgtttaacatccgttgttctaccatcatcattatttctttttgttgaagctagcttttactacgaaatttgatgagcatggcttcatagtgttataggagagttctcactcccacaatagatgcatagttttgccgcgtacggcgttcattgtatatcttttagtggttggaaattggaatagagaattattctatata

SEQ ID NO: 18315 - DNA, 2776 bp, Cannabis sativa
ttgaactttgtaactctgtttttgatatcaatgagaacactaatcgcagaattccttcaaaaattaattttctatatttaacgtgtatcataaataaagcacacaagtttgaagtgataataaaataaataaatttaagctctactttacaatcactacacaacattgcaatctcaagtctcaactcaaagttaaggaaaaacaataaaaatgtaaaccttctctcaatttcaatttaaaaccaactgattagaaagagaaacttggaagtaccttgtttttgaatgcacttcccataaatacaggtatgaatttctgtgctatggttgccctgcgaattgcttcctggaagagataaagaaaagaaagccatacgtttcaacaatcatgcaaacactttgaacagctaaaatctcttgaaaaagtaaactacatacggtccaaaagagttatagaatttcttcgcatatgattatattgaaggatgttgtaacatcttatcacatgagctgtgaatatttatcttcattttttaacacactccaggatgggaagcaaaagtaaatatttctaagaaagaatattacaaccatgtgatacatatatctgatagcattttttgttttgttaattttccataattttccctacctcaagatcagtagaagatataggctcctcattaagaaataactctgcaagtttatcatcaacttcagaaacaacctcaattaattcacgtcttttatccattgctaaggcctccatatcagcaggaatgtcttcagcaactacctcttcactgcaacatgcaccatagaaaacaacccaagcatgaaaatgaaagaccaggtatgttagacccgctcgtgcaacatgatgtctcagaaaacatacccgctaggaccacgaaaatagtaagcttttaactgaacaaggtcgataaggcccttgaaatcttcttccaatccaataggcacttgcattgcagcactgttatgccgaagtttagaccgtgcctgaaagacaaaaccaaaatgaaaaatattaagaacagcacagcaataatatcaattaaaacttaaaaaactgaataaattcaagaatattgcaaaactatccaggcatcctttgtcactaatataaaccagcaaggccattcatcagtcttgtcaagccttatcacatcatttgagaatggtcttagagtttcatctcagcaagacaatttgcatcaattatcgttatcataaactatatgtgctaactacagttttagccccccccaaaaaaaaaaagtaaaatgaaagtttataaattttaaattattattatctaaaaaaataaaaacaattttaaattgttaatatgtacctggttaagaactttccatggatctgctcccattctatcgagtttattaatgaaagcaagtcttggaacttcgtatcttctcatttgccgatcaacagtaattgactgactttgcaccccgccaacactacaaagcacaagaatagcaccatcaagaacacgcagcgccctctcaacctctatggtgaaatcaacgtgaccaggggtgtcaataatgttaacctgcaattgtagcaattccacgtatatgtgaaaaaagttatataaatttataataaatgatagcaacttcaaaaataataagtcatatttaaacaataatagaattctaaaatcccagttctcaaaaaaaaaaaaaaaaaaaaaaagatttctactttgaaatcaaactgaactgtaaaaatcaatatgaaatgagattatattttagttttgtcctaagaaattgatgaattacgccacattgtaactctgtgtgcgtgtgtgtgtggccagcatgctcaattggcaaattgtaaacttcataactactcgtaagaccaaaagaaacgattagccgaaccaccaataatcaacctagtggctaacgatccaaacagacaaatggccaacttgttcagatttaagtacctgataaccattccacgtgcagtaagtagcggcagactggatagtaattcccttctccctctccaaatccatggaatccatcttagcgccgactccgtctctccctctaacctcatggatctcatgaatctttccagtataaaacagaacacgctcagtgagcgtggtcttgccggaatcaatgtgagcagagatcccgatgttgcgaagcttctgcatcgactccttccaccatggttccttctcctcatttgatcgcgctagattaccggacgagaaattccggaaatggaaggttccaaggagtgcagcggaggctggtgacggagacggagatcccgaaagcgacgattttcggggtgaattgtagagagtatagagaaggcgcggtccagagggtgttggaaagcgccccatgttaggtttatgctagggttttggatcggggtttgttggttaaaccctgaaccctagtacaaacaagctctgcgcctgtgtttggcgtggactgctagattgtttcaaagggttttggttggggtttttgttttgagtattacgttatgacttatgaggaagaggaagactcgtgccatgtcagattgttgggtcggatcgggttggttattcggtttggtgcccgggtaaatttgataaatttatttgaataattatatttttgccatctaaactttactcactatttaattttcctccttaaaatatatggcttgttaaaaaatttttctaaaatataacatttatataatta

SEQ ID NO: 18316 - DNA, 2445 bp, Cannabis sativa
tttttttttttttttttggttcagcttagcttctgctattttgaaaaaaaataaaatatatatgttttattctatgtttatggagtctgattctttatttaatatttaatctgaatgtctaatgttaattatatgaaatatgattaattaataaattagtattgacaatccacaagaagtgaggctgagaagataatgacttgttccttggctacatttaataactgctaacattgaatttttttttgaaaaaaacaatcctccgctagctttatttaatgattgctaatattgaattatttttgtaaataagacaaaaaaatttaatcaattttaatttaaatatgttacatttaagatcacgatattacaatataattgcttaattagaataaactatgaaatatcttacaagatattttttaaattcctcaccttagaaaaattctataaatataataaaagtaataatttgagtacgtggtataaattttccaaatgaaaatggtagtatttatagccaaattgttgccttagttatagctttacaatggagtatggaggacgttgaaaagggcaccaatttgacataaatatgaaaacttttgttcttagagagggaaagtattgtttatactccaataaatgagtgaattgaatcgagtcacactgtgtgagcagtgttgtttgctacaagaaatgactcacacaatcgaacgcgtatatgaccataacaccacataaattattaatatgctagtcgtagtctactgtcctagttgaagaaccaatactcaactgagcctaatttctgatttctgaatcttagggagtgttgtcagtgttactcagtttgtgactagtgtttttttctgtttctgactttctcccatgtgattcaccatgctctctttccttggtttttgtttgttcgttgggaagcatcctccaactactttcactctccaatcctattctctcttctttttcactgcacgtgactctttaatttttttagttaccaccttttattttattcttttaattgtgaaactgttatcttctttttgtcaatattttacaaagcgtgttagtaaagcgagcgagggttggacaattaatgttactactgctgcactgcacttcctcttgctcctcaaatactattgataaataaaacctttactctacaggcttgaaaaacattctttcttgcatctatttccaaactgaaaaggaaaaagtaagaaaaaatatgcaggctcaaacagcttataagttcattctctggactctggtaacattgtcatctcttacatcccaaggtaattaaagcccccctctctctctctcacacacacatagtgtatttgaattataacatgctatcaaattaagtggtgaggtttaaattttgcaggatgggcggtcaagtgtgctgccggcgatcacgcacctacggtgaatcaaacacaggtgggagtgggaagccctccaaaattcttggtggaaatccgtaacaactgccccatgtgcccagtcattaatgtccatctcaagtgtgggaacttccctcaagccctcgtgaatcctaggctgctcaaagtgcttggttctgatgattgtgtcgtcaatgctgggcttccattgcagcccctgcaaaagctttctttcaactattctcacaacaaattcttactccgccccgccatttggtattttcagtgcgagtaatactagcttgcttctctggctactcataccccaccatgcttttaattatacattatccttattacccacttatctcttagtataatagtatatctggctctcgctctctccctccccagtagattattattcttcactgttctatttaaaacagaaccaaagaagaaactcgatttcactgttgtgatatctactgaaaatgttaactggaaagtgtcaaatgtgctctaaatatgtttaattaaacaccatggtcttacaaataatttgtgctttcgtttggggacgtgacgtgatgttgccaaatacacttttatcctcaatttttggctataatcatttgtgaatacttaattttaggagtgttctttcatccaatcggcactatttttctcataatacattcaatccgtactaagagcgaatttcatattttgaatcaaatctaatccgcataatagcttaaatctaatttaatttacaaaattgaatcaattattttaaattggttacttttaaaattatttaatatttattaaaaatatatatatttttatcacataactagcaacaaaataaaacaaattattgttattttatgtctttaataaatttaaaggaaaaaaaagtacatataaataaatgtttaattttgttttaaattgtatataaaaaaaattatatataaaaatagaatatacatttaattta

SEQ ID NO: 18317 - DNA, 5226 bp, Cannabis sativa
gtaaacatatgcaagtaggagatttctataagattgaggatttatatcatttcaggatagaatgtcgggaatatagtttaccaaacactcagctcatttttttccacagtttggctacagctgtttttctcacagcacagttgcaactgctttgtcttacagtacaactataccaaactagcccaaagtaaacttataaaccccgaaaagcgagatgcatctaacatgtcaacagcgaatactaacacataattttcaacacataaaaatatgacacatacaataatcaagtaaaattattgatatcctttggcatttgatacttaaaataattaattaaaattagcataaccatgtatagacactacaaaaaatgtcacttttatcagcatagttcgctactgcgctggtaaaagtaaccttttaccagcgcatttagcaaactgcactggcaaaaaggtcaaagttttaccagcgcatatttgtagtggctaaaatctaacttttaccagcacatttcattttatgctggcaaaagttctaatacaaacattaaattgccgaccccttttttccaacacatcacaagtaaattctattttaccagcacaaaaatatgctggcaaaagtgacatttcttgtagtgagacgaaggtttctatatagaatcttttagcatttatctatataaatcaagttactgtctcagcaaattcttactgctaattttatttaaaacaattaggcagtttttttaattcaataatctatctaatatataagttttaggtagagatatcatttttcctattaatgcatgactactattgtaggggtgttcattggatcacattcaatgtttttaggtctattctgatctgatctaattacatattagatgttagattttaccatccaatctgactaattcatttcagttatccaatcgatctaacatccattggatgttggattggatcggttttatccattggatgtatttcaaatatgtttattagtttaattttggtttatcccatattttagagctagtattttttggatcggatcgaatccatccaatattttaggtccagcatgtattagattggattggatccatccatattccaagaaaaaaatagtaaaattttaatgttaattttcatatatacatatatattttacgtatagcaatataaaatttaattattcatccaaactaaataaaaatactaattagttcgattggatgtattggatttttggacactccacccaacatccgatctgttccaattggatatttaaaaataacatccaatctgatccgatcacaattggatatttaatgtttggtggtcggttataattagatcagtcggttgttattgaagtagatcaatttatgcacacctttatgcatgagtgttttttttaacacatttgatgatgtatattgtagtaatactaaactgattgttttcggggatttttggataaattaatgttcaaaataatctgtacgtgtctatgcaactgattatataaaataacgtaaattattcaaaaaaaaaataaataaaatatttattataactataatataaattatcatataaaaattagagtacatataccccccaccattggaaaagaaaacattgcccccaattctatctataaacgcccaaatgactctttgtctctgaggaagactctgaaacgttgtcgtggtaatgctcctcctaccccttctctttggtcaattgaacagggtactgattcagtagttttttcgccatttgatgattctactgatacttttgactgctcagtggaggttgctttgcaatcccgctcctcgccatgaaaatcattagttggaatgctcggggtttggggaacccgagttcatttaggcaccttaggttgcttgttcaacagtaatctccccatgttttgtttctaatggaaacaaaactctgtacaaattcgatttctcgtttacagcaatcacttaaattctctcatggtcttgaagctcctcgaactggtctcaagggtggcattatgttattatggcatgagaatgttgatgttaccttgctccactatggaccaacttattttgattgttatatgtcttttaatagtgagccagtgtttcacttcactggtttttatggtgctcctgaagtcgggaaccgtcagaattcatggttgcttttaaaaaggcttgctgattcagcccctcttctaccatggcttgcaataggagatttcagtgaaatcatgtccaatgcaaataaggtaggtggttctctaagaaatgattctcaaatggatgcctttagacaagctttagaccactaccacttaacagatttgccatgtcacggagatgattcacttggataaagaatagacatggtgtgaatactctaaaagaaagacttgattggtgttttgttaatcaccattgggaaaattcttttactttgccacggattcagcatctggactattacagttccgaccacagagcaatttcagccactttcgaacttccaacattgacttctcaaccaaaacatcagcgtagccgatttcgatttgaaaagctttggttatttgattcggacagcaaagaaattatatccaatgcttgggctcctactttatcctccactgatgctatcactcaattaaagaacaatcttgatgcttgtgcaaaccaattacaacagtggcatattaagaagtatggtaagatgaagaatgcaataaaagaagctcaacaaaaggtgtttgaactcaataacatctcttcaaccacctggaatcattcggctgaaattaaaaaatcagaatcaattcttgatgagttattagagcaggaggaagtatattggcaacaacgctcccgtgtggaatggctaagtcttggtgatcgaaatacaaaatttttccatgcaaaagcttctgcaagaaaggctaataacaaaatcaaatttttaatagaccctgcaggagcaaagataacctcaagagacggcatggctgttgtggttcagtcctactttgctgatatttttcaaacttctgctattgatgatgaagctcttcatgcaaccttgcaggctattccacccatggtaacatcggctatgaatgatgaacttctcatgcctttcactagcgcagaagtagaaggtgctttgcgtgctatgggtccggataaaagtcccggcatagatggtatgtccgccatgttctaccaaaataattgggaaattgttggtgagatggttaccaaagtagtcctacaaattcttaatgaaggggctgatgccactgcacttaaccataccattataacactcatcccaaaaatcaagaagccacaacgtatcactgactttcgtcccattagcttgtgcaatgttatctctaagttggtcaccaaggttatagttggtcgatttaaacatgtcctacccatggtaatctctgagactcagtcaacctttcttgcaaatcgacaaattcaggacaacattcttgttgcttttgagcttgttcatgccatgaaacataaagaaaaaggtcgtcggggtattgccgccttaaaggtagacatgacatgagtaaggcttttgaccgtgttgaatgggactttctaagaggtgtaatggctaagatgggttttgcttcagcttggattaatttaatcatggcctgcttaacttctaatagcttctcttttctcttgaatggagaggttacgggttcgatattgccaactaggggacttagacaaggctgcccactctcaccctatctgtttttaattatctctgaaggtttctcacggctcttgcaacacgaggaaaggctgggtaatctcaatggttttgccatcactcgccgggctgccccaatatctcacctattttttgccgatgatagcttgctactttgtcaagaaaatgaacgctcttgtatggccatcaaaagagtacttgatgcttaccaccgtgcttcaggacagctgctcaatccggataaatcagtcatgtctttttcaccgaacaccactctcggcatacaagtttttttcgcaggtagcttaatatggccatttgtgagtgccatgagacatatcttggactacctgccttctctgggagaaacaaaaaagaactcttcagtggagttaaggagaaaatcttgcgtcttatgcaaaagtggagagagcaactcttttcggctgggggtaaagagattctcttgaaggccgttgttcaatccatcccaacttatgcaatgagttgctttcgattaccagtgactttctgttgccaacttgagtctatgatgtccaatttttggtggggatccaatgaaaacggttcgaagattcattggcggaattggaattatatgtgcaagactaaagttaatggtggcttgggttttcgatcgttcattcacttcaaccaagctttgctcgcaaaacaagcatggcggatcttacaaaatcccgattctctacttagcaagctttttaaatatcggtatcatcctaataattctttcctggaagcccaccatggccattcaccatctttgacatggcaaggcatattatggcgccgagagcttctgccaaatggactgcgctggaagatcggtgaaggtcgttcagttatgattgggcgtgatccttggataccaggtcacaactcatttctcccaatccgatatgatggacctgccaatggagtagttgccaacctcataacagaaattcaagaatggaatagccaattgttacatgctcattttttagtcgtggatgttgaaagaatcatgaccctgcctcgtagtttttttcctaccccagatcgtctcatttggcatcatcataacagcggccaatacactgtcaaatccggctatcacagagcttcttcaatagaggacgcgtctaatccatcggtttccaccacgaaatcatcttggtggcagtttttttggtctctgaatctgcccccgaaactcaaaatctttgcctggcgtttgatacatgatgcacttccagttgcaaagaatttggtgcggaaaaaagtcattactgatgccacttgttcagtctgtcgtcttgcttgggagtcaattgggcatgccatgtttggttgcaaatatgcaagatctgtttgg

SEQ ID NO: 18318 - DNA, 2917 bp, Cannabis sativa
ctcatccttctcccaatgtgctctacattcaggtttgttatattagaagattttaaaattcattttagtcgagataaataaaaacataagaataagaatgaaataaaatttaaaacgcattaaaaaaattgatttttcatattgcatcggaatagtctttcctgtcattctgtcaaaatagtgaaaaaatcattcgattggaatgacattctaatattttaaaacgcaacaaaacaaagtaacggaataaaacttgattcattttctattctatttcattacctccaatcaaacgcaacctaagttgataaaagcaatgatagtttcatctctatatttgtggttcattcttaggtgggtgatcctagtttggaccacaagtgttggcaaagaccagaagccatgacagagaaaagacctaccatacaaatcaacacaacttttcaaggaacagaagttgcagcagaaacagcagcagcaatggcatcagcttctcttgttttcaagaaaatcaactcttcttactccaacttgctcctcatacatgcccagcagttatttacttttgctgatacttatcgaggctcatacagcgtaagctttccacaagtgcaggaattctacaactcaacaggttatggtgacgagctgttgtgggctgcagcatggttataccatgcaactagagacgagtcgtatctcagttatgtaactgagataaacgggcaagcattcgctaattggggaagtttgagttggtttagttgggatgataagcatgctggaactcaggtgctctttttgtttttgtttgattggttttgtggctgtaaaaagagtataatttaatcgattttttgagcaggttctcttgtctaggatcaatttttttggtggtaaagagatgacagttacagagaatgttgatattcagatgtatagaaagactgctgaaattatcatgtgtggacttttacctgattcaccaacatctacatccagcagaacacaaagtaaggctctttacatgttgataaataagaagattgaagtaaatgatttaaagggaaattgctaatttttgtttttggatgaagatggtttaatttgggtgatagagtggcattctctacaacactccatggcttctgcatttctagctgtgctttacagtgactacatgctcacatcccaaaccgaaatgctttactgcgatggcaaatcgttcaagccagaagatcttcggaaattcgccatgtcacaggtgcatcatatgtttatcattgattcattttaagatgaaatctcataattttaaggcaattggtggtaaaactccttaagttttaaaatttatacttatctccctgatttttttttgtgccaatactcttttaactttatttttatttgcaaatttaaaccgtcggttaaattccacatgtatacatgtgacattaaaacttcaaagcaattaaaaatatatcatgtatacacaaacgtacacggtgacaattaccacaaaaataaaaagattaaagagttaattgtataatgtaaaaagattcgcgaccaattaccctaatagtaaattaactgatccacaaaaaaaaaattaaaagaagaaaattgtgtgtaacaatattgaacaattcaaaataaaatctaatccaaattttttctaaaaactggtttgttgcaatattattttttcaggtggattatgtgttggggaaaaatcccatggagatgagctatgttgttggatatggtagtaactttcctcaatatgttcaccacagaggatcttcaattccagttgatgcagaaactggttgtaaggatgggtttaaatggctatactcaccaaaacccaatccaaatgaagctattggtgcacttgttggtggaccttttttcaatgacacatataatgatgttaggaacaattcaatgcaaactgaaccaagtacttacaacaatgctctctttgtggctcttctctctggtttggttaccacttcttctgtggttcaatctttttcatagattaacttttttctgttttttgttttaactgtaaatatgtactattgaacataacattacattacattacaacctatacgttgtgaataatcacacttcaagaatttattagtttaaacaaaaatagtggcaattaaagaaaccagaaattaactaataaaacagaaccattctatgacagagtgttgtagcatcataaaacaaaaaacaaccaatttaacgatagtctatctcaagtgattactactaggatttaatccccgggatgaaccatcttgtgataaatctttatttagaaatgttgctcagagttacactaatgattctcaaaggcttagccttttagcatatcttcataagtcttgttttggaagaccaatccataaaaaaaaattagtgttgtatacattatgatcaatatatttactctataagattgtatttatatccaatatcttttttgttttctctccaaaatccagctttagccacagttgggtgggggtccctacctttgaaaacaccaacattctcgctagaaattgtagcactcttagctagactatcagctacactattagcaatgaaaactaaattatatcgaagatgaatattaaaataagtgataaattgacaaaattatcctcactttatttattaaatttatataaagagaggtattagaatcattttagctttactctatttagtcatttgtaatgtaatcctcattacataagttttttcacgtaacggaaattcccttaatgtagtcttcattacattgtaattctattatatcacttttaaaagcaaactgaacattgtaatgataatcataatcccattatgcttaccattacaacaa

SEQ ID NO: 18319 - DNA, 3534 bp, Cannabis sativa
tgagaagccagaagttcgtgatgccgcaagggaagctgcgcttcggtgcgtgttctgatcttttgagctaattttttactttctaatattcccattttgtacatattataattgcaagttcatcaaaaaaataaaaaatttaaaagcaaggattgaatctcccttttcatagttccatttttttaagaacttgaagtttgttgtttcaatcaagttcttgccaattaaaatctatcaaaacagccatattttcatatctctaaatctcatcttatataacaattataaactgttactacatttctctagtgcattattcttatcacacaaggttcttgttaggctgtgtaaatagaatagatttgatcaaaagatttaagtttcgttctatttttttatttggttgttatctaacacgttagcatagtcattctgaataattaattattctatctaaaaatgagataagactattctcatcaaggagtgcttactgaatcttttcatattttctgccttgtgctgtttagtgagatcaaggaaagaatcaagaaaaccaaagatgaaaagaaagccaagaaggctgaagtagtggccaagtcacagaagggcaagggtaacgtttcgaagggagccgcaccgaagggtccaaagcttggtggtggtggtgggaagcgctgaacatttgtaactgcctcatcgtctattcattacaactcttatgtactagataggtgatattttgtagtttcacgtcaaaaatggtttgtaaggatttgataggccttcttttgtaggttggccaaagagattttgtttttgtggttttttagttttggaattttttgtacttttgttatcttatttccaggatatgcgagatgagtacatttatatttcttggcccttgatgaagaggctgcaattaccatcaccatcccatataaaaggtggcttttatgtttaaagttgtttttagtgactagttccattcctagtgctgacaatgtcaccaatttcaatttacccatccttgcttagttttacttgtacaacagcttgttgaatagtaatattgcagtaatgaatgctcaggccccaactactggtaggataggagaggatctagagtatgaagacctttttaggtggtttggtgtgtcagaactttaagttattagttaaatccatgcaaaaggacaaaagggttgaaatttaactgaaaagatcactgaagatggagaaaataaggggaaaaataaacagtcagtcagcatgaccagtaaattattatcaatcccaatgaaaatggtgcatgtttttggatacccgaacaataataatttcatagtgagaaaaagcattgccatgttggccaaacgcctggaaaatgttccatcaatctgcagtgaaaactagcttttcgtcattgaaattctggactgaggcaacagttgcaggcttgttcttttttttttaggggtgattttttgtttttgtttttgattatatcaattcaaacataaaaaacacatacctggtctttaccctaaagttgaagaaaacgttcaaaataagacacccagaaacgtaagtttgaaaattgctacaatggcatcatccagcacaaaaaaagaaaaagaaagaaaaaaaaaagaactttacatcggttctctgactcaccagacaggttaagaaattgataattaagcaattaaaaagttaaactagaggtactaaagttttgagtatttttttttattattattatttattttttgatgtaaaccatggccaaaaactggtctcttgggtgaatatgttataggaaggggactgctacaagctcttgtttggtacaaatgtacatgcataaacgctacataagataaagggattgatgaagttttgacaccaaagcaatgaaagtgtgtaaaaaaaagttggataggtatcctagaattggagttaggcaaactaggatatagaaaatcaaacgtgtcttagcatagcataaacttatatatagatcaccctaataattggtatataattggtatgtgacttaaaaagatctcaatcattaaaataaatataaataaatgaatatgaagaaatcgactatgttgtttcaaagctgaaaatctgcttatctattttctttttttactttattttgcaggttggttttctcaactccaaatttcaaataaaatagttgacaggttaaagaatgtacacttttaagaattaatttttttgattcactcgttaaagtttttcagaaaaaatattattatagtctctgttttgggaatttgaaaatatgaatgactggaacatgatctacaattatgaaatcttgaccaaccagacatggttgtttaggatcttaacgacatgcttaactccttttactcattgattgacagtttgtcctgttattggcaacatgtattccatgtgtccttagtcttgactatgtggacatgccacgtcaagggaacaaaatttaggataatagtcacaatctgatttaaaagactttttacactaagaaaagtgaacatatttttgaaattactaaatgcaaatacataaccaatttcgaaactatcataaatactatttttgtctattttatcaattattccaataaagaattttacaataactgtgagagtattcttgttttatctatattaacaagtggtcctattttattacaattatactctatttattctaataggtatttcattatttaaaaattttattttatataattttataatataaattaaaagaccatttgtaagtattatttctcaacaaggatcaaagtatgacctttgaccattcaacttgtggatatcacatatctatcaacagttagggctcaatcatgacatataagatacatgtgctatttcttttatgaccaattagttttgagatgtaatcttatgcatcttataattttagcatggtattagagctaaaaccaaaaaatatttaatttcaatctaattttatcacgtttgtgtactttctttattacttaatgtttattgtctataatgtatgcatctatacatatgtatatatttgtttgggaaaatagtatatattaatactatgcatatatacatgaccgactagagggtatggtagccgaaacctaggtctcatgctccacagttttagagattccaaaaaaattaatattaatgtaaatatatataaatatatacataaggaaacattaatatattaatatttaatttaactaattacataaaaaaaataaatagcacaaatagttagcacaatttatcaatgatggtgaggttaagggttcaatccatgccctttcataatatatatttgtttatagtagcattgacttgtaaatacaccactacaaaaactactattatcgagggtcttaaaactactttttctacgggaccgttgcaaaaaaaaaaaaataaaataaaatagagtgagtgtttaaaaccgttaggaaaaatt

SEQ ID NO: 18320 - DNA, 3199 bp, Cannabis sativa
gggtctttttgtacttgtccctacttacttagaagaaatcctcacttcaaaatatatatatctggtattttgtgcaaattttttgaatgaatacaaaacttgacactcttgtgtttattttgatgaaaagaatctgagttaaggattgaaaataacatatttttgtatcactggtgatctcattaatggctaactcgattttggttggttgaatacagagtaacatggttcaggtttccatgatatcagaatatgacatgggagcagaaggtgatctattcaaagctccagaaccaattatagaagaagcagccatgggacttgatccagtgacagcagcagctatttcaatggtatcttgtggagaagatgtcatatcacggcaagcactcaaggttgcagacattgaatcatttcaaaaggagcagcttttgagtgaggtcttgtatgagtgtgaaaaggatctgttagaacaagcagccatggatatgccactgtctgaagtcctggatattaagattccttctctaaggatagacgaaaacttcatccaagaaaacaaactgttttcagattcatcattccagaaaagcatcagctcagaatgtttaagctcaatggagtggatgcaaggacctgtgactaagccaaatttccttgatttcccaggaatggatctcggtgctgctgcttatggaatgcgccgtgcatttagtgaaggagacattaaggtcagactctattgttcatatagttttttacaatatgaaattgtgttgtatttgaggtttaaggtagttagaaaagaatagaatagaatagaaattatgtagttcatttgaaaacccgatgtgggattggccggaaagcgctatgcaaattgaaattgagtgagtgtggcaattgttgaattgggtaactaaagttaggaactgagaagtgtttagatgtttctggtcatttccacaggatggggctggatcattgattctgagtttttatgacagactcttggcaatggtaacataagcctcatccattctccccagcagccgatgatcatcagcaaaagcatctcggaggaacgcaaggaaaagctttcgagatacaggaataagaagacaaagaggaactttggcaggaaaatcaaggtcactaccaatcattcatttatggattataaataaaaactctttacatattaacaacaccatgaaactgactactactttttattacagtatgcttgcaggaaggctcttgctgacaaccaaccaaggattcgaggaaggtttgcgaaaaccgaagaatctgatggaaagaggcaataactttgatttttacataataagattgagaatcatcttaggaataaagtagctaggtaggtcctggtcctgtgatgtttctcaataaaccccctcatgatcatcctcctccaaaattctgcatagtagtagatatgttttattgctgtaataacctcctctgttgaccaactttggccttgtagagttgtaaatagggtataattaataatatgctaaataaaaaggggagaccaaaacaaagctgtacttgttcatataatatgttatgaaatgtaatatgttgagttttttttcctactactaaatcacttttgaaaaaaataaaattaaatgttatttaggatattttttctcttgaaatttgacacgtattaaatcatgttttttgaatttttttaactgttaaaagttttctctgaattattaaaattgttggatttaatgatttttttttaattttatttaattttactaatttagtgattgttttgtattaaattatgctcttgaaattttaatatttattaaattatgtacttcaaatattgacatgtactaaattatgcttctaaattttgattcatattaaatttttttattaaaattgaataaaaaattttaaattcaacaatctcgataatttaagagaatttttaacggttaaaaagactaaaaaaatataatttagtatatattaaagttcgagatggaaaaaaaaagttgaagtagagtagtaaaactccatgtccatacctccaattaatattattatgcttcaagtttcaacctctgccaagaatattctttgctttgttgatttggtgttatttattggggttgtttgatccaaacttggaaggagagccttgtaaccaaacaagagccccaaacacatgtcatatattaattaaggagaattttagtgtcactccataaaagtgaaaatacacctcattaaattttttcttttatataaagtaaaattttctttaacctactcactttttttcttttcttttttcacattcttcaaaagtaaaaatataattaaaatatattttaagtataaggaaaagaattaaataaaaaaaaatataaacattattaaagtaaaaataaatatacagttttttgaaagagacactaatccaatttttgaaacagtcagtatatagattcaaagttatgatacttgatattactataggtaaaaagctagttattattattagaattccaataattacatattcaatttaatttatagatgaatacgcaagtgtgttatgcttgtttgagtaataagcataagattccccaatgaatagttagaatttttttaaaaatatattattcatttaataagaaataaaaaagaatattgaaaattcaagtagttgaagcttagactccaatttaattaggcatgtaagttaaaattagatagtttatatatactttttggtaagttacaaaaggtagagcctagaaaatgatggggtcatccatagatgaattatttggttaccatgcattgagatgcattacaattggatttttgtgcatacaagagtatgtcatcgatcaaccaaccatgtcagaagttgttttgatgttgagtaatgaaacaaagcttcctaatccaaaacaacctgcatttgtatttaagagaagttcaacttcaaatatgtacattttacatatataacaatttcttaatcgtaatctgcttgtgctaagtaactttatgttgccaaccaatttagtttcaaaatttctagttggcaggcgattgaatttgtacaaaaaaattaagctatagtgtcactccaccaatctggaagaataatacgcctaatcttaccatg

SEQ ID NO: 18321 - DNA, 1906 bp, Cannabis sativa
gggcataaaacccaacagggctatcattgaaactaaaatgagaggctctaaaattagtgatactatgtccaataaattcattggttagaacttttattctagtccaatcattgaagggaggattttagttatttggaagaaggagtttgtttaggttaagattttagaagaggcaactcagtttattcatattcaagtcaagatggtctgtcacaaaactgagttcttagctacttttgtttatggtgctaatgttggagaagataggaagagtttgtggaatagcttggcaaatctctctattatctccaaaccttggataataatgggagattttaatgctgtaatggattttagagataggagtggggggaatcggattacaagagctgaaattgaagatgcaaataattggttagccttgggtttggcagatgctctaaggaaaataggttctcacttcacctggaccaataatcaagggggggagatagaatatactccaaaattgatcatgtttttaagaatgaagaataattagatttgtttcccaattattttgttaatatgaattgtgagacttcatctgatcattgctcttgtatagttgcttctacaattactcaagacattggagttaaaccttttagattctataatcactggattgagcatgataattttgtaaaggtggttttggaaagttggggtaaggcgattaaagctgttgggttacaagccattcatctaaagtgtctttggctgaaacatgttcttcgaaaattcaataaggcagtgggagatgtacagatcacctaccagcaggctaaagagaactacttaagtttgagattacaaactcaagctgatcctgggaatctttctttgttggaggctgaaagggcagcatctgaagagtttagtgaaagagacaaaaagctggatagctttcttaagcaaagaagtaaggtcaattggttgcaaaaggatgatgagaatacttcttacttttatgcttgcattaaaaaaaaaagagaagaaaaccggatagcttactttaagaatcagaatggagaggttgttgatgattattctgaagttgttaagcattttgtggatcatttcaccagctttatggggagtgctagaccagtagttcagccttcttttagatgccttgactatggtaaaaagcttacctttgaccagcagctatctttaattcgtcctttttctaagaaggagatcaagaaagctatgttcagtattccaagcttaaaattgccaggacctgatgggtttagctcggagttttacaagagaatgtggcctgccttaggagatgaatttttttcagccatacagaatttctttaacactggaagcatcccagcagccatgaatgaaacaactatctccttgatcccaaaaactgatgccccctctagtggagtcgactatagaccgattgcttgttgtactactatgtacaaatgcatctcaaagttgttgtgtactagacttgttgaggtgttactgggcttggttaaccggcaagaaccaaggagccttcattcaacagcgatcgatagctcataatatcctaatttttcaggatcttatcaagaattacaatagaaagaatgtttctccgaggtgtgctttaaagattgatttgagtaaagcctatgacacggtggactggaattttttgaaaaactggctgattattcttagattcccagatacatttgtgaaatggattatgacatgcttgaaaggaacatcttacaatctaatgatgaatggtagacttcaaggcagattccaaggtaagaaaggtctcaggcaaggtgatccgatttcgcctctgttgtttgtgttggttatggaattccttacaaga

SEQ ID NO: 18322 - DNA, 3557 bp, Cannabis sativa
ggtagagtaaattaagtaaggttattttgcaaatttgtatttcacattgttagtttggcaaatttcacatttggataaactccaactaaatttacacttgcaagtaatcacattcacattagagatcaaaaggtataaaaccaaattgacgtatgttacattagggatttatctatgtaagtgtatttacttgatttgacatgattttcattttctatgtagtgatagtattttgcagcagaatgcattgacaatattagattttggagatgctttgataccttaataatagtttgttgtctttctttctttttttcttatttttttacttgaagagttgcgaaatgatcacaaggagattactgaaaagataaacagaaatatagaagttatgcattctgcaaggcttgctccaaaagcttcgtccgccaaagaatcgggtatggctgaatttctcgagattttttctggttctatttagagaattatccaatggaagaaatgctgctaatgtgctaccatgcaagaaaataggaaataaatatgtaacttatgattatgactggagttcacattttacagtatctacagtaatcatttcaaagcatttttcaaaaaaagaaaatttcaaagcatattgctgtgtcataacatgacatgacttggcttgtgttttcttttgccctttttaaaccaaatttatttattttattttattttgataaaataagaaaaataactttgttgctaatggtgtttgattgttttcttattgggtaatgtcaaatattgtctcaccttaaaacaccacggttgaagcattacatatgcagaatgacaagtatagatgggtttgcttaatttgctcttttttttaataacttcatattctaatattttttaatggatgtggataaggagcttaatgactacatttttatctagtaggtttcgatgaggggtcagataacaacacctccttgactcccaatgatgttacatcaacacccacaagctcgtctaatgccatggatgtggatatgacagttaggataccctttgcaatggttgatgaaatagctgatgcatctccagcagcagaagatggtttacaacttggagatcagattatgaagtttgggaatgtggaagctggtgataatttgctgcagcgacttgcttcagaagctcagagcaatcaggaccgtgcagttcctgttgtccttatgaggcatggtgctgtcatcaacacgacagtgacaccacgaacatggcaaggccgtggtttacttgggtatgcttttctattattttttccttacgttaagagtaatattctttgcaagtattggtctgcagtctggttttttttttcatggagatgtattgtccttttgttttttaacacacacattgaaccattacttagattttattgttagtgctgctttttctttaccaattcttttctttgcacaacaaaactaacctgtagtccactctcatatactctaaacagaaaatttactgtattttactaattgtttggttaattgatgcttgcagatgccatttccggatattgtaatgggttatgcttttcattttcatgagctggcagatgcattatagtttgttttgtttttatcaagtttctagacaacctcaaatgctgatatggactttccagattctttctctctcttcctttgcatctaatgttggtatgtgatagtatataacttattttggcaatcttgtaaagatttgcatatcataaccccaatatttgatacaatttctttttcatgaaatgcaagtgaaccattgtggggtactagtttctcttttttggcttttattgtgttgtttaattttgttgtgcaatcattggatattgtatgctgtgtgctctctattttatgcagtgtgctcctgtggctgtgttttactttcaaatgctgagttcatttgatttgttgaatactaaaaagtacgatatttgtaatctaaagtggggtcactagttaggaatccatcactgtgaattgtgctttttacctctcaattactttcttttaacgaatacagtttaattcctgagaacttctttttcagcccaaaaggaaaactctcttgacatattcgattttgtgatcaaatgacttttgacttttgaagcttatattagttatatatgtattatattgtcatgtagtagtgttgttatacttgtaatgactaactttgttggtagatcaatggccaattctcataatcaccaacaaaaaaggctttttaacatgcctcaaataaaatacacaataaagcttagtttataacctttggcttccattcttttttcatttgctatatcccccaattattgttattattattattattattatttcttctttggttaacctggtccccattattaatgtgagcattgattactaaatatttgttggtagacagataacatatcctcactctatagctacacacctacaatgatgaatgtataatctttgtggtcactctatacacttatcctgaaaatatatcacaaggttatgaccttttttttaaccttactatttctctactaaatgtagcaaagtaaatcagtttcacttcttcaggtgggtttgtttttttttttttcacttttcagtagtataactttgaactgagataaaatagctgttatattcacaaggacatacagtatgatcttgatgtgtagtagattacactattctcaaacaatctcttgtacactttgatatcatacaaagttacttgagaaagaaaataataacaataatgtaaagtcataatgtttttatgggggttatcccttgtcatgatttgaacttgtgtaaagggtttttaatttcatttcttctcttaacattttcatctcattcatactttatagcttggcatgttgttcattgaaggaatattagatttttacacttttggaattgttgcattgagaagcaacaattgctttacttattagttttacattaatgaccaattgcttcacttattatagagccaaatatagactataataataataatgatagtaaagttgtttgcaacagaatgattatatttatatgcacaaaaaataaagtttctggtagaaattggaaaaagaccaatagtaacaggccagcagtctctttcatccaagatcaacagtgaaatctctctttcctcaccttactgttctaaacagtaattacacaatagagagaataatatttatgtatttcttttactctgcaactttatctttttgtagtcttttgtttcatcacttttatgttgtaccactaatcttaggtttagtcaatcaaaaccaaagtttgacaggtttgctattttttataatcaatatgaaccaatattatcatcttaaattataattaagatctttgtccccagaactttgacatatattaaattatgctctctgaacttttaaggttgttaaaaatgtcctttgaactattgagattgtttgttggatttaa

SEQ ID NO: 18323 - DNA, 4391 bp, Cannabis sativa
catacgaaattagagaaaaattctaagctttttatcctgtatatatagctcaatcctaggcatagacaggttaggcctgtgtctaaggcccatctagtccagtaactcaaaaaaatattttcccattttaaaattacacatattttttttactaattttgaaaaatatcacttctttatttctatataagatctcaattttttttttaaatgacctactgaattggaaattatacatatatatatatatatatatatatgtgtgtgtatggtccatgttcattactagtttgtagctgtgctattaagctttgattgtgaaccatgcaatgcatataaacgctatcatatgtctctctttcatacttttcaataacatatattatataatgatgattttttattttgtcccataaacacattatttcgttattaattatatcagaatttttgtatttcaatctcacaatgtattaaaattaatattattgaaaactaatagtttattattaaaaaaaatcatcaacgatttattaacagaaatagtcttattgaataaaacctaatttgatacactaaggaaaactcatttaatcacacaacattttttttaataattttattgtcactaaaaatacatttaattacactaaattataacttttgtgagtaaagtttagctacaaattttttcatttcaaatacaacttatttttccggcataatatatataggatcgactgataacataaataaattaagtttgtgcctaaaactccaaaagaaggagcttaagctctagaaaaatacaatatttttcaaaacaaaatacctataaatttatagaaattgtgtttttatttactatagtagaaagatattatgaaactagatattttttaatactatctagcaaaataaataattttgtatggtaacctttttataaagtaatcttatcttctccatatagagaatcaatataaatatatttatgtatccaaatatttatttatttatataaattgttcctttccaattaattgtgaggagggcaccaactttttctttaacaatcttcttgtatattattttatatttttgttcaattatgtcactagctcaactacataattaatggctcgtaggctccaaaagatgacaaagttagatctaaacacaaaaccacattttcttccactaaattccaaccttaaaaatttgttacattaaaagtgtaaaaaatttgtgatattagcctttgttttcaatagaaacgtttgccattttgattagttgtcctttttattacaatcacaaatttgccattttaattgtgtagtacggattatgtatcgagtctcacatgttttaaattaatagttatttcaaaaaaatcactaatcattcatgaaacaccaccatgtggtaatctatgttacaatttcttttgcatgctctcaaatgaatgaatgaatgacatttataatatgaaataattgtataatatatatttacgtagagaaatattactattgatttctagcactctcctacttgttaatactactattagtacaattgagtatcggatattatataatttagtgtaataactattaaggagtactgctaaccaattataaagtgacacgtatagaaagtgttaggcactattggtgcctaataacaatatcactcatttactgcattgaagaagaagaatgtgaaaaagggtgcaataggaacattgctatttgcactttaaggtgtctaatactatactaatgtatcactttataattgagcatcagttttttatatgatttattaaattaaaattgtagaactccatattagaatgcaccaataatagtatgtttattagcactataatgatgcttaattaaaaaacagtcttattatcaatttgtgtgtcataataacatattcaagtgtaaaacatattataagtatttctgacttaagaattattagttttcctagaaataagaaaaaaaaaatcaagaagcaaatatgaaaagagatccacagctaataataagcaatataatttgacaaattgagaaagatataaaatatatatagagatacatacaaagtagttgggaaattaaactcaataaatgaagaaaagattaacactattgagaaaaaggcttaaaaggtccctttcatgatctcatttgctgtcctaatttaagtgcaaataacagttagcctcctaaacagattttctagagctcaaatatatcactatatataccactaaaagaaccctattcagctcatatcaaattgaaattcatataggatttcaaaggctaaaaattgtactaaaaaattttaggatccaaaatgaggatcctatcacttttccaaggggtcattcttggcctcttactatgcctatttgctgtgagcttcactcatgtgtcttcaggtaattaacatttaattatgtaacataattttcttactagtgtagtatatgttgtttaagttacttgagcaaaatcaatgtaaattatgtaattattaatttgtttgtggtttttttggtatgtgatacaacagaggctacaggaatcacagaggaaaagacattccttccaccacacaaaccatatttcaagaaatttcatgattactttcatcattatccgaaacccatgtataaaccgaaacctcaccccgttccagtttacattcctaaacctcatcctgttccagtttacattcctaaacctcatcctgttccagtttacatccctaaacctcatcctgttccagtttacattcctaaacctcaccctattcccgttccaatttacaaacctaaacctcacccagttccagttccagtctacaagcctaaacctcacccaattcctgttccagtttacaagcctaaacctcatccagttcccatttacaagccagagccaaaaccagaaccaaaacctgagcctaagccagagccaaagcccgagcctaagcccgagccaaaaccagaaccaaagcccgagccaaagccagagccaaaaccaaagtgcgagcctaagccaaaaccaaagcctgagcctaagccagaaccaaagcctgagcctaagccagaaccaaaacctgagcctaagccagaaccgaagccagaaccaaaacctgagcctaagccagaaccaaaacctgagccgatgccagaaccaacaccaacagttccaatttacaagccgcatcctcatccgatttttaagaagccgaaataccatcatccactagccccatactttcatcatccaaagaagccatgccctccattggcaccttaggtagactatgataatgttccttttctttgttggcatggtagtattattgcaataaaggctttaaatggttgaaaaggaagtttataatgacaagtgagaggataaaatatcacaagatcattacttgttacttgttaggtaaggttgagtttgagattgagtgttgtaagcatttgtagttatatattatgcatgtgaaatttaatttatggttgtatgtacttgttattttagattcatttgtcatcaatatggcaatctgtactgttatgatcattgcaatcatacacattgagaatttcaatttatttatgttcacaattcaaattctcaacaaatatatatataaatatatatatatatttatatatgtgcattaatgtttttctttttttcgaaaatatttacagttctgcaacccaagaattatatgagagcaatatattccctgagtgaaaagaagaagaaaataataatataatgactatatatatgaaagaaattaaaatcagtgaaatattgatagacaatgaaattagggtataattaaaaaagaaagagagaaaatataaaggttgaaaaagaaaatgtctcatatgttgttgactggtaagacaagaaaacacaaaattaattatttgtaagtgctcatgaagccaccaaaattttacaccataaaaattatattaacgtaaatatttaagtgtaatttttgattttgaataaatatttaagtttaatttttaacgataataatactaaaattatattcttaaaacatccgtaagtatttagctgttaaatgtcaatttattatccacatgttattttcttcttagtatatttaaattaattttcaaataaaaaataaaaatttaatgaattgaacaaatcagtgactgtcacgtgaccactgaccattgacatgacatttaacagttaggtacttacggaagttctaaaaatataacttgagtattataaccgtcaataattaaacttaaatatgtatctatatccggaagttaaatttaaatattta

SEQ ID NO: 18324 - DNA, 3205 bp, Cannabis sativa
ttaaattgtaaaaaagccataagttaagtaaatctctaatttttccatatctatgaaatttaaggaaaaaatgccatattctacgtaatttccttttttataaattcttcctaagaaaataaaaaaggaaaatgttacttcgtttgagaaattgtattgtaggtttcataccggccttataataaaaggtgttgataatttgtaaagaagagtttgaagtaatacaatgagctgaatctcttattgtcaatattaatctctgtgtgatctggatctatatttggatgttatattatattagtactgaaatttttttgattaatccgatcatctatctagctaacaactggtaattatatatgatgagaataagatcagtcaatttggtatttcttttgtatgaagatttaggcgtttgggatatatagtactgattcttagtgcttcagcgtgtgcattgagaaagaacatattaattaaacaacttctagaagaaaaaaatgcacaatactgatcagtatatatcactagtacgtatggtacaaaagagaaatttacgtaatttttctaccggcaggtctttttgtagttgatataagaagatttcaaacccacaatttaaattaatatataaatcatcacgtaatagctctggcactgctatagagctatagtgtatatatatgctcacaacaataacatatattcttttgaaccatcttagcaaaaaagaaatacatatatatatatatatataggcgtaagcatatacatgaaataataattaagtctggaagtaaatatatccttaaaaatctgaaacagataattccacataccgagagatgtgcatcagaaaaactagctgaacaatattattatggcacactttccgaagccatctccgcctccataacttaattttttctaaaacgcccatatgaaagaaatagataaataaataaataaatgactaatattttttaagataaaaaaatgactaatatgataggaaatgttaaaaactcacccgtgttgcttaaattctcacatgtaatttagtaataaatttttgagaaatcacaccacacctagttgatttaggcacactgatcgccaatagtactgctaaaaacaatatctgaaaaaatgtataattaattcaaaaaccacaatgaaaaaaaataagaaacataatcaaaataattaagcagcgaaatatatatagtatatattttctgtatgtatatgggattcccaggaattaaagaaagaaacaaaccctaatagagggaagaaaggtaagaggcaaggtgatgagattaaggattttaatagggttattttgtatcatgcttcccatcaacagatgaaactgccacatgatctactctgttcttaattaattattaatttgtagcaaagggtagatcatgctggcagcttcaacagttggaggtgcatgagatcataagatgaggccgcgcactagtactcttttagatcacactagatttcttctttctgctctccttgttgaaattctttctttctctatactcttctaagttatcgcatataagaaagaattggatgatataaatagagagagatatgtttttttttattattattatattttgagagagagcgagatgtattaaattaaataatatttatttattttttgtcataggctaataagatgacttctatatttttttttatatttatttatatatttttttatattcatttattgagcattgttattgggcccagtagtgcttagtacccttaacacatgttgccgggtagcgatactttctaaaaattattatattaaattatatgggatccgatactaaattacaccaatagcgatattgacacgtacctttttatcataggctaataagatgacttctatttttcttcataacactttttcatattccaatatatagagtgtggataataaatatataattaaataataagacatggtataagattagttgatgggcttaaacgtattggccaaaattggcggaaaataaagaactatctaattaagaaaactaccattgacacgttgtgtcctttcatccattgaataattgtgctaatataaattgaaattagtgatctatcaaaagaaaaatttgaaattagtgatcgcattttcatttccgttcacaattattgacataattgttcaaatttgattgtgctaattattgaataattgtgataatttaatttctatttatatgagaaatgttaaaagatactcatgattcttagcactattattaagtgtaatattgttattgataaattcaatttattttattttaataaaagttataaaaaatcaatatctatttataagacattatctatagtagtgctagacattttagtgactcctagcaataccccatatataatcaacaacttttattattaagattattgagtgagtgactttgtgaaaaagaaaaggtattgagtgactttaattaattaaattcgtataattacgaattattaatgaaattaattttaattatgaaattgataaattaatatggatcatagttgtgtactgtacatttgttaggtggaaattattacatttcataattgatgttgcattaattatcatatgtttatgaataaaattacatgtgtttgatgatgtatgtactaatattatgtcagaaattctttacaaaaattaattaaatatagtctacatctaaaagtcgtgatcatagacatgtagtatagtgatattgcactatttaattaagaaaatagtactcttaaatttgaatctttctcccaaaattaatctaaaaagaaaagtcacaagatgtgtacatctaaaattaattatttatgaatgtaggaagatatattgtatccaatttcaggacccatatattttcggtgtagtttcacctatatacagttttatttttaaattattttgtaagtattgtatgagactcagagtatgaatacatccaatatcgatgtagtaaatgaaaattgaaaattatatataagaggaattaaagatgggataggagtggtcccaaagaaaggcgttagtcacggccacgccatcacatgcagaaagcttattactgtgagtgtgagagagtgtatttccttcttcttctctctctctctc

SEQ ID NO: 18325 - DNA, 2727 bp, Cannabis sativa
atttcggtatttgtgctgacgtggcatatcggtatttgtgcaaataattttattgaaggtatttttgtaaataaaatcaattttaagtataataatgaaaaaaaccctaatttttattacttattagtaaacatgtcagacatatcaatgccacaatgtacatagatgtatacgtaacaaatttttataatattaattatttaaatattattaaaaaaattgaaaaaataataaatttaaattctaaaataagttaattcttttttttcgttctttttcttaattttctttctctttttcttcttttttattctttctttttcttcctcaggccacaaatctcctttcttcttcgtggcccttttctcgcccaaaccaccaatccccttttcttctcccacggtctacagcctcctttccccggagacagtcactatgggttgtgcattatggattacagtctgagtctctccattataggctacacctaatcgaagctcaatgatcctccaccagtggcattgtgtcgagatcgatgtaaatacctagacgaaactctctgctataacaacgacttcgttgaagctcacgtcgcttaccttttcttcttctttatctctggcggccatggcttcttcttccctagtgtataaatcaaactcgggctctattcgtccaaatttgttatccttctttctctctctatatctatcttttatatttttcttttaatttatttttactttggatttgatctgattgttatggtgattgtggtattggatttggatatttgacttttgtgttatattttttttatttttataatcaagttttgtaaatgagaaagtgttgtggtaatagatttggatatttgatctggaataattaggttttgtgcttatgatgatggttgttgtgttgagttattccaaatctgattgcaggtaatttttttgtctggtttgaggattattgtgtctataaattttgagtattttttaatttggtatgagaattaatgtgttcataaaagtttggtagcggtggtggttttttcaaatttttctaagattaaattagtaccatgcgcggttccaccagcaaagacaccggacaagatgggtccttctgaactagaagaactcaagaagcaattaaatgggatggtggaatctagatacatggtgccctctaaagctccatatggtgtcccagtattattttaaaggaaatcagatgggtcaatgcggatgtgcgtggattatcaagctttgaataaagtcacggtaaagaacaagtacctggtgccaagtgcagcatatttgttcgatagactgaccaaagcatcatatttcaccaagttggacctctgggcggcatactggcaagttcgaattgtggtgggagacgaagcgaagacaacctatgtgactatatatgggtctttcaagttctgagtgatgccttttcgattgactaatgcccatacggcattttgaaatctgatgaatgaggtgctatacgaattcttggatcgattcattgtagtatatctggatgacattgtgacttataacacctcattggaggaatacttgcagcacctaagaaaggtgctgacgaagttgagggaagaaaaactgtacataaaaaaggaaaaattcgtgttatgtaagaaagaagtaaaattcattggtcattgggttggccgagggaatctggtaatggatgaaggaaaaatcaaggcaatcatggattggccttttcccacaaaagtagcgaagctgcgttcatttttgggattggctaattattatcgaaatttcattaaggggtactcaaagaaggtgagtgatctaactgatctccttgaaaaggatcatagatggcactggtctgaagaatgcaatgaagcatttgagaagtttcctgactttaatcttccatttgaagtgcaaacagatgcatctgaacatgcattaggtggagtactggtatagaatagtcatctgatagctttcgagagtcggaagttaaaagatgttgaacaaaggtattctacccacgagaaggagatggcttcggtagtgcattgtttggatgagtggagacattatcttctagggaaaaaattaacggtgatgacggacaatgtggccaacacttactttaaatctctggagaagttaaccccaaagcaagctcgttggcaagagtatttggcagagtttgattttgtgtgggtgcatagaacgggaagaaaaattaagttgttgatgcactaagtagaaaagaagtacacgcttttgtttatgcgtcgtctcaggtgagttcaactttcatcgaccgggtgagggagcaatcactgctcgatcccggatacaaaaagcttttagaggaagcaagaaatggtgaactgatgtggtactgggaagaggatgatcttctctatgctaagggtggcaaattatttgtaccaaatagtgatggtttacaaaggcaatttcttaaagaaacccacgatactcagtgggatggtcctcgggtgtggctaggatgctggctttattattgaagtcttatttttggccgaaaatggagcaggacatagaggtatacgtgaagacctgtcttgtgtgccaacaagacaagaccaaaagtgttgggttttgtgccctaaataaaacccattacaatcttattagttatcaatctaagaaattt

SEQ ID NO: 18326 - DNA, 4627 bp, Cannabis sativa
ttggagtggtgaatatagaacttttttcttacgatgtctcaaagataagagtatttattttcaacatctttgtccaggaactcatgagtagtaagtggtgctgtagtaggtagagttgaaagaccactaactacaatgttaatatatgtgataaaggaaaagacattataaaagtagttgtagaaagggatgactgctacctgaggaggccataattgcaagataaaattccttttgaaagaccacatttcgagctatatccattcaaccatttttgttttcacaaaaatagcctttgtgattaaatgactaccctagaaagatatattattgaaatttgaagtccatattgaaagaattgtagaactttaagtgagaaaaacaagcacacccacgtggtttaagaatgttatagtcaaagatagaatgaaagaaagtctcgtgacatgttgtttaagactctcgtgggaggtctattaatggtagatacaacacaactaaaggcatgcaaccaatatgagaaatttaatccaaattgagcaagcaaagtgatgatagtttgagtaatgtgcctatgagaaatttaatccaaattgagcatgcaaagtgaggatagtttcagcaccaccaaatccacctacacaactacccactcaccctgcaccaacagcaaatcactctacaccaataccaaacccgcctacatcatcccttcatcacccaaatcaacataaaccagattaacttgacccaccaaatcaccatatacaccaccaacacgttacaagaaatgtcacttttaccagcaattcgttactgcgctgggaaaaaggttaaaattttaccagcgacatttgcaatggctaaaatctaacttttaccagtgcattaacacgctgagaaaagtcaattttgtcagcgcttttcattttgtgctggcaaaagttataataccaacgttgatttgccaacacatcagaaataaattctattttactaccacaataccaaacttttgccaacacaacaatgtgctggcaaaagtgacatttcttgtagtgacaccactactagactaatctgccacactgctaggccaccctatccccaattagtaatctaccatatctactctctctttacctatacctggtgcttcttcatttctcccagctatttcccagtaattatattacgcccatactagaaactgatccccaccttccaccaataggtgatgttctatgtgatgttccaatgacatcatattctcaaatactaatagagcatacttcatttcttgtggaaatacaaaaaactgttgacattccatccaaagttcatcctatgaggacaagatcttaaagtggaattcgtaaaccaaaggcatatttagcaaccaaacattctttgcctgagccactttcactctctgaatccaatctctcaaaaggctctgctctttaagatcttaaatggcatgcctccaaacaacaagagtttaatgctctaatgaaacaacacatctggaatcttatttaatttcataacaacatgcatgttattgggaataaatgggtgcgtagggtgaaagtcaagcctgatgactctctaaacaagtttgaatcgatatttgtaaagttaatcctgatggttatcaaaacaagtttaaatctatatttgtaccttaggggtatctttaaactccagggattgattatgagaacacatttagtctagttgttaagctagctacaagtcaaattttcatttgattaattgtcactttcaattggacagtaagctaattggatgttaatgcattccttaatggctcactgcaataaatactttatatgcaacaaccttagggtttttgttgatgaacaaaaatctacacatgtgtgtcttcttcacaaggttttgtttggtttgaaatagataccaagggcttggaatgacaagcttatacagactctttacaaccggggtttgaattccttaaagttagatactttgtttttcatatatgatatgctgacactacaatggtgaacttattagtgtatattgatgaaatttcggttaatggccctaattaggctcttattttaaactcataactaacccgaacaacacattctctctcaaagatatgggacctattcactatttttggggtgaaaattttaagagatcaaagtggtatgtacttaagttagaagtacattacaagtttattagttaagccatgtatggagggaggtaagagttattccaaccctaaaaggtctactgttaagctgagtctggatgatgttgaacctttagaagatgttatatatagaagaacattcagagcctgacacttatacgtcttgatgtagcttttataataaataagttaggtcagtttattcatactcttacctcaattcactaggaatcttgtaaatgactgttgaggtatctcaatggctccatatgtcaaatgatttgtggctcaaaccttatttagctttgcttctgtggggatatggtgatgctgattgggcaagttttgtggatgatagacgctctactggtggatatgtcacatttttaggtgacaacatagtctctcagtctgccaaaaagtaacaaattgttgctcaatcaagcactaaaagtaagtttcatgcccttgcaaatgctactattgagatcaagtagatttcttctctattgtctaagcttcaagttgtgtttcctcatcctcctattttgtaagttgacaattaaagtgttgctgcatcggcagccagccttatttttcatgtcagaagtaaatacacaagattaatctttaatttttcaacatcaaatcttagacaaacaactctcagttcattatgtcccctccttggatcagattgtagatactttagctaactctttatctactaactaatttacttatctcaaatcaaaactttcaaatggcctcttccctttttcgcttcagcagatgttaaccaaagtaactaactttagttatgttagttaactattagcttagttgttgtaataattaattaattaattgttaactttttattttgagttaagcaacttgtatcttaaattttaagctatataaataaaattttgaagctcacatgcatttagttaagcttctttggaaattctttgttctctttttctctagtttgtaccttttcaattgtaacttctacaatgtatatagtagttagagcaaagttcctaccagaaaaattcaaaaattaaaaaaaaaaattaaattaaataataaattacacatgtaaaaaaaaaaagcactaatataaaaactgtattatttaaatttattatatatattataaattttacaaaattattaaaattagtggaatagattaatatgtgccatattaagctggaaataatgaaaacaaaaataagaaaatttggattcactccaaaaatacatttgatttacattaaacatataaatcctatacaaaattatatatcttgtacatgggtttatatataaaagtacaactaattgtgtaatttatattgtcgagtgtataactaaaatttaatatttgcaagaaatgtgaaagattttgaatatataaaatatataaagatgaatactatttttattgaaatcagatcttttaagaaaatgtctgaatataaaattgtgaagacttaaacttaaaacagacaatattatacaaaataaaaagtattagactgcatataaacccatatacaattatgaagatatataattttgtgtagaatttatatatttaatgtaaagcaaatgtattttgggagtgaaaatacttaaaagctgtacgtttaaattaaaattttctgaaaccgtatgaaaaagaaaaaaagaacttgaaatttttattatccatttctttttttcattgttaatttggataacctcagtagttcatttcccgaaaggggcatttccaaaaggccaaattccagaagggtcaaggactttctctgtgattaagtttatatatataaatatatttatatatattcaccacgttgtcgagaacttattcgcattgcgatttcaacacaaatataatggctttaattaacaatcggatttgataataattatgattctttttatatttaaattaataatatatatagcatatatgctaatatatattatgttgttatatcgatgaggtgaagtatcgtacgaaggttacttataaattctcacacagtgaaaagtataatattactgtggtctgatataataatatgatgatttggttttggtgtatttataaaatttagtagtatagtagtagtcccattattattccacaagtcaatttattttgcaagttggggaaagagagtcaatatattcttgtgcttgagaatcaaaagcatatttgccataaatatcgttttcactgattatgtctggcttaatatggcacatgttaatttattgtttgatgtttttgactattttcttaattagattgtattgcattgcatggttgacagttggattgtttagataacgtatacattgccactcttccacaaaagctacaaatgc

SEQ ID NO: 18327 - DNA, 6710 bp, Cannabis sativa
atgatgttccatctcaaaaccaattggttatgggaggagtagctcattcatcttatatgtcacaatttatttccacagattagcaatgtgagactaacttttaatacaccctccccacgtttgggcctggaaagtgtgggtatagtgaacgacctttaagagaccacaggaccgaacgcaacatttaaaagaatttagaatttaggataaggtgaatggggttccatctcaaaaccaattggaaatgtgaggagtagtccattactcttatatattctattatcttttacacattaataatatgagactaactctataaaagctctatctattcactcctataattattgtctaatagtaaatagtttattgggttgttctttgtaactgtggttttaaatacgatcgtcaaaacaatcccaattcaaccattattcttgatgattcagactaattcgagttgttttgttgagtgtgattggttttgaaatatatttattaattattaaataagaaaaaaaattatagctaattatgatttttgcctcataaatcttgacatgtattaaattatgttctctaaattttcctgactataaaaatttttcctgaactattgagattattaaattgaaagacttttgtccaatttcattcaattttactatatagaattattacatagaaaatataaattgacgctttatttacaaatatatattcataagctgtggacaacatttatactttttatgtgattttaattattaaaatacctcttatattttctaagttgctgcgtgattgcgcggtggttgcatcagacgaatgttttaatcagacgatggttgcagggtggttggtcgaaggttgcatcaaacgaagatttcaatcaaacgaaagtttctgggtggttggccgaaggttgcatcagatttagatcagacgaaataactgttaggaaaaggtttatgtaactgtaatgcaattgttatgaaacattaataatcatatcagtgtttgtactaactcaatctacacgtctctttatgatttaatatgaacaaattcaccattagaaatttagaaaacaatgaaaatacaccaggataaatattgatgtaattttttttggattatatttgagttggattgtttgagaactccagttcaactttttgagatctgccttttatggatctaaaaattgaagtcaggacattagttttatgcacaaattaaactgaattttcggttgaattttagtttcatagtagtttttctacacttttttttttcataaattcgaaatagtccctgttttgattgattctagtcgtcttctcaagtgaagtcatcggaattaatggtagttcttttttaggttgaatttttgttttgattgcgttgggttgctgcgtggttgcgcaatgattgcgcgatagtacgcatcctgggttgaaggtgtgtgtaagtggtatttgtgtaatttcttttatttaggctgtatatttgtttatttggccaattgaaagtatctttgtaatattgttctttttttggttaaaactaaaaaaagtatgtactaaattatgctctctaaactttgatatctatcaaatcatatttctcgaactttgacatgtatcaaattatgtctcctgaattttcatttattttagacttttcttactaaaattggacaaaaaatctttaaattcaacaatttaaaagagatttttaacgattttaaaaatttaaaaacatgattacatgttaaagtttgaaaaaaagattattaattaatcttaaattatttatacaattcatgaatataatattgccactaaaaacgctatccattcttaaataataataaaagaaatagttatttattaatcattcgtacaattattttcattattattattattatatatttatttttgaaaggtgctacaattattttctgaaaacatataatttaaatcaataaaaaaactatttactaattaaagcaaagaatcaaacaaaagactacaccatgttgtatttatttatgatcattaaaaatatattaaaagtatatgagcttgattggatgtaacattatcacttgtaaatattatttttatttatacattaaagaaaatggactaagacatacattacattatatatatgggggctattctagccaattactctacatataataataaaacataaccacgagaaacatgttaagacttttcctaattttatataggtgatgattcgtgtacgtattcgtgtcatattcgtatataaggatcaattctaatttgatccatatatatttttgtgttaaaaaatttcaattctaacttaccatattggcacatcaacttattatgtttacatataaactatatatttatatattttaactctttattataataaaaaataatttaaatttaaattataatatagtatgatgtaaaatttgtttattttgtattaattattatgcaattttaatattttattatttttttgagataaattttaatattttattattaaattttagttaatatgttcatagttaatatgttcatttgcattaaatgatttatattaaatgatttatattattattattattattttattattgaattttatctttaccttttgcattagactaatgctaaaaatatattaatggtgctaattagcactctcttcggtatcatatcactattattgtaattaaatatcgagtctcatataatttgatataataatttttagtaaatatcgctagccaaataaatttcttatatttatctaaattgtatctatattaaaacaacagttaagttctactttataatattaagagcattaagttattgaacattattggtgctcaacaccttttataggtgacgctctatgagtggttagctattttttgtaaaagttaatatggagaattgttaaaaggtattactgtgcctagcaccctcctcggtatcataccgctattggtgtaattaagtatcgggtctcatataacttaaaaaaaataatttttaagaaatatcactaaccaatcgtgaatcatcacctataaaatgtgttggagactactggtacccaataacatctaccttaaagcatttcttaatatatttttatgagcacgtcattcttttttcgttaattaatctccaaaatctctaaagatttccaaaaatatattattttgagtgctaaataatcttctaataaagatttccataatccaaatttatatgtgacaaatatgaaaatatgttattatattagcatttattatatatatatttttaatcaaaccataaaaaattaaggaaaagtatatgaggagacaattcataatgggaaataaaagaggatctatcttgtaattcaaacttaattattaaaaaagaatgagcttaattataattatatttgatttttttattattatttataaatttggcatcttggacatattttattaagtttctcatatcttgatttattctaaattcaaagttgaggttttttttttaatcataatatgaactctttaagttatttcaatttattaaaaatattaaaataattataatagtttacaaatactatttaaattcaattctaaaatcttagttactttgtactaaagcaatagaaaaaaaaaagttatagttgattgtatcaaaaataagaaaaaaattatatttaaatatatttatgtatagtatataattcacaaattttattactttatttcaattcatgaatccttacttactttaaattgataaataaatagtttataattaattgattgattgtactatagctggtattgtcatctaaattatattaatacaacaaatcatttataaaaaattatataatatgaaagtatgcttttattattttatgtttaatttaatttaatttaccccacatgtcttcttaaggatatgcaatagaatcattaagaaccaaaactcagctctataaatagagcttaattatagtaattaattatcatattcaacaaagtgtaaaagcctatatagattatacctttatagtctaaacatggagaagcttaagagttttaggcatcttaacaacaatatagatttggttctaaatgaggaaaatagcatagaattgctaggagctcaaggccacatatggaaccaaattttcaatttcatcaactccatgtccttaaaatgtgccattcaattaggtattccagatatcgtcaacaactatagaaaacccatgaccatttctcaactcgtacttgcactccccataaaccaaaaaaaatccccttgtgtctatcgcctcatgcgaattttgatccactctggcttttttgctctgcaaaaagtcgaaggaggaggagaaggagaagaagaagaaggctatgttataactgacgcttccaaattactactcaaggacaatcctatgagtgtcacacccttcttgctatccatgctcgaccctgtgatactaaaccctgggattttctcagcaactggttccaaaacgatgatcctacaccgtttgacacggctaatgggatgacgttttgggattatggtagccatcagccaaatctagcgcgattcttcaacgatgccatggctagcgatgcgcgattggtgacgagcgttgtgatcgaaaagtgtaaatgggtgtttgagggagtggaatcattggttgatgttggtggagggaccgggaccgtggccacatcgattgcgactaattttccccaaattcagtgtacagttttggatttaccacatgttgtagctgatttacaaggtgggaataacctcaattttgttgggggagacatgtttgttgaagttcctacagctgaagtagttttgttgaaggtacatacatacatattctaagttctaagtatattaattagccatgtattttactttgtttagagacaaatctcctactttagatatgttttaatttttttatcatattttttcaataattgactacatacaatttttttaattgacaattattattattagtctcatgttgatacttttataatgatatttaataaaatattcaatatatttaagtaaaaacaaatgttacactatattaattaatatttttaagaaagatttgatatatatataattaactaaaatatattatatttggttattataacagtggatattacatgattggaatgacgaagaaagtgtgaaaattttaaaaaaatgcaaagaggccataatgaagagcaaaaagaaaggagggaaagtaatcataatagacatgaaggtcgaaaatgaaaaagatgaagatgacgaatcttatgaaactcaactctttttcgacatgttgatgatgactttgctcactggaaaagaaaggaatgagaaagaatgggctaagctctttaaagatgccggtttttctgattataagattacgcctattttgggtttaagatctgttattgaggtttatccataattaattaattatacttaagattaagtattattaatggttgtgttgtttgtaagttatttctctattattattggtatattgtaataaggaaacataattaacatatgagtaattatgtaagccaaaaataataagatatatatatcgatgagactcatcatatgcttttaatattacaagttgaagaattattaataaaataaaaatgtgtttgaatttttagttatgattgatgcaccattttttcataattatagtaaaacttttaccactaattttgttttgataaatcaataattattataagtttcatcactacaacaaataaagagttctataataccataagtattataaaaatctcactataaactttttgatgtatgattgtatgaaagatagtctattattaaaagtagggacacttttcataatatattctgaattagtatttaaacaaatattatctttattagtttctataatatatttttttttaacttatattaagtattattgaatattaaacaataatacattttgtgtactaaaaatcattattgttttagtttcataatatatttattttcatttaaattttacaataatacaatttttgcattatttatcatctaataagcttaaaatatatatatatataaaaaaaaaaagaaaaatcaatttccatcatactattttctcttcataacacaattaatttaaaaggctagttaatttttatttcataaagtcttactttataattcaaattatctaaaacaacaaaatattcaaaatatcaaatacaaaatattaacaaaacacaatctcaagtaccaactaaatttaaatgtattataaatctcattattacaccaatttatcaatattgccaacacattgaagctttctttgcaattattatagaaaaaatttgcaaaatggaatataaaatatgaatacataggtaaggcattaaataatagtgtactaaaaaaaaaataatagggagaagctgaaatagaaaatcgagagcaaaccacactttgaatatatatctataagagcataacaatccattacatctgtatcaagtctctatttaggaacctaagcaataccataattcatgt

SEQ ID NO: 18328 - DNA, 3799 bp, Cannabis sativa
ctaaagctcccatgccactaaggcaagcttagtggtaatggagggatgagaaaaagggagaagtcatggttcgaatgcaagacctttaagctattaattgattgtaaataacattacgttgcatgccaccttatctacccctcacgtgagggtgacaaaaagcaatggagtgtcacgtgacagaaccccaaataaaaccccccgtctcaaaactggcgggaagttcattccttctctcgtctcacttgtactcttcaagcagttccttacttgctctcatctccggccaccgaaatgaacaaaggcggaagcagaaagcgaccacctccaccaccgcagatttcaccggcgaaccctcccaagcagcaggcaacctcgcaagaggaggaatttctcgacgaagatgtcttccttgatgaaaccctcatcgaggatgaagactccctcatcctccgagaccttgaggaccgccaggcacttgcttcccgcctatccaagtgggttcgcccctctctttccgatgattacgtctccggctcgcgaaatgttggtcagtttcagagtttttttttttttttcttagctgagtttttttttgttctcttccagcttttcctgaaacttgttacctagggtttttgtttttatgataaatctgatcatatatatttatacaattttatttttgtatattgtgggtcgtagtatttcagcagttggagatagattatgtgatcggggagagccataaatcattacttccgaattcttcaggacctgccgccattatcagaatattcggtgtcacaaaggaaggcaagctttcattttttgttctaggatttgaaaaaaaaataaaaaatgaaacagtttccttaatacagataaatttgttttcggaatgctacatattatattcctttacattttttttaactgggtataacgatatgcctaacattttgtttttaagtgacttggaaggatgtcttgtaattttgcagtagtgtttctttcacgttttaacaatattgcgtgctattgttgctgtcatcttctttatttttcatgctaaaagatatatttttttttaatttattttctttttaagaatttatgtttttaacaataattcaaaatatcacagcattacgagccaaacagcattactagcaggagcagagcaataaaatgaaataccacagttattgctttcatatttttcttatttccttttacatacagttattgctaaaagatacatacaggaactcttcttaagaaattttagtaaactgggtatagggactaacagttaggaattaggcctaatgtggtgtcctaggattgaattttttgtaacgtgtacaaatggatgaatggaagaaaagttatttttactttttttttttttttcacataaaggctgttagagggaaggagcttcttctaacattaccttgacaagtttaggaggtagtgcctcaagaaaactattattgggtgtttggtttaaaagtttcacttagtgggttttagttgagaggagttgacattaagggaatctcaaactcaagtgtttgagtttggctcaagtgtttgagtttgggattaccacataaataaacttaaagatgggatgggatccacacaaacataaaccctctactaaaaccataccaaacataagtttggttttacattcccatccccaagaagccaaaccccccattacagtttggccataattctgtatttatttaaatgcatttatatttttatacatagaaatttaccaattttagtgtataaagaaaagttcttgggaatgcaataaatcttattctatgtttgcacatggagtttgtgtgtacaagtggctttagtttattaaacccttccaattggaattactttcaaagatgagatcatttaaatttgtgatttttattcataggacatagtgtgtgctgtaatgttcatggctttgagccatacttctacatcagctgcccttcaggaatgagacctgacgacatatccaactttcatcaaattttggaggtatttggatttaacacttaactggattagaaagctgtttttagtgtgttccttttgtgatcatttacactagaaactatgttttatatgatgattcagggaaggatgaaggaggctaataggaacagcaaggtacctaagttcattcgtcgtattgagatggtccagaaaaagagcataatgtactaccagcagcagcattcttacccttttctcaaaattgttgttgctctaccgacaatggttacaagctgtcgtggtataattctgtctatattcttatgcagttattaaatatgtaaactgttggcctttttttttttatttaattgtattgctagttgagagacctggaaacctcccaagacctcaaacttcaccacaattcactcgcacatttcctactccttcccttactcttaccctagcccgcatttatataattttttttttatatatatatattttaaaaaaagtagacgtcgatcatacatcaaaattgaaagctatctacatagtcaatagacaataaaatttggtccattaggtattaaacttattcttacacaaatattactttagttggtgatcaaaaacaaagaaatctgaaactttgctgagattctgcttcctgagccttctgatggtgcttctaacagtcacagcactcgcactactgagggtgttggctcctccagctttgcagccctattccaacagccttccttttcactgcatacttcccgtaaaactcacataagtatttgctttgctgactgacctccatcttcttaatacgcttcctcaaagtagcatcatattgtgtaccatatttcccaacaatgccagccttcttggttctcttcgtcattttagaagtggaattctgtgaagcaaaagtgatttacatactatcttaatcacccaaatacccctgcttttaacccagccattcccacccatggaacgttcttaatacaactaactcctaaaagctttacaatgaatattttggattgtgattaactgctatatttgatttgtgttccagccttatgtttcaaattaattggcaggcatacttgacagaggtgtacaaattgatggactgggtatgaagagcttcatgacatatgaaagcaatgttctgtttgctcttcgctttatgattgattgcaacatagttggtggcaactggattgaagtacctggtggaaaatatatgaagacagctaaacagttgtcgtactgtcagttagagtttgattgcatgtatccttatagatgtacgaagcacttatattcacatgaaaatgattttttcccccctttactttgcataagaatgctactgtaggcacaagactttaagtgctttagatggtacataggtcatgattattgtgatgttatgcttgtcttttaccttcctggtgtatcgtgggccacaaaaataataatgatgatggttgaatttggtcaccagagacaggtttgacaaggatttcgtcaacgctgtaaatttgttcatcgaaatgatgattggtttatgttgaggtaatatggtgaatgtgtttaagctattgtggcattttttgggttgtggcacaaatcttgaagatatactccaaattggaaggacgattgtgatttgtttatttagttattttaggagttctttctctcatttctttattcagtttaattgaaagttttagtttcttatctttatatt

SEQ ID NO: 18329 - DNA, 7264 bp, Cannabis sativa
  modified_base (48)..(53): a, c, t, g, unknown or other
  modified_base (696)..(707): a, c, t, g, unknown or other
  modified_base (6697)..(6707): a, c, t, g, unknown or other
aagttcatatttaggatgttaaaccacatacttgtgagtagatctaannnnnnggtaaaataaattccaacagcctcaacttctcaaaccctccgactcaaccctttaggaaatgcttccctttctctctcatccaagctccctctctcctccgctttctctgtctcgctcaaccccggtggcggcagcagtctcatcgcctggtattgattgtcttcgctggtcttgatgccaatcctacgatcctcgttgatgggaagctcggtgcggctgggcttgatctgctcaaggactttgctaacgttgattgctcgtataatcttaccccctaaggagatcggtgttggctgtgcgtggagctgggtggggagtcgagtcggctagggtttttagggtttctcttattaccaatcttcttccgcttcgtaccgcgacgatagacagaggtaatgctgggtgtagctaaggcagtggccctcgtggaaggcatgagattgctctcgctggttcgatgagatggagccggaaggtcttctgggtcgtcgacttcgtcgtcgttttgatcgagatcaagagagcttttgcgatttcttgggacttggtgggtctgatggtgatctgggtttgggggattcagggattctagggttatggtggatcagggttttttgaatgaaaagaaaaagaaaaagaaannnnnnnnnnnnaaagaaaaagaaaaaaaatataaaaataaaattttttaattttaatttttttttaatttttaaaggaaaaagaaatttttttattttttagttttaaagtaattaattttttattttaattttaaatatttgttacgtggactaattaaactgtgccacgtgtacactgtgtacacgtagacattctaacctgacacttaacactcaaaaatggatggaaagggctaagtgctaacagaacttgagtttaagagattttaccaccaaaattttagaatttggagttagttacaaaaatctggccactttaagagcttatgccgcaaattactctatcaatatatatagggtattctataaaatcaaaggtataattctaaatttatagtaaagtcataagaaattaataaatttatttgttaaatttataaataattatagcaaactgtcataaataatatatatgtgttaaatttataactaattatagcaaactgtcataaataatatgtatgtatatagtatatttttacatctaaattttagggtgcacccaataaaatttgtagtcttccttccttgcttacgaaaaaacatgacatttaccaaaatatccctatatgcacacaatttagattcctgattcgatatagacatcttgagacaatagaccaggcattttcttctggatgctgaggccacccgttttaggatttcctccgtgcggctcaaaaccgctactgaatcttgtgtttgtatgtaacacatgtatcagttctttctcacatagtgtacaacctatacatacaaataaataaatagataaataaataagtaatagtgaacaaaactcttccaaccttttagtaaagaaaaacgctaagttttgctttattcaagagcatttgtgtctcttagactgccaccaacggcaatgaccacattaaacaataactccttgaatcgccatttgtcagaggaggaggcgtctcagttccctcattggtattcacccgaaacaggcatttgcaatagtatacacccctcaagacacctcccatcagacccttttcttgatgttgtttctttcatcttctcagaccagcacaatggggtttcagctctcattgattcttcaactgggtattcaatatgctacccacaactctaccggttggtccagtctatggcctctggtcttcattctatgggtatctccaaaaacgatgtcgttttggttatgctaccaaactccatttactatccggctatcttgcttggagtcctgtaccttggtggtgttgtcacaacaatgaaccctcttagcagtaagactgaaataaagaaacaagttactgactctaaggcttgtcttggttttgctcagtctgggaaagtcgagttcttgcatgagttgggagttactccaattgaggtacctgaaaatttcaacttggatttgaactgggatcgtttttcatctttctctaagcttatttcaggtgaatttgatttggttccaaggccattgattaggcagcaagatacagctgcaataatgtattcttcaggcaccacaggtgctagcaaaggtgttgtgttaactcatagaaatttcatggccatggttgagctttttgtgaagtttgaggcttcacaatatgaatactcaagtttgaagaatgtgtatatagctattctgccaatgtttcatatatatgggatgtctctttttgtaatgggacttttttctttgggctcaaccattgttgttatgaagaaatttgatatcaacgaggtggtgaaggccatagaaagatttggggtgacacacttccctgttgtaccaccaatattaacagccttgacaaagaccgcaaagactgttaatggaaaaaaatttcagagtttgaagcaggtttcaagtggggcagcacctttaagcagaaaactcatagaggactttgtggagatctttcctcatgttgatttcattcaggtaaaataatttttttcgctttctctatcaactgttacttttctttaacatagatagtgtttatccttttctttagttgattatgtttggatgactacttttagttgagttggaatcttagttttctcaaaatgcatatgatagatagtgtttcagtgtttatgtgtatggttatcagtttattatgtacataccattccaaccactggaaatcatgtcagtatattaggaatgtcctctttaagattgtttgattgtttgtaggggtatggcatgacggaatcgactgcagtagggacccgtggctacaatactaagaagtttcataatttttcttcaataggatttttagcacccaatatgcaagccaaagtggtggattggactactgggtccttcttgcctcccggtagtagtggtgaactttggttaagggggccagcagttatgaaaggtaaagaaacactttcttggtttcttaaaatggttgaagtttaaagcgcctaaatgatttgaaagtgcttaattttataacaagccaaatctgtcattacttaataatcaaacttctgtgactaaattgttctgttgagttttcaggatacttgaataacgcagtggcaactatgtccacaatagacaaagatggttggctacgtactggagacattgtttactttgaccaagatggatttttgtatataattgatcggctgaaagagattatcaaatacaaaggctttcaggtatagaacacttttaataggtgatcaatatcagtttcttttagcttgattattcttagttaaaaataattcctctcttatttaaaatgtaattactgcagattgctcctgcggatttggaggctgtgttaatttcccaccctgagatacttgatgttgccgtggcagcgtaagttagaacactaaggcagtatacaaacaagaaagcttttaagcattttaaactggattttacaaaaatcaaggatgatgatttttgtaatcgctttgcacatttaggaatcatgacaattagaaagtgtatgctgttttctagaaattagtgatgaataaatgtgttttaatttactgccaattgcttttatcacctatgaggttccaacactttgttctgcttttacttagtgcaaaagatgaagaatgtggggaaataccagtggcgtttgtggttagaaagaatggaagcttgctctcaaaggaagttgttatggactatgtcgctagacaggttttgttaatttactttcttcccatttcaagttaaacctcccctacttcgactcttttatgcatcgtcttgctgtctaaacaccattgttggtgctactagtttgtcaatcctgtgcagttaccaaatctcttcagcatgatttaacaatgaaaatgtatatttatttttgcaggttgcaccctacaagaaaatcagaaaggtggtgtttacacattcgattccaaaatctgcagctgggaagatccttcggagggaacttgggaaacttctgacttctaggctctaagagcttacttttgttattattaaaattttctcaatacttacatgattgtaaaaacgatatattgattcaaaaattgtaatacctattgttttctggattaacaatgaagcagtgatcattcaatttgacttttgtttcaagttcattaacaccattgtcattctaacttgagagagtaattaactagctactttaacgtttccattggagactgataataaatatgttagaaatattttatcaggatttacatttattaacatgttaattataaatttataatttaacatcccaaatataaattttctttatagaaaaccttacacaatcactatactcagtattactgtaatatgtgtgggtaatttcttaataataaggagcacgtaatatgataaaaaaattcgagaaattcaaaaatataatgagaataaaataaaagtctttcttttgatttagtttgttacacaagaaagtgtctaaagtgttggtcttttaaatcaaaggctatcacattatatttatagacaaacattaggtttagggttagaataagatagactgaataaaaaaataaaattgctttttatttcaacccttgaccaaattatacatcaaggtcgatgggtttgaagtgaaacaatcttttgtttattcaatactactatttttatattctatttatttaaatgataactttatctatttaataattataattaatcattaaataaaatgaccgtttaaatatatttattaattagaccctccaatgtctcttcattaataaacaaatcttgaattctctaatcttctcaaatatgtcatttcaccattgattacatagaacgctctatataccaaatataaatacgctatgaattatccattattacaatctaaacaatcaatgatcctttataaacggtttatatatttttttttgataaatcagtgaattgtattgctctaaatcatctttgtacaacctaaagggacctcaatagaggccccaaaaacaatcagtatctagttacatccgtatgttttttttacagtgtttggaaccacaatttgtcttctttcttgattttcttaggcatgaacatggtgactcttagcttaaggccctctttaatctcctcaacaattctacttgctgcagtttcctctttcctccaaatgattgcatttcttgctttccatatattataaaccagagcagcacatgttgcaaccaacaccagctttttaaatttgctggtttttgacctgccaatccatctaataagttggagcattcctttactctctgctatccacccgaactagtttttaatcccttgaagacactctcttgaaaattggcaattaaagaacagatgcacacctgattctttttcttcctggcgtaaacaacaggtttcctccacttgtaatcaaaatttcagaagcatatcctttgttttcatcctactgtgtatagtgagccacaaaatataacaatgctttggagtgttaagtcaagaccatacctcattactccactatagcttgatctcttgaggattaaagagcttgtaacctgctgctatggagtacttctgagcagtgaactgttgtatgtgaatgttattcttcagttggtttttcaatgccacaagcttcttccaatgccaactagaatgaacagaggcattgtggctccaccattcatctttcttgagatagacactatgcacccgtttcatccataggctttcttgtctgtttgcaattgcccaaatgtatttggacatagctgctttattccattcttttaactttaccattttaccatactcaatatagacggtttatattgagtatgaataaatttaccattttacctttcaatgtattttatccttaaaacacttagctacttgtatatgatattttagtaaactaatataattactgaaatgagtgctctatcattaatcgcgttaagccaaacactaaggaaactaccattttacttctaatagttatagaagcaatagattccatatctatgattaacgttctcactcagttgcactaccgaattcccaagatgtaagtatggactagtcctacgggtaagctagtaacaaacaagtcaaaaaacctatatagtacaattaagctagaacttaaccatatcaggattgagatcaattgacctaagatcaaataagtgacattgacttagaaaagacgtaacaataagtttatgatatctttttcactatcaatatcggtccagcctgatatatagctgatacatccgatactactttactttgctaatgccctggaaaggacattccacttatacaagtgtaagtaaaccacatcgttgattattacgtcagtgtaaatccagtgcactaataaattgtgagactaaataatttgaagcannnnnnnnnnnttactttccactgtgatgacaacactgtaatttgaataactatatgtttgggacagaacttatatattaaacttataatcatgtataaatatgtaaacaaagcatatgactaagtcatggtatgatttctgatctttattgaaagtaagtacgattatattaaaaataagttttatttagggcagaaaatcccaataaactcctactaatagtaatataaaactaaagtgcatttaatttaatcttatatacttgatgtcttgatcaaatatagtatttggcataaactatgtaataggttctaataggttgtattcagtatcaacctactcctccatcacattttccttagtaacaaaaattcataattttgagaattctccatctatatattttactcctcttaggatataggattcattattgtttggcaattgcatttgtgttataaaggaatcacactagaaattattctatgtcttgaattatgccaaaatatgtgtcgaactctctcgagtctgaataattccctaatttcctttagagcagccttatta

SEQ ID NO: 18330 - DNA, 5025 bp, Cannabis sativa
tgttattggtttgatcgtagtttttcggaaagtactcttcctagtactctcaaatcgattgtgattgcggatttgaattaataatattatccattcccattcaaaaaaaaataaataaataaataaaaaataagggcactgggcctggctcgctcatactcagtaacaatattatttggttcttaaaaaaaaagtaaaaaaaaataaatacattgtactcttttccttaaaaaaaatacattatattcttttagattagatagactaatgtatttaataccatattaggctactatacttattttattttctctcattttagaatagtttaaaaatatatttttattccttatacaattaattctgtttttttttacaaataaatacagctgatttaagataacagatttttaactttacaataattcaaaaattttaaaaataatataaaaatcataaaaaaactttcactcctaaaaaatctggttagattttttttatttaacagattgttttggcgtgttagttttcatttcaccctgaaaacttcacgtattgtttggcaatggcattaggtgacagtggagatagccttccactactattcactaccattcttcttctgttattcaggttcattgtggctgatgaattagttttcgattggcatgttgcaatcgataactctatcaatccaatcatcaccgtagatcaaccggtaagaaaatatatatcatttttgtgatacataatatatgacaatatagttagagattaattgctatagacataattatttacatgttatttttcaggttattaccattaatggaatgtttcctgggccactcattaatgccactaccaatgataacattcatgtcaacgtgttcaatcacttagatgaacctctactaatgacatggtattaattacttactggcttggctcatcatgaaaatgaaaatgtgttaatgatgatgatgtaaaacagagataattaattgattattaatttctttatatacaggaatgggatacaacaaaggctgaactcttggcaagatggggtttcgggtaccaattgtgcgattcaaccaggaaagaactggacctatacttatcaattgaaagatcaaatagggagcttcttttacttcccttccaccaatttccacaaagctgggggtggatttggccctattcgaattaacaatcgcccagttattagtgtcccatttccaaaaccagaagctgatttcgaccttctcattggtgattggtccaaaaaaagttacaaggtcctcaaattaacacaacgttttcatttgaattttattgttagtttgttacgaaaaattttataatctttgcttattttgaaggctagtattgtaatttcaaacgcaggatattagatctcagttgaagacattggaaatggcatatttgactggcccacctgatagaattttgatgaatggtaaaggtccatatatggacccacttactaaaacccacgagtcatttactgtaacgaaaggtaagaaactttcgtgaatttatctactgttacatttggtttttgttttgaaatatatatatatatatatattatattttttgtgttaattttatttggagttgtaaaattttaattttattatttgtttaggaaaaacttaccgattcagaatatcaaacgtgggagttgcatggagtttcaacttcaggatccaaaatcacaccatgcagttggttgaaacagagggatcatacaccaatcagataatgttggattcgttggatgtccacgttggacagtcttactctgttctcgtcacagccgatcaggatgcttccgatttctacatcgttgcagagcctagatttttctacaacggctcagaatatagcagatatggtgttgccattctacactatgataattccaccacaccagccatgggacctcttcccaatggcccttatcccttcgatatagaatcttccataaaccaagctaaatcaatcaggtatgtatttataaatgttaagttactaaatctacatacatattatttcttcaatatctcattttgctacttattactttatatatattaggtggaatatgaccactggagcagccaggccaaatcgacaaggaagtttcaacgtaacacacgtgacaatttcacaaacattcacctttacagcctcgaaagctgaaattggtggtgtccctcgttacacggtcaacaatgtggcatacttgaccccaaaaacacccttgaaattggccgatcacttctccaacacatctggggtgttcgagctcgacaaattccccactaactccaccaaccctgttccggtagagggcacatttgtggcaactgggaatcacagagattgggtagaactagtgtttgagaattggtctgatgaaatggactcttggcatttggatggtttcagcttttatgttgttgggtaagtatggttttgacttattgacttattaccataaagctaaatacatatttgtctgtaaaagtaaaatgtgttgtttggtttggttggtcagttttgggattgctgagtggtcaccggaagtaagatcgacctataacctttatgacccggttgttagatccactgtacaactatttccttcgagttggacagcagtttatgtgtaccttgacaatccaggaatatggaatttgaggtcacagaagttgaaaaattggtatttgggagcagagctttatttgagagtttatgatgctgatcccaaccctgctaaggaaagggcatccccagataatcttcttcgatgtggttagtaactttaacatatttattcttcagtttcactttccctttcaattaaataattgttataactctcttttgatgttttgctattggactaattttgtaggcaattttgaactgccaccttcagttttaagccaaccacttaattctttctctgggtcaccatctactgccttcaatttgcataatgcatggtaattattgtacaataaatctcattattatgtttagaaaactgaaagttacaagtttctaattttttttttttgcaggtttcacattgtgattatttgtatttcagtgattctcagtctttgttcttcaatttaaagtggatcagacaaccattctatttttggtcttttttttttttgggttgaactattgtgttttattcaatttcatagtaaagtacatatagtttagtggatcagagatacaattctattttcggtctttctttttttttttttgaactattgtgtctcttgttttattcaattccatagtaaagtacatagtctaaaaaaaaaacagagcctctcttctctgcttcactctattaaacagggtgatacctgattagagagtgagtgagtgagggctgtatagtagtaaaactgtcaaaatggtatattcacataacaaaagaaaaaaaaaaaaaccaatatataatttatgtacatgtatactaataccaccatcatggcatcatcacttgatccaatccaagagacacataatatatgttgcttagactcactggcggcttgggttcacaccaactgttttaagagtctctgtctctctagatctacaaaggaaaaacaaacagccctcttatcaaaattgtttgtgaatattgtgggagtaaaataataaaactaaacagcataggtgtaatgagtaataacaacaacatactgtgtaaaggggtttggtcgagtagggtcagggagagtgggattggcgtcttggatatgagccacttttcttagaaaggacttgttgatgaacttgtcagctgagataatagcagcatcagggtagtccacctcagccactgtctctctcttcttcttgcttacattgacagatggtgaatgcaacagttgttgctttgccgtgtgtgttgccattgtcaacgcagccaaaaccattcccatcaccatatagattggtacaaactcacctttcattgctaaatccctgcccaattcattatatcacatttcaaagttgggtacttgagaaaaacattggtttcccaacaccatataaatgcttattactattatcattatcatttattattacctgaatttagagtgagcagcatcatccatggtaggtgtaaaagccttagatttgggagcagtggcagttacaaatgagtggcttgaccccattcgggcaaggattgatctccaatagttctacacatgaacaaaatatgtaaacaaatgaaattagaaaaatataatgacccaaattccagaaaaacatttatttttacatgaatgtttcatgtacttacagttgtcctcttagccattctgtttgatatttcaattgattttcttttaatcaatatattcagttatattaaacagtatatttggatatgatcgtttatataggaaactaggaagagaaaatgagattctgtattttattttttttatggttagatgactgggtaataatagcaatcgtttgtgaggaccccatccaatcctcaaaattagttatgaagagtttgaatccttgtgtatcggatgaccattacacttgttttttatttggcttctcctataatacgtttacttttcctatttatatattatattaaaaaaaattatttaaagtttattttttagttcaggataaatttgtcattgattttttaataataaaaattaaactaaataaataaataacattactgtaatgtaatgattaattggaatattaatgcgaaaatataattatttttaattgcattatattaattggttaaacacaaaaatctaatagattgttatgaaaagttatataaatttattaatatattataaatctattgtattaagattgaaggattgaatcatttaaaaaaaaagattgatgagaacaataaaactctataccaaacataaaaatgtgaaaatcgttttg

SEQ ID NO: 18331 - DNA, 2261 bp, Cannabis sativa
aaagtccttaaatttaacaatcttaatagttcaatagaaatttttaacggccaaaaaagttcaaacaacattaattggccatacaagtcagtttatacctaaaaatattaacaatcattaaacataattatttagaaaagctaatcataaaaatctgacaattcaagacaacacgtgtcaaacaaagtattaaataggttacattaaagtgattatacatggaagatacaaaataactaaaagcttaggtgatcttgttaggcaaaaaatttaattaattttgttttttccaattcaattgaagaaacttctttaatttgttcttagtttttaattaacgaaatataaaatcaattaataataatagttaccaaacagcaccttaattaattaattgaactataactaaattgtagtcaagaagaatagtgaaatatgttactacatttaacttggaatgttacacaatatagagtttcatattataggttaacctaacaaaaaaaaataacatttaaattggtctcatcccaatcattcctagttcctcacgtttcgcgtaattattgttgtcgtcggaaacatcaacaactcgagcagattcgaaggtaacatccaagaaatagagcatcagaaccaaaatcaaactagaaacaaacatgggaagaggaccaaatatccataagaagagagtgaaagagaagtagaaagtacgtaaccctagagaccaaaaaaaacttcccctatgaacatttctctctacaaaatcaattgtcaattgttggtgttgatcatcttgtgatttcttcttgtatggtacattaattagaatacttgcttggttaaagtacctataataacaaaacaaaaaaaaaaattatatgcttatgaataattaccaaattaaaacaatataataacattccactattttgactattctagtcctttatatcgagacatctcattttaacttttagaattttatttttatagtttttaaggcgtaagtttacaaaaatgttgctctttttaaaaaagttgttttaattatgagaataattttataaaaaaaaaatctggaaaatactagaataaggtataattagttacagcctgaaaagctaggtgattggttaccctaaggtagctggttacctctaattattttattttaattttttctgtataaagtagatttttgaaaataataataaaaaaacgaaaactatattttttataaatattgtataaaaactcataaaatgtgtaacttcttcttttttaacaagcatactaactcgcccaagtacttggtgaaaatatgtagaattataacttgaccaaactttctattagagtggggaaaaaaaatctgaccaaattgaccaataatagtctttgatgaatttaattgattttattttgtgaaacttgatttaattgtcacaacactaattattaagatcaaattaaattatatagatataattacaatatattattataataagcaattaaacaaagaaaataaataccttatagattggacattgaacaagaaggaagctaagaagcaagccaatatggaaaagtacttgacagataagctggcctcacttttatttccgaaaacaaacaactcggttttgtttcggccaccatcagccattaacaccgcgattaaagaactcaacataatagccatcgacgccagaagcgtcgaagccatcatattgtttctcaatgtctcaaccgaaaccattccattttttttcacatcctaccattaaaacaataaataatatatatcaaacacaatagagtttgtaattttgttgttcatatttttttcatattatatctcttcaatatttgtaatgatcaggaggtctaaatttatcttttataaaacgtatagaaaatatccaagcacatatgaaagcgatcttttttatttgatttttttttttttatatttgtttacctccatcatagcgcggatccaaaaccgtcggtagatggcattaacaccaatgacggtggtgttcgggtggtttctaactctgtagagaagccaacaatggtaaaccaccatagccagtagtcccaatggcactaacatataatcaataattcttttctccatttcttttttctaaaatgaaaactttttgaaattttgatatggggtttagattttaaatacataatatttttcattatatatgtgtgaaattaattaaaccctagctagctat

SEQ ID NO: 18332 - DNA, 2223 bp, Cannabis sativa
atttatttttgtgagaatatatgaaatacataacttacgtattaataggtttatcattttttataatgtttcaaaaaaaaaaaatatatcatgttttcttaaaaaaatcatttcataaataaaaatttttaaatatagacttttccgtatttttatattttaattgttagaagcataatatagaacattgtcatataattagtttcactagtaatttttcttgtaatacatgatgtatacattgatatattattttcttgaataaatattatatttactaagacagtcaaatctgatttaatttgtgagtattgtattataaaattagaagaaaaattatacaaaatttttatttgaaattttcttacaaaaaatattgtgctaaatttattacaaaaaaaaaaaataaacaattaccatatacatttttaacggttattaataaattaaatatttgaaaaataattatgagatcaaatataaatttaaagtctatatggataaaaaaattatagttaaaaaatatatatttattttatgctaaatttgtcaaaagattatatcgtatcaaaattttattaaaattaattttaaacatactaaaatttggcataaatttaacatactattcaaaactaattttctccaaaatgttaaaatataacactataccacttttactattctgtgtaaaaaaaattaagatcactgactttaagtaattaatatttgtattaaatacaacaaagactcgagagacactggcggatattcacgtacatcataattaatttatgaacaataaagtcaaatgaaatataatatctatataaatatatattagttggttcaagaataaataagtaaattactagcttacaaatttttttttttgtaagttattatcctcgtttgggaaaaaaaaatgaaagaaagaaagaaagaaagtgatattttggttgatttcttggttaacagctggtatgcctttggggactctggacccagctgcgaaggccacttatccaatatatccaaaaacaaaaactattggttatactttttatgtcttggattgtttaattcatgtgtgttgtgtggtctctagatatattatgaaacttccaaagtccaaaaaccatatactccaaatcatgaaagacaaattaaataaaacaacacaagtttttgcaaaaaccagcagggtatatatatttttcatctctcccacggtttcattaattagcatatatatagggtcaagagaaacaaaaaaaaaaaaagcaatattacacaatccatatacaaactcgttggttcaagagcctattaatttctcatgaaactcacccatcttttctacaaaaggggaagaagaaaagaacatattcaccgctccaacagcagcacttaaaaaacagagagaaaaaagagtcaactcactctcactcctcctctctatggtagaagaaagaaaaagtcaaataagggcacccatatatatagctaaaagagccaccaatgtagtgaacaaatggcccataactcttctctcaccggggtcacaacttacaaattaacccaaatagctatagacccaaagaaaagatatttttcttagtggtcagtccctttcattaggtttttcttctttttttttttctttgtagaggttttttgcaaaagcttttttttgggtttttcttcttctttgttttgccccatttttttttatcgacgaataatcgcagacccagtaaagtaattgaagtcatggtgctggacccgtagttgctttagccaagaatcggccacgctcaaaagtgacaaaagcctctcttggtcccggccacacttggccgagacccacacattgccttgcatcttataagtggccaacccaaatggtggtagagaaatcccatctccttcctttctcttcctcatccccacattattattattattttcatcaatctcatcttcaacatccatgtctgaaatagcattaatggaatttcagaccaaacctttaattacataaatgtacattaatgtattcatataatagtaattaaattattattattattaccttggaaagaagatgagagagtgtgatatgtaaggaaacaagtcgataagtccttaatggtcctacccattgggatgtgatatattgggtacctgaatatatatggatccaaaaccatcaatacacta

SEQ ID NO: 18333 - DNA, 4980 bp, Cannabis sativa
agcagtcgaacctggagttcatcgtggtttttgttatcgagggttcgctaagttcatcgcggggttttagggttcgtcacctaggatttgggtcttgcagaagaaggaactgggggtctgatggttcaagtagtaaagaagaataaaaagaaaaaaaattaattattgttttatttttataatttttaaattatttttctaaaatattcagataattaaaattatgtgcaccactaaaaatttatcacaggtacattatagcatgtaaactacggcacttaaacaaatttttttaaacgaacaggtaaatagctaacaaaagtaaagcttggacggttttatcactaaaaattgaatttgtgtggtaagtatcacaaattatatagttgatgtagctttgttagtaataaaagaaagggtaaataccattttggaccatgtgttttgcaaaacttatcaattagaccatctgttttgttaaatgccaaaatggatccggtattttctaaaatagtacaaataagaccctgaactgattttttgtcaaaataaaatttattaataatccgatctaaaagtgttatgacaaaactttttatattttctgtatctgttcgtcataagaattgtcttcaagttggttatattaagaaaaaaaaattatcaaaaactaaactcagtatcatatttttaccattttagaaaatacaaaatccattttgtcatttaaccaattagcaacttttgcaaaacaaggtgcaaaatggtatttaccaaaaaaaaataacaaactatttgttctctaaatgaataaatgtgggaaaaagtaaattacagtttgctattacaaaaacttcgataatggagatattcctgactaacaaaaacgatgaaatacaatgggaaggatcatagtttattattaccaagggagtacaatgactatcaactatctaatactagaataacacaacccaaatcctccttaatggataatagtgtcgtaaaattacaggagaaaaataaagggtgttgagaaataactatagctgacggccaaagatgaagtcttcctgtcaaaattaaggtttgtagatttagatgtgtggtgatacagtaaaaaaaaacagaatgtttgagctgtcatgttgtgaagaaactccataactttttccccattgaaacttcaccaggatgcagctcctcctcgtcttcatcgtaatcatcattgctctcatcttcaccgccgtgttttaaagtttcatttacttcattgccaatctctgtactttcacccaatcttgcttgctcagcatctatatcagcatctgctgtagttttaaactgcatcatcagtcaataaaagaggttaaaacgaaatgacatggtcaaaattatctacaaaccatcaaagcaaacagcaaaacccaaaaatcgaaagattgttacccgaacaactttctcttcagcaaattccacagttttcgttgtgatcacctgcacaacttgtttggtttgggtgctcttcgtggctacgtccgacgatatggagacaacttctggattcgctgctacatctaccataccactgcctacagcttctttctcttctgtctttttcgggtcaacattggttgagtccacactgatcaacattcagatgaaattttaaaactagcaaagtgaaaatgttttcatgttggtacagaaagagtgaagataagaataatcatgtacaattatgtatcttccaggcatgcttaaactgaaactataaccataacttacttcttgcgccgtctgaaattgtatcgatttccaggagtctctaaaccagaagcaacagattgctgcttcttcctgccccgacgaccagtagtacttacactaccggaacatgcttcactatcacccgcatcttgttcactttctgaaatattagatgtctgatcacgcagacgcttcctagtagggtaactatatcctttcatagcatgacccgaatcaccacgactttcttcatttgtattgtaagaatcactaggctgcattactacatttgatccaggttcatctagagactcaccaagaaaagcctttgcttcttcaacaactgccttcactgatcgtgttctacgcaatgcagatttgcgtctcctaccagatttttgaagaccactcttcacttctgattgcaaagaatcttctggaacttcatccaccttactgtccaattggctatgatctggagcatatccatcatcaatctctatgacattgccaaattgaaccttttgagtatgaacaccaaagttagaaattttagaagggtaaggctgcctatcttcaggaatacccggccctcttcctccatcattgtcgagaactttaggctcatttacttcttgggtggttggtggtaattccacagatactggagcaacaacattttcggattttttacttggtgaaaccttaaaaatctttgatgtgcattttttaagccaagacatgcttgcccctgacatagaagatcccaaatctaaatctaaaccatctgatgacttctccacaagttcatcatcaaagtttggaagaggaacagcgtccccatgattcacttcaggtacatggaaatcagaaagtgaaaattcccttcctatatctccaccatctttgcaattcttgagcttgtcaacaaaagagagaaactgattcctgtctttgatcagctcttctcgctgatacttgatcttattgctaagaataccaagctgatctatatcattttgtatttcaagttggttcactttcaattgctccttgttcaacactagctcctctctttgctttttggttctctgtctttccaaccttacttcttccatttctttctgagcaacttctttcagtttcttaatgttgttaagctctctttctgtttcatccctaaatgctctctccctttcatgaatgagcttctccatttcttcctgctcctttcgcaagtcagtctcaagattccttctctgcaactcaaaatcttgagccatttgtctctgctcaaattgagctttctcagatattgctaattgctcagccgtcatttttgctgcaacccgatcgttttccagtttaaggttttccatctcccgctgtttaaattcctgaattgcgcgtttctcttcattcaatctctcctcctccaggtgtcgcaattttgtcagattttccttctcctcatgtagttccctgagctctttgctaattttagatcttttctcatccaaatcttcccattctttctcgaaattctccttctcttgttttagatcattagcttcctttaaaagcaactcattctgaagtctataattttcaatttcttgtttcaattctaactgcaaatggacatgttgcgacctctcttcgtcagttactatcaggttctccctctctttacaaatttgcagctcaagctggatattttcagcctttatcttatcaacttcggctaagagactctgtacactctctttatctgcaagcatttgctgcttctccatctccagctttttctcctcagctttcattatcttttccctctcctttatagatttcaatttctcttctgattccttgtttttctccttaagcctgccagacttctcctgaaatgcatgctctctcttttctagcttttcttccctgtggtttatttcagcttccttcattcctaatgcatctgccttggaaaatagctctctgtcaagagactttcgtctatcttctatttccacgtcaagctccttcattttcacatcaagaatagctttgtgttcatcaagtaattgttgtacctcaatctgttatccaccccaaatataaagaaatcaataatttgtttcattaaaacccaaaggcagggatgtcaatgtcatttttcaaaacagacatgtaaaagtatgcactcactttttctcgtaaacttagcttttcttctagttgatgcaattctttgcttttcatctctaaaacgtttctcaaagaatcagcttcctgcaatgaaatgacgcagaatatttatgcataaactttaaaatttatttaatttaacaaaccccaatcatagcctaaaaacaaaaaaaataacacccccactttctctttagatgacaagtcagctagccgtttcgttatatcttcttctttctgtattatatccaagttacacgactcaattttcttttctaattcttcaagttcaatctccatccgtttatgtattctctcattttcatttgccttttcctctctctccttgaggatcctccgatctttgcagagcctctcttccctttcttgtaatctcctctcccactcttgcaaatcatcctgatgtttactaaaagttgccttgtgtgtttcccgcctaagagcaatttgaagaacaaaaaaaagttattaagatatccccaagttccaaaaaatgtcagaaatgcgattatagtcgatactaaaactggtgaagctagaacatagtaacatactctgcacttaaagtctgctgctccttgtgaagcacactttcccgagcctccacctcttctaaccttaccttcaactctgtactcttcctgtttacctcagcaagcctagcatctgcagcttgcaacttcttctctatctccaaagacttctcttccattccatttgccaatgcatctgcttctgccaacttcgaagcagatgtaagcttgatttcagcctgctcatcatgcatttcgtacaaagccttttcaagctgcagtgaggaagaccggtataaataaagactatgatttgggtgctaataaataaatttacatacctaacaaaagctacttaggacattcagaataacacgtaatcctaaattaatctgatcaactactcagtagctgggataagaatgttatagaagcaaatatatacaggcag

SEQ ID NO: 18334 - DNA, 3150 bp, Cannabis sativa
  modified_base (140)..(140): a, c, t, g, unknown or other
ttcaaaaaaaaaaataaaaataagagagatgcaaaattaaattaccataactgagtggaccagtgcagtacatgtgaaaattattatgagaattagtttttttaaaaaaacaagtaacatttagtttttgatattaagantattaagttttaaaataaaaaaataaataaatataatgcatctggaccctccacgtgtctatatttatgagttaacggaagtaaatgtaacgggtataagagaattgtaatattgagtatttttacttccaaaaataaagataaactatttaagtgtataaaatctaaaacattatatatttatgccgcaatttaaaaaaaaaaaataataataactaaaaccgtgccaaattacctagttaaacataaacggggacgaatattaatgacggtcatcttaaacatgttttatccaatttaataattagcatactctattagatccaagcaaattacaagtcacaaataatattgaaaatgttacacatatcaatgacaatgtccatgcaaaatcggtataagggaagaaagaaaaaacatttgtaatctcgagtacaaagctgacagacatacttgcataatttattagaacattatttaataattagacttagcttattacaaaaaaaattgaactaaacaaccctataataaggctaaggcataagccattagaattagtgcaagacctaactgctggaaaaaggtaacatttggaaagatgcttttgtttctattataatatagtggtgtatatattcaatttttcaaaataataataataataataataataaataaaaggtatgtatattcaataatattccataaataaaagatatacatatatatatatatattatattagtcttgaaactaatacaagtagacaagttcaaggtcaaacaactacctaggagttatatccaaatatatagaaaataactaaagggcacagttctatagccaatagaaggtaagaaataattaaaatatataaaggagcggctcataaccaaatgaacgtagaacattacatatacatccaaagtcagtgaagcttctgctagtattatattaagagaatctttggattgaaattcaaagaaaaatttacaagacagaaaataaaaaagttggaggttgttttaaggcatcgagacctagaagaagataaagacatgaaagttttgaagtttccaaagggattagagatagagaaaagaaggattggtactgtcagtccccatgccaatgatacgagtagaaggcattcctccaccacttctacgctgaggctcttctttttgaaagctagctagcttgttttttaagagaatataaaaatataaattattaggtttcattagctggttcttgttggaactttgatgaatcttttaacaaaatatataagtgttttagtgtgtgtgaagtcgaaagagtcccacatggaatatgaactcttatttacaaaggtatatagagtgtaaccttggcctttcccaaagggtatctaaatttatgcgaatgggtgagaactcacacacttgaccaccacacactcacgcgtcgttcgggttgtgtggtgcgacactctattatttttacagaaaaattatttgacaaaataattattttttaatttaattaataaacgtatttaattggaactgattacttagtcgtatcagttaatgggacacgttcaaccaacttgccccacaattcagaaaaaacgttcttcttcccatatgatttttcaatgtattcatttatataatttgattgaattgatgggaagaatacatcttttccatatcgaaaaaatacagttttcataaaaattaaaattccatctgcgatatcaaaattctttgggtgtatttgacggtgctctacagtgcagtgggattctgatacagtacgactgggctgatttatcctggggacgaccgacgaattttggctgcttgcacactcctaggcagtaccgcgaacgtcttaaagagagtgatctagtccgcgactcaacctagaatttttcattcgataatatcgttcctcttttattaatttttgctagcaatttattcaacaattttaagacgttcgttctgctatgactactaccgatgaattttctggttctactgctgacattaacaagccttttcattttgagggcttgaactttaaaagttggagacagaagatattttttctgaccataaaaaaagttgtgtttgtgcttactgttttgaaaccagttgtgtctgaaagtccacctcctgccgacaagaaggatgaagtcgagaagtacgaatcgcaggttaaggaaagggactcctgggtagagaattattttctgtgtaagaatttattttgaatggtctatctaatgatttgtatgattattataattctgacaaatctgccaaggagatatgggaatcattaaataaaaaatatgataccgaggaggcaggaacaaagaaatacgctgtgagctgctacctgaactttcaaatgaccgatgataaatcagtcaaagcccagtctcacgagcttcaaaaaattgctcacgaaattctgtctgaaggtatgactattgatgaacaatttcaagtttttgttataattgataaattacccccttcttggaaagattttaaaaatactctcaggcacaaaacaaaagagtttttgttggaaagtatgatcagaaaaacgttcatcttttccatatcgaaaaaatacagttttcataaaaattaaaattccatttgtgatatcaaaattatttgggtgtattcgacggtgctctacagtgcagtggggttccaatacagtttgactgggctgttttatcctggggacgactggcaaattctgactgcttgcacactcctagggagtgccacgaacgtcttaaagagagcgatctagtccacgactcaacccaaaaaaatttattcggtaatatcgttcctcttctatttttgctagcagtttattcaacaattttaagacattcgttttgctatgactgctaccgatgaattttctggttctactgctgacattaacaagccttttcattttaagggtttgcactttaaacgttgga

SEQ ID NO: 18335 - DNA, 12441 bp, Cannabis sativa
tttttttttttttttgtgaaaccattttttttcttcaattaaatcctttgaccatttggatcgagttctcaatctctatgtaagtatagagtccatgatatggataatgatttatcaattttctagtggtaatgagatgaaacgtaagaaaaaagtaaaataaaaagaacgggtggatcgaagttcataaattaatgatatacctcgtaataaaatatgaaacaatatttaattttttccaatgttatattatattttattttattttattttttcataagtttaactacttttttttttataactaataagtttaactactgaaaattatgttttcccatgatattttatttttgtagcatttgactaggattttttaattcagttaatcatatgatgaatttgttttatttaatccttgtatgaacaatcttttttactactcaaactcccacagttcaagcctaacaacttttcttcttcttctttctttttcctgaataagctctttccttcttaatagataaaaaaaaagttatacattaaatctaaccaaatatataaattataatatatgtgcatggattggacatcactgtacatatacgtaaaactgaaaccattctatatatgcaacttaacagttggatcgtaatacatgcatatgaatatgatatatatatatatagataatatatatatacacagaatttcattattgagttcatcgaagtacgttagaatctctgaatttgagtaggaaagctcttttataaaactgctctctggccaaacttctgatctgcttaacatagctttcgaagctcatcagtcccatttcaatccccttatccatggcataaatcgtatcctcaatcgctgtatcaccagccaagcactccaaaaccgattcacactcaacaatctcgaaagctttctcgatttcatccccaccaatcgccgccaccaactcctcccgatcattaaacctcagccaattcctcaccacatccgcctgctcagccatctccgatcctctgttcttcaattcctctttctctgtttccaacccaccaatcactctctccccaaattccaccctcttcctcatttccgctctcaacttcctcaactcctcgatctcacgctgagctccagccttgaaattcgccacgtcgtagtaagcagccccggcgagtcgatcaagagcctcgcgcttcgagaccctcgaagggtgtgcgaaacctgagcttatcccgccgctgcctgagcccgttgtttgcaccgccgccggagagtactgtgttaagggatgatcgtgggtgaaaagtcttgtgaggttccggactaagactgggagagaggaccttgggtgagcccaagtctggagatagggacaggtggtggagccagagaggtagacgaatgggtgatcactgcgaattcggtcgttgtaatttggggagacgaagacgattggagccatgaaagggtggttttcgtggagccagattgtgatgggaacaagaggagtgttgggagttgcagagatgcggagttctccggtgacgcacaagaggttgactgccatgccgtcgttgtggacgaaggtgccgaaattgggagtgaaattgggaaaatcttggagaaacgaaaggaggtgatttcgaatcacccatttttggtttggatctaaatatgagaggttgaaaggactatcagaagagagagcttgttctatgaattggattttagttggtgatgccatgaatatagtgtaagaataaggaagacccacacttataacaacttcttcactattacatattagcaagcaaaataaaacttcttagtattattatagttttaatgttgtaactaattatttggactatatatctatcaatctaaatatatcgtttctagaataataaagaaatattataattttggtcaagttatgaaccaaaagagactaggtaatgagaaggatattgtaatttcttggaagttttgagttattgacttgatggatgtttcctgaggcttgcttctttcgtatcatgacttgactcggcaatattttgtttaatacaaaaaaagtagaagaaattcattagcttctagatttcttttcttctcaaaaaaaaaaaaaaagaaaaaagaaatatacatttatatgtttatgttttattgtttaaagacaatgttgtagtgtttgcaagtgactgatttttttaattttagtgagtagactttctttcaagttcatctcctagtatatattacaccaaattgtcaaattcctcttgcaaattaaaatatagaagtagttttccgattcaaaaaaaataatgggataatttaaaaaaaaaatacaaaaacaacaaaaaaataattataaaagtagtccacctatcccgaatgtttgagagaaaatatcatttagattagtagtcagcttatgaatcgacactttattagggcttgtaatgagaatatcatccacataaacttgaagactaaccaaactctgagctgaactaaaaataaacagagaggtatcagcttttgatactgctaaacaccagtgaaagagagttattttgagcttatcattccaagctcaaggggcatgtttgaggccatataaagctttatggagtttgaaaacatgagttgacttagttggatcttcaaagccttggggttgagacacgttcgttgtttccagcagtgtgccactaataaaagcatttgaaacataaagttgtctaacctcccaattagatgacactgcaaaagtaaacaccattcgaactgtgataggtttaactatagaactaaaagtgtcctcatagtctacacctagttgttgaagaaagcatttagccaccaatctagaattggatttattaagagagccatcaacattcaatttaattctatgaaccccacttgtttccaataagatgcatatgagactcataagaaacgaaagtccatgtccctgtacaaataagagcatcaaattcaagtttcatagaggcaaaccaggttggattctgaagggtaggtttaatggatcttggtttagtatagagtaaaatctcaagtaacttgtgcttggtagctaaataaacctttggcttataaatgcctctttcatgatatcgtgtaattgtagattgagtcctctaaggtgcctgagctaccatatcaacttcgaaagcatagggagctatagttgaactaggaggtgagctagacacaaatgtagtaggtagtggatagttgatagatgaggcatagaagactcattcaacttagtggaggtgttggaagaaacttccgaagaaactgcagtagcaaggataaaattggacacctttggaaaatgcaagtgcggctcagagatagtattaaactcatttggagaatgcaaatgtggcttagaagagatcagatacagtagatgaagacaatacattagtacttgatagaatagagcttgtagaaaattgagcagtaggaaaaataggagaactaggaggtacccgagttgataagggagatcgagttgctggaaagacaagctcattaaacaccacatttgtagctataaaaaagtctagctaccagttgtattctcacagagataacccttatgtttgagagagtagccaaggaaagtgcattctttagatctgaactccaatttatgatgattataaggccttagatgagaaagtaagcacatgcaaaagactttaaaatactgtaattaggagcttggtggaacaaacactcaaaaggactaatatttctaataacatgtgtaggcattttgttaatggagtaaacaacacattgaaaagcatgccgctaataagacatgtccaaactaagttaaactagtttctgtgatgggtctatgctttctttcaactctaccattttgttcacgagtataaagacaaggatgttagaataatatatcttcaaaaagcttatattcacctccactatcatcttgaacactgaaactgtttttccactaagcttttgatctgaatcaatatttcaaaagcttgtaatttaagggtaagagggaagatccaagaaaccttgctataattatccacaaacacaatataatatttataatcgtcattagtcacaatatatgagggcctcgacaagtcaatatatggattaactcaagaggttgaatagcatgaggtgtagatagagaaaaaggaagtctatgacttttacccatttgacaagcattaaaaaattgcaactttttaaaaaagtgaggtatatttgattttgacagtattctcgagcttacagtgccaaagattgatgttagatgataaatttaagacataagaaaccagagaataaggaaaaaatgagtctttattgattgcaactatattacataaagaaattgtattcaagtttgagtacaagttttataataggaattggaaatacaatctatagaaatagaagatacatcaaaagtaaaaagatgacactacaataaagtgtttgaaagactcgaattatcatctcctaggtggtatagacaatctttaatcttccatttgattaagactgcacccgtttatttgtccttgacaaaacaacaagatttgtaaaattctaggaagacatcattgtccatggtaagcttagaaacactaacaagatttttggctacaaaagggactttaaaatagaatttaggtggattggtggagaggaatgagaagaaatagtggctttaccaatctaagagatgtcaagtttcttatcagttcctacaaccacaatttcttggctagaataagaaattgcaatctcaagatgatccatgttatgagcaatgtgatgtagctccaatgtatgcataccaaccttgatcatcgccaaatttaggaacaaaatgaggtaatgttcagtcaaattaacttgaagcaatgatgaaccagatgtgaatttaggggtgacccaattttgtcaaatctaaattggcatatcattacagtatggcgatactgcatacaaacctggcataaaggaagatttggatcgagatttgatggttgagaaaactggtaatgaccagaccttcttgcagaaaatcttgatgagttttcatgagaatttcctctaccaaagttgttgtaagattgataaggcctaattattaatccaaaggttagatttatagacatcttgttaaaagatcaatcatcgaagtgtgacgttcaagacgagtttcatgagacaccaataatgcttgaacttcctctagtgaaagattgtcactctgagatgtaactccaaagacaatgggatcaaactccagtccaatgccattaagaaagtgtaacaccaagtcgaaattagtaagtggatgaccaaatatagctaatgaattaaaaagaaaatttgatcttatcaacatagttatagatcgaaaaagtacctttgtgaatattagaaagttgacctttgagttgaagaagacgagctttagattggctcaaaaacttttgttccacgattaagatcgccattgacgatcagagcctaaaaagaagaaggttatctttccttcgtcattgtgtgaagacaggattgagatcgccattggtgagcctctgaggtggtccaacatcagagaataaaatttcgtccagctcatgaccaattactgttgatatgacttgagattttcgtgctaaaaagtttgtacgatccaatttgattgtaagaaaaaatgtgagagaattaggactaatttttaaccagcataactaactaattagatggttggttataatgttttactaataacttaattggtcctaaacaattaaggccatctcaaagatgatatgggagggatatgtgtgagttactgggtaggagttcgatctttatattaaaaaaagttaaaaataatagatcgtatatattaactctcctttttttttttattggtttatattactaccaagattttcgtattggacgtagattgtttgattcataaaattataaaagaattatttcacaaatataaaaaacaacaaaaaagaaattataaaaatacagttgtacagaattttaaatatttttacgatttttaaaattttatttatagaaatacagtctttttatgttgtactcttattaatttgttgttgattttttgttatatgtatgttattttttattgttatttggagttgttgggatgttattattattttctttttactttaatatagtttttttattattttttgtgttgtttttataaaaaatcgtaaaaaatatattaaaaaaaaatctttaaacgtaaatatatatttttttgtaaaaattaatattttatgtaattatcccaaataataacctataattatagtgaaaattacacaatccaattatccataggcttagtattttgtcaattgaggaatataatattgcatttatattgaaaagagacaaaagtaaacaatttgggcttgttctttactaagatccatgtacaaaatggataagatgaaacattgtagcccttcttagaagagagttttagaatatttcttacttaaatatgatacctctaagtttggtcattttaatgataatttttttttcttatttttaaactatttaccatatttaatttaatttttaaaactcatatttaatctttagataaattacgactaaagatttttcattaaaaaaattgatttctttatcaaaaaaaacttatttttttttatcaaaaaactaatttttctttttatcaagaaactaatttcttcatcagaaaattaattttttcatcaaaaaattagtttattcatcaagatactagtttcttcattaagaaagtagttttaattatatagacgtaaaatttatacacgaatttttaagtttttttagagtgaatactattttagatcctgtgtttttcaaaaattactgaattgatcatttattttattaaatgacaaaatattctatattttccaaaattgtaaaaatagaattttgaactcaatttttgataatttttttaatataaccaacttgaagacaattttgaatacgaacaaatatagaaaatataatcacatttgtcataacatctctagatcgcattattattaaattttattttggcaaaaatcagttcagggtcctatttatactattttgaaaagtacagtgtctattttgtcatttaacaaaattaatagtccaattggtaatttttataaaaaaaataaggtctaaaatagtatttaactatttttttatggtattatttcttatctataatgatttattccatattttaatttttttaaaaaaaaaaaattatcatatttagtgtgattaaatttacaagacaaatataattatatctcatgttaaaagaactgttaatcaagcagctcatgaactcgctaaatttgttttagggttagatgatgacatatgttagataggagaaatatcctattttattttctctgttgttgtaaatgattccaatttataataagagtgattattctcaaaaaataaagtagaatttgatatacaaaggtaaagggttttcaatgtaataaatgaatattttagtagttgataggttcctttcaccacgtatacaattagacattgcttcataatcttcgctattatttatattattattattattaacattttgaccccacacaaagcaattatgttacattttgggcctactatgtttgtttttttttttttttgcaaattatttaaaatagaatacagaaaatttattgtttacttagaaaaaaacgcggatatggataagaatagctatcacaaatttaatatttaataagtttcattactaaaattttacaatcgcaatgattgattactctgcttaatactaaattatagataaaaatgtattttaaaattgcaaagagaaaaaagcctatgcttttaaagcttaaaaagaataaagatatggtattttccgagattgctgagaggcctggttcagtacgaggcacgcaaacgacaaaattcggtgcacgttagcataaagtatagagcaaatgacttctatgcgccaggtgttaaggattattgctattgttataactgacggaaaacgtttgagttttcgtctttgaccggaaaaggaaaacgactaaactaaataaagacaaacggcgttcatctctaccacccatctccttgtgcaacggaaaataacagttgtgctttctcttattgttatttctagctacaaaatatattagcaccattctcttattgtttcttcttccctttttcattttaatttttaaccacaaatgttaccaaaagtaataattatggtatcaattcaaaacctttatttgatgattttaaaaaaaataaataaagaacttgtactgttgtccatatgttgaacaaatttgggactttgaagtttgatacccatctttttttttttcttttgcaaagtcgtttgatacccatctttaattcaatcaatcaaggtcaaatgaaaactgtattataccaatatgtatccaatccaaagtttaaaggaaaaaaaaaacactgacatgtacatacaaatacaaaaactcgatccaaatagaaaaaaaaacatgagacaaaactcgatcgtaactttcatcatgtttttctctttatattatcaaactgtatattctatgctagtctgttgatattaagtaaaattagacccttacaacaaaaaaacagaaggggatcgacatgttacagtagtactatcacataagcaaaccatatacgaacgtgattcttccgcagttaaaaaaaaatcaaaaatcaaaattttcatggctcatcgaccataacagaagccaaaccagtgaccttttccttgaccccaaaaccaataagttgtctgggcaccactatccattctttcagagctttagatttttcctcttccaccacacccgactcggtcttcttctccactgaaactgagttgcagcagcaccgacaactcggaccggactcgccgcagcagggaggcgcgtttcgtttgtgagaagaaagccacttggctttgatgtaatcagccttcctccacggcgggacaggcattcctttcttctttaagctctgcttcgccgcctcagcgaccaccggaataatcctctggagccggtcggctttcccgacgaatatgtacggtatagtttggagaattgtcttataagtcttggttggtcgagcgatttcaaactctgatctaaaatcaacgtcgattatcaatcgttcaccgtcgattataacgtctatgtattcgtattctcctgtacatagatacagacaaatttaattaattaaattggattggattttttcttcaggaaattgagcactgattttttttttttttttttttatatatatattttaaaatttattttattccttatgtcagaaaaaggaagatgaattaaattggattttccttccgtgtttcccagcaaccaaacaatatatatccaaacgattatttaggaaatattagatttaaaatgacaaaattagtaccggcagggtatgagggggatttttcccaacgagatttgcagattgaagcgtcgtatccgagagccaataatccatcagtaacgatttgtctgcaaatttcgtctttacgcttacagatcttgttccgatcaacgatcctagcagtatctgctaataaattcctttcactaacactcgagcaaagaaccaaaccctaaccacacaagaaaactgttcagaaacgaagaacagttggacagattttttttaacattattatactcaaacgaaaaattcgttcatacactctgatcaatttaccttgagaacttcacaaccctcgccagaattgactaaattggaatcgtgaccaaatccattaaacaagtccgaatcttcttcggagctatcgttacagctcctgttgaagcagttgcagcgggtccggccacacctcgaagcagaaatttgtttctcgtttccattacctccctcgataaaattctgaaccattttcgctaagcacaccgagctcggctcgaactgcaggtcgccggagctgttattgttcgcttctttgatgaaacgcggttcgtctccgctgccggccttctccaccaaaggcgcaggcgcagagagcctcaagacactcgtgaactgccgctcgaagagtcgcttgaaccgtgacgtcttcaccgccggtttaactggttcgattaaccgagtcggttcctgagtcggagtgtgacaatcgattggctggatcttcatcgggaatggcatcacttcaaaagctctttcgtactcgatcggtagcacctctgctatttgaaaaagctatcttctgaactccattttcagaccagaaacagagctagttttcccagtttgaaagtcaaagaatttgaccgatatatctttcttctccaagtcctaaaataaattaaaaaatccccaggagggcactgaacttcagaaaccaagaaggaaagaagtacaaccactctctaccgaaacccaaaattttatataaaaagaaaaaataaagtgaaactcaaaaagggaaaattatgagagtcacacaataaagcctatgcttttaccaaaacagacattgaaaactctgcatcaccttcatcgatcagagctacgtacagaatcgactcagagatccacaattttgcaaaaaatgacgcagttgagcaaaattcgaggctcaaaaaccagacaaaggctcgttttaatctctgcgtgtttatatatttataaatatgtatataaaatattatataaggctttcgcacctctgattgccaaaccaagtatggaataacttcaaaactctgccaagttaaagtcgcttttgcttcagataaaatggttagagattccccgtgatacgcgagagtaagatactatataagacgtcatggccatttaaatttgaataagcaccgatcaccggatccttcatttaccggcgaataatcaccggcggtaagttttgaaaatgtgaaagagagaggaatggggcgatcagtggtttcgtgttgttttgggttacagtttcttaagttagggggagacataagcagcagaagcgtgggaatataaagatagaaggtgaggagctcagtgctgactaggactatactgccacctgtaagtcttacgtgtcaggatgttttatctatctccctcggaaaaggaaaatgtttgaatccaatcaatcgatgatggatggtgtcagcagtttgaactattttgcagttaaaacgacaccgtaataatgacatgattcttgttcctgctatgcccacaattgttttcatcaagtcaccgaagtggtggttactccatcatgtctccatctccgttaacatttcaggttttaatttcatgaaacagtctttgagtttttgggaaagaaaacaatttgttgtaggttggattggaatacataactaatttttaatattaactccaacaaaaaaaaaaataataataacaaaaataagtaaaatttaaatgtctattacgttcaatactctatcaaaatactcttaaatgtaattaaaaatttaaaataattaaaacaacaattgtcaaataataaactagaacaagcatcataaaaccattaaaaatataatttatgtataattttttattttttaatattttcatcatataataaatataaataaattttttaatatatataaatataattgaattagattgatttttaattaaattttgagattaaaatatataatatataatatataatataataataataagataataattagggatacataattgaaccatagctattatctcaagtttgatagtacaattcaatcaactaagtcttcttctttaaatctctaaattaaaagaaattttatttttatctgattatacaattgtgatgacaatatgtatttataaagttagaaagatgagcttaccaaaggcttcaggtaattagaaaaaacgacacacttttactttaattaaactttacacatatgttaagccttgttgggattaaactcacttaatttgtcaaagtcaataggtccatctattcactcatcagatgaatctgaagaaatctgtttttagttgtaatagttggctttaataccaacttaaagaggaccctaccaacaactatacataggagtgtctctactctttcaagggatttctgatctccaatctccaaagctcatacttcagatttaaagacaagtttagggagagagagag

SEQ ID NO: 18336 - DNA, 5539 bp, Cannabis sativa
aaaacttatatagtttggaaattaatttactaaaaattaaaataaaaaacttaacaaaagctatatagtttaaggaactgtatcacaaagcgatttaaaaataaaaactggtaaagccggtgctaagagcaatgctcaagtggaaaagcagaagactcagacttgtatagcacagtttagaagatgaaagagactgatgatgacgaagccaaactaagttgcagagaagaggaacaagaaaaacaagaaatatggagttggggggctggaacagatggccaactgggcacgggcaatctccaagatgagctatcccctcaactacttaaactcccttctctcttctccgctcgacccatctctcatctcgcctgcggcggcgctcatgtcatcgctttgacctccggtgatctagtaatgattgattatatgctttaattaattattcatttttcttcttttggggtaactttttgttttctttttccaattactttgcagagggaaaggtattgacgtggggaagaggagcatctggtcagttaggccatggagatatgttgaataacccaaatcccaagcttgttaatatattggaatcatattgtataacccatgtttctgctgggtggaaccactctggtttcgtttcaggtcatacactcttaaaaaattgtattagtatgttgcaaaactatctgatcaaactcaagttttagactttttctagaaagatttttactttgaggtttaacatggatattgaatttgcactcttgttttcagattgtgggtctgtttttacatgtggggatggttcgtttggtcagcttggacatggtgattataaatcatattgctcaccgattaaactttcctattttgttaataaccatgttgaacagatggcatgtggcatgcgccattcacttgtcttattgaaatttcaacaaggtattaggaaactgatgcttttgtgttatgtgctgctaatcacaacgtcttagtttctttgatatgattaaaccctttttgttattgatatcaaatatgcttttgctcttctgaaatgcttaaaccctctagtgtgcattgttaattttgagggcaaatcattctaacatgtaatttttcttttgtatagtcgaaagtggaattagttttcacttaaaaacgtacttgttaatttagttgagtttcctcctaatgaaagagcagttttgtttggattggaaaatttgcatgttttggatgtgtgtcaactgtcaagcatgttttttttgatggtatttgtccactctaccgttgacaacgaaaatcattctgatacaggtcattctggagatcagatttatgcatttgggtctgggaaacgtggtcaacttggtatttcgaaggacaaagtcaagtcagttagtcttcctgaagttacttgtggattagacggtatcaatattgtaagcatagctgcgaatggagaccatagtgcagcattatccagtgagtccctcaaatctttgataactatgtagaccttgcctagaattttgaatcttccagttgactatggttttagttttttttttcatctattagtggccaatgttaaaaaaaggaacatttcaagatcttgtatcaatagtcactttcatttggtgtaatcctcatcatcatccctaatactgcgtcgttatattttttcgttgtccacctaaatagatgatgggaagttatacacttggggaagaggatttcagggtaagtctgatgcttactatccggagcatttaaccacatcattctgcagtaccaaagccactcttggatggaatcatgcacttctgttaactggtttgtacattcatctgtttatttctttaatttctcttgtgagagttgtgtgccttttgaagtttagtctgagatatatattaagcaggtaatggagaagcttgtattcttggtgggaaccggcatggggtgctcagtcgtccagataaagtgagtgcattggagaacatgcaaggtaattatgccataagttcatattgctgttcccttgtagtacattccatgtatgcaaatttcttattgtattcattagttagataagatatcaaattcatttttttttttcaaaaaaaaaaaagtatagataacctataaggatcttacttgaattgcattcacatttcaatggaagattcaaatgaccttctagaggaagtccctggtctagatggtgaaaaagttgtagatattgcagccggatctgaacactctgctcttataacaggcataatattctattccttcatcaaatctataaatattaaccacagcatgttcaatcctcaatgtttctctggttttctaactgctttcagttttttcgattaatgacgatgacagagaaaggagttgttaaaacatggggttggggtgaacatggtcagcttggcttgggaaacacagttgatcaaaccagccctcaaccagtaactctttacaatgaggttccaactgaagccgtgactagcaaggtctactgtggaagtgggtttactattgtcataagaactaaagatgctcctcttcctcccagatgtaaatgagtatcaaccatggcaagttactagatattcttaaaagatcgtctcacttactggaagagtcgaagatttcttcacacccatccgcatagttttttattttaggatatcattgtatgtaacattatctattatgattttgaataacttagggcctcttaatctgaaaataaatagaaattgttgttcagtgagtgtattttcatttttttttactttttaagcatatttttttctattttcttctcctcgcatcactcttccatggcttccttgttcagtcccttgtttctcttcctcattcaatcccttctttcttcttcttccaacaaagcctctccattgcatcaggtatgaatctaacccaactctctctgttgatatctttctctttctctatcagctttgatctttatctttcttctatcttctaaaggtttttggatcttcaacaataccgtgataaccaatttaggtatgtttatggttcataatgtgaaaaatagtctctattatttgttatggaaatatatccaaaacagaggaaaatggaaatagcaggacacctaatgttatatgctgtctgtcaactcttatcaaggatcaattattattgtttgatttgaggaaaaggaaaatacctataaagaatatattatcttgctctttttgacaaattttgaattttgtgtctaagcattccacatagacgtagttctagcttggtgttggtgatgaaaaagaaaaaagaaaatctaaaatctgaatctgatctgcctctctctctctctctctctctctctctctctctcttgatcatcttcttattgggctttctttctttgtttgtggatagtcaatatctggcttctggtacctagtttcagttactactaattaatgtcttcataactttttcattgtacatgtttcattctgttatgggtatccattaatttataatactcatatgtttattctgcgatcaagttaaaattagaaaaatttctctaaatgaagatcttgaagaagaaatattcaagtcttccttttagattttaagcaaaaaaaaaaagtgtcttctatcaagattagttatacacatcagttagttaatggttagtagactagctgacttgtttagagttgccttttgtaactaatttgtaactgtttgtagttacttgtttgagcttaaacttgagctatatatatagctcactcattgtattcatttcaatctaattcaatactgatttgtgtcacacttttcttctttttctgttacggtattagagccacgatcatagtgtgctcatctctttcttctcttcttctttcatctccttcagttgttcttctctgcttttgtccatggctcaaggagatgctcaaactcgaagcacatcgaaccaaggagatggttttgatgattctaacagggatgaattaaatagatcctctattcttgaactcggtggcagatcgtttattgatgatgctcgaaagtcatacttcatctttaatggagataacccacgagcaagtttagtccccaagattctgactggctgtgagaattacagtgcttggagacgttacggtggacctcattgctagttacaagatcaaattcatggagggaagattgccaaaacatgatgctaatgatgaagagtatgatctatgctacagatgcaacaatctagtaatttcatggatatttcatgctatgtcaactgaaattgctgacgacataatgtatctagacagtgcggtaaagatctagcctcacgaatccactaaccaagcaacacgctttggcgagtcctccgtgatatcaccaagaatgacaacacggacgatccctttaatttcttgatggcctgtccgtaagtcaaagacacagtatgaacctctgggggaaggttgtaagctcacgatactttcaagttccgagagtttgagggtaaatgttatccttttcctagatgggttttacttgaaagctgcggaagggtgccacgtcaaatcatatacgatatcatggacccttttttttagaggatcacggaagatattgaagtattcagaagaatgttttccttgcaaaggacaaaatgattctcgaagttctaatctggtgcttccgctatttgaatgcaaatgggaagcacgagcactccgggatgatcaggaatcgactatcctaggaagcccttggctggacttcctagaagctccctatgacctaattcgaaactacacccgactgttacgccttgtctgacgccaagttagatcctgcccctacgtcagattgtggttgtgagcgtacgtacctttgtagtgcttgttgtccaacgacttgtctaggcaattacttttaaaggagatacctttgaaagacacatgttcatatctttacgtggtatcctacaccatacgatggaagagctacctaccaaaccagcggttagatggtcttgtgatgctttcaacctttcttgcgtgtggagtaagaaaccctagctacgtaaagggtgtccttacccacttatgtacctataaatacctctattttttatgtacagaaggtgaataatttttacttacaaaacctctgctaaaattcctagagagctttcttctcaaagacaaacaaaaggaatatagagattaccattgtaaacatttgtaatactcaaatacttgccaaagaaggctaatacaactaactcgtggactaagaatcattaacgcctggaccacgtaaaaatttgtttgtctattatttaatactttgcatttccttaagttcttattaatccgttttcaaaaatctcagtaaacagttagaaataataaattgaagtatagtaaattggagtttttgtattttcacactttaaaaaagtttttttttt

SEQ ID NO: 18337 - DNA, 6655 bp, Cannabis sativa
gtctaatgcagaaatcagtaaagaggttgctgtcaaactgattttcgttgtttgacactatcttctgtaggagtccaaaacgacaaatgttgttcttgaccacgaaatcaagaaccttctttgatgtgatagtggctaagggctctactttgacccatttggtgaagtaatctaccgtcactactgtatattgaacttcgcctttccccttaggtagtgaaccgatgaggtcgattccctacaacaaatggtgcgagatcttcgtttttggtaattttagtgttctcaagcctttttgagacaaaaataagaaattatgaaggaaaaagaaaactctaataatgcttagttggatttcttgttgcctcaatttggtcaaggtttgcatatttagctccaaaattcatgatctacagtcaagagtgatcactttccaaaaataaatcaaaaaattctatgttttggatgtggaacatgctccgtttgtgactgaaaataaagtttgaagcttcaagtaaatttttgactacattcacttctaagaataactttttaaataaaagttttatatctctcttttatcttttcaaaatattttgaatcgtctaattttgaattacatcgagagagtaatagtcaaaatactatcgatcgttgcaacaagaactgaaaactaaaaaatgtaaaaatcagcgaagaaaatggaaatcatttgtaaggccgcaaccttggttttttttttttttggaaaactcggatttttgcatcataaaatcagggttgatggcaaagctttgacaccattcgaaaattaagagaaattcggagtgtagaaggagagcgaggagtagaaggcaccagtggaggactccaaacagtgttttatctcttcaactctatcttttatgtctttagttaatttttttttattattattttggaatgtcatctagtagctaatttttttttaaggattattacgtgaactacttgagtttattttgtggattaatgtgattatacaatttcttcttctcttttttttcaattccatacaatttgttttaattttgtaattattgactgattacccttaattgttatatataaatttaaactaaaattctgaaaaataaaatttaaatatgctatgattattatggatataaaattattttgaacaaaaatatttaagttgtttgtatgatttattaattgctattcttaatgctatatttgtgaataaacttaccataaaaatatatgaaattttcatatggattggatttataagttataatcagattataaacttcttaagtcaatttatcaattaaaaaaaataattacattagaaaataaaataaaaaataattggagattataataaccctcgttattttcacactatagtttttttttatgagtttgattctcaagttgttttgtctttgattataacaagcccatgaatcaaagaacatgaagataattttatctacgtggagtctaacttttagtatgatatttattttctattacaaatcttaaaaaaaaaagaaaaaaaatcataatttccacaattctcacaaaacacgatgacatattttatattaaattattcatttggtataaatttaataacttaaaaatactataattcctgtaaaatattgtgggaagcgtggataaatattataattattaaatatttttattgaaataagtaaatataatcaaaagaaaaaaaaagagagaaaagtagatagagatgtgtatagatatgtgtgttgtgatttttgtttaaagaaataggtactacaatcaaataaataaatatttaaggtgcgttcgttaatagtattctaattagtttttgttttcaaaataaaaaaataaaatattttttaaaattatattctataaaattatttttactttttaatttttttaaataagaatgtaaattttaaaattaaagaaaaatcactttaaaatttttctcaaataatttctttaattaatattttggactctcaactccaacttacaccttgtaaaccgaacctgatcctagacttggatccactcctgatccaacttcggacccggtcccaaaactcaacttaaataaaatcaataaataaaaataatttttttttaaaacaaaataaaaataaaatttacataacacacttttatttttttatttttaaaattgaaaaataaaagtagttatacaatatatttttattttccaaaaacaaaatttttaaaagtaaaaattttattttttatttttttattaaatatttaaaaataaaagtgttaccaaatgttatcttttaagttaaaccaatattactaaaagtttacttggcccgtgtgtgtgagagagatttgttggtgggcgtattactcttttattaatatctaggaccggccttataagaaaatattagacaaagtgcccatatggcctttcatttgtttatcattcctttagtaaatgaatcaacttagtattaattatattttatttaaaaagaaaaaaattgtttgttatgttttcatgtgtataccttaaacttaacaaatcaataggagaaatatagattgatcaggaaatagtgcctaaaacacataaatttaacacgaaacgaaaacttatctataagaaaagaaaaaatttaactaagtgggagttggttggtggtttaacttccacaacgaacaaaacgaaactggctgacctttccaccataaccccacaaacccatctttctcttccactctcatttcccaattactgtcgtactttctcagaagagctctacctccatcaatggcttcctctccaaaactctctcccataaaccccgctcctctcattctctcacaccatttctctttcccttcattcatctcacccctgtttgtcaaacccttcgcagcttctccttccattaatcttctctcctcgctctctcgccctttgaatgcgctgctggtcgactccagaaaccgccataagtactccactttccgagaaaacccgcaggcgaagtttccgcagttactgcagctacattccgtgttgttctcgcttagtataatccctttgggctccatttttcttaatgttttcaaaaactctgttctctcatttggggtgttgtggtttaggtggtggagtctgaattgggcacagatgattagagtctcgtcctctgaggagtttatgatctgggcatttagattctgtaatggttgattgtccaatcggttgatctctaaatttatgttgatggattttgcataaatgagaagccgagttgagaaattgtcacctggtggaccttttgagaatgccgtgtcgttattttggtcagtgccggcgattattgtaatgcgaacaagcggaggaggaccacctaatcttcgggacaaggcttccagaagtattggccattgaatcccatgtgataccccaatatcaagaatgtgcagactacgtgttcgatcattttcctcattgagaagttggaggatacaagagtttgtaatgttgttagggaaggcaaaccaaggactaacctctgaaaatttgatcagagatttctgaaagaatcgcggttctgctgtagagaaggtaacacaccccgccgccggggctgagacagaaggggaggaggataagtggtgagtcagtgcccgcaggccgtgaaaggcgagcctatggttggcatctcctgtgagagaaccaagctcgtgtagaacataaagaaggtgttgtacgcgcatgcaatttccttcagtgattgcagtggcacaaggattgagcagctgctctgcccatctaccttccttgttattacagttattatttcccgcacccttacctgaattcctcttgttcccaactgttttccttactgcaaccacttcttcaacagctgtgtctccatcctcaacctggtttgtctgccggccttggttttttcgcggattatgatggttttgagacgttttaggaattgggccatcagctgtttttcgtttttttgaggaattgggaagaggaaggagattggaaatggtggaatcaggagggctagtggtggtggtgatgatagtggcagtggcagttacagttgcagtggtgggagggctataaacggaagtgtttatggtatgaagtagatcgtggccaataatatcttgtctttcatcccaccatggatagccactgatctcagcagattgatatggatcatctaagaaagagggaaggaatgaaactgaatcttcaagccagtccatgatttgatctgaggtgtggtttgtcttgggctcttcttaacttgtcatactacttaaggagaagaattagaatatctatttagggatgatgtatgaagaggaattagcaatggttgatgttgatggctaaagaggatagagaagaagaaacagacttggtcaagaaattattaaacaagtcgaaaagggacaaagaatggcattattccatatgttggtgtgctgttggtttggaggatgtgatgtttttatttaggaagtaaggaagagtgtcgtttccttgtttttggggttgtcaatagattcctttgtataccttgttaggttgagaattgagagagagaaagagatccaccaatgaggagtggacagagggaacttatctggaaattaaagattgtttagtaatgtaatgaatggggttgaagttaaattgtcaagagacggcagacaagctctctctctctctcatcatataatatatagggtactaaatagtggggcttgccaatctttccgtaccagtgaggaagttttgtgtacctttgatttaatatttgatggttgagaatgaatcgtgtgttagttgataatatgaaactcaccgcattgcataatttactaaatatataacaatgttttatttttactgaaaaatctgacaatttttattatatttttagcaaaaaaaaaaaaactttgatgttaatattttagaaatttctttctaaagagtctttttggtagattttttttatcagtttcagcatagtttagtcaattacttatcacacatataagaattttttaaaaatttacaacgatgttaaacaactataacgtatacgatcataaaaaaaataaattaaaattttttcctatataccgaaacaaatagaaaatttatcgaaatactcttttagcgggtgtactgtaaacatagccaaatatttttataacaatatagaattaaaaaaatttacattagtaactttcaacttatatctaaaaagatatattaaacttagaaattttttatagtagatccctataaaggatcgttttagtagattttttatctattttagtagcctgaaattttttttagtttaatcttttttatgatcgtgtatgttgtaactatttagaatcatttgtaaatttttagaaattctaagtattttatagtaccaaaaattaaatttaaacaactacttactagtttaagagaaaataattatgtgtacaacaaaatatataaatcttatattcgtcattgtaaattatttaaaatttttgaaaattcacaagggttcctaaataactattgtgtatacgattataaaaaaattgactattttttttatgtcgaaacagttagggagtctactgaaataccctgccagtgaggtgtactaaagacttaaccttaaacttattaacaatcttattaacaatatcaacagtgtgtacgcgtcttttcaagaaaaaaaaattagtgtttatatttgctcaattatttaaataataatttataattaaatatttttctagtgttctaatatttaactattgggtatcagttttactcaaaaaaaaaaaaaaaactattgggtatcagttttgtatttatattttgtaaattttatttatttattttaaaattagagtggattttttttttgaaaagtttgataatatttattatttttaattttatatttttgcaaattagctaaattgattttccttccgacaacattttatatttgttggatgtgtttgttgagttgatatttatttaacttttttatatatacaaattttaaaaagttacttgctatataaaaaattaaatgttctatacataaaaaaaattaattatgtttttattcatatattattaaaatatgaattggagtaccataaaaatagcaattagaaaaaattgtccattttttttttataattaattatagctatttaagaccacatgtaaatttttaaaaaatttcgaataatttaccgggctaaaaataaaatttaaacaattacttagcctgtatataaaaaaaatcgtgcgtacgacaaaatacacaattttttttttattataaactattcgaaatttttcgaaaaattcacaaataattttaaataactataatatataagaccataaaaaaaattatattaatttttttttctatatgctaaaacaattaggtgtctaccaaaacacctcattagatggatgttatatagacttacccaaataatatatatctttatatattaaaagtgcttatctaacgacatttcttggtttaac

SEQ ID NO: 18338 - DNA, 2723 bp, Cannabis sativa
cacaaagaaaataaaatatacaatcatcatgatatgaatacatacaatattcatttccacataatcaaaacaatctacaaataacaattgaaaaaacccaattcagtccaaaaatatataaaactaaatataaacagattatcaaaacaagtcaaaatatttcatcttctctcagtcatttccacaaacaggaaaaacacatctcaaaaatcaacaaagaggtgagaggattgaataaacataatacctgtttgttaacctcaacaccaatagctctcttggtaatgttccaaacacgaccagttcggccatggtagaacttatggggcatacccttgtgaatggcaccattgaccttgatatcaacatactcgccggtcttataggtcttgagataggttgagagaggaatgtaacccttcttcctgaatggccgtgagaagagatcacgggtacgagacctcagaccgtgtccagccggcattttcttcttcttcttccaaccctaatttctacaaaatcaacaaattatcataaaatcaaaattaataatcataaaaagtaattaggatctaaggaaatcgaaaaaaagaaaaaagataaaaccttgaattgaatttaggtaagaaatctggaaaaaaagcttaccgccgaagaagatatgtttgtgtcgaagaagaagaagggtttaaaccctaatgtgcttctttctaatgggctaatgggctttttctttaatctgaagccttttatgtacaaaggccatatctatttttctctattgggctcattcatgggcttttgtttcttaaaaaataaagaaatggttaatacaattttacacatcctccgttttacaaaagttacagattagatcttgtattctaaaatgatactatgagctcaatttttgatatttttttaatataatcaagttaaagataatctttagcacgaacaaatgcagaaaatgtatttagttttatcacatcaactctaaattaggttattattaatttttattttgacaaaaaatcaatttagagtactattttgtatcattttagaaaatacaaagttcaattttttttataacaaaacaaaaggtcataccggtaacttttacaaaataaagagtccaaaatatatataaatattttcatggattatgttttacatttttgtgtgtaaacttttttaattatatttttaagaaatctcatgaaagcaacaaaaatacaacatagtataagagcatttttgaagatacaaagctaaaaatatactctaatggtgtattaaaaggtgatacaaatttgacacatatcagattatttctaattagaaatgtagaaattgtgatatgtttagtacaaaaataattttgtagtatatttgcatctattttgagaattgtgtttcaatgtacaattataaaacttaatgcgaaattcaatacttttatgtataaaaaaaaccttattaaatactcagatgtcaggtgttttggaaaactataagtcatttacctgttgttgatggaggtgagtgttggtctaaacttgatctcaataaaataaagataaatatagatctgacattattttaagaagaagtgagatatggcttcggttttctggtgcggaatgacttgtgggcttggtttttgctagtgttttttgtatgaatgggtcgatcactcctcaattggctgagatcattggtataaggaaggtgctcagttggttgaagagatttcagttctcaaaggcagtgttagaatcagacaaccttgtggctattcaggctattcgtagttcatttgtgatgttgtctagttttgggctagcttgtcgttgaggaatataagttgctttactcgacatcttgacccatccgtagtccgctaatctaatcccaacgtctttgatcctgacaagcttggataggactagatctctgtcttttgcataacaatttcattgctatgttgattctcaatttagtatggggaatgccttacctaaacttgttttaaacattatgagcaatttgctaagtttttaataaagttgaagttttttttttgaataaatcatagaattagaattagaaaaacaaactaaataattagtcgcctaattctcaaattgtttgacaaaaaaattaaaataaaatcatatgaaaaagattgcagcatcacagttgaccttaagaacacttatattctgtttcatccaacactctaaagacactacagtagaaactattgcagcaagtttaacctcgtagcttgagcactcaactattgtgtaatgtatgtaactacactactaacaaccccttcactcgaaaagaacttgttatttccaaccactaacaatgatttaatagtaagtcattgaagaacaaagaaaaactaacaatgcaacaaaataaaataaaactatgtcacgtagacaagactaaaacaggagtgcatataggctgggttgactagattagaggtattttaatgagccaacctaacgattgcggtttggaaaagctataaactattcaattttttattctacacccaaccctacttaataatatagggggtgagttgggttggattctgttgacccaggttttcggtaaccaattaaataatatatctaagaaagctgtaggaagtttaatgcatggaatttttacgtggttggggcattaacgagcct

SEQ ID NO: 18339 - DNA, 5633 bp, Cannabis sativa
atagggtaaaaattattttttgggcccttatttagaaaaaaaaaatggtatttttcaaaattagcaaaaaaattgtataattttaaaaggtcaaaataggtttctaatggtatttgcaagaaaccctagctttgtattcttggtttctcttgaaaaagaggaaagcctagagtaaatttgacaaagcttcaactacttattttttgatccccctttcgtatgagaatagaacatgagtaaatattttatagtagcctcatcagaccgtacatctttctttatatatccagataataagtaggagcataaactgaaatattctaaagctacaaagatagttattaaatcgttatagcaccgcataaaaaattcctcctataggctgaagtgtgggtgtaaacatgcccataacccggctaggatttttacagtaagtccactattggggtaaaatacatgcaataatttgaatgttaggcccccaagaagctcttgtgcttgtgcatggaagcaactggataataggggactacaaatagtacaagaaatatgttgccaaaaggtttcactttgtagaataaattttcggacttggacacgtattgccaaaaggtttcacattgcagaataaatgctcggacttggacacatgtcgcgaaaaggtttcgccttagaaaggagacacctagacaaactgtcaggcaaaaaggtatgttcataggcgaggcgtatgcactagcatggtctaacataggggacatgatctgatcctatgtcagacaaagcataaccatcgttaagaccatatgggttcctctacacagaagacttctggctgccttatggtcgactggtatcaatgctaacttttttgaatgtctttcaaatgtctcttgggcatataacaaaccttggttgtctccgcaccgaaagagctaataattcttccagatctcagatatattaaattacaatccacatgtcttccaccttaaaaatacggataacatttaccccaagcttttgagactttgagagtgcggaagcttgcaactttcttctagattactagagcataattttgacacgtgggtatttctagatcatgcgaatgcaccttttgggcgtggcttttaataaaaataaggctcgaaagctttttttttagcacacatggtattagtcgcatgtcgcatgtttctcaatttcatgggtgacacgcgcctaaaagatgcgctccttgtggagaaatgtgtctgtcagtagagtggtgacgtaacaaccctttttaatgtgcactgggcccaacactgataatgatggaaaatgcttcgattttggcaagagaaattaaaggatgtctctttaacttcttagccatcagatcagttggggctcattgtggagttgatctggatcgtcagtttcaaatgatacaatttggatcgagacataaattgacgtgaaaccattagtcttcactttttcaccatgtttccatttttcaaacctccttagtttctaagaacttgaaccataaccttctcccaaaaattaggtaaaaaattcttatgttggtgcttcgcaaccctactagcgaatgatcaaagattttgattttattttcgattatctctttcaaattcaagcacactatttcctagatgcaccaaattttgatcccaaccagtatcacccccaattggggaggagttcagcattcaagcaaaatgcgaccaaattataaagtgggcatgcagcttttaggctactctcaacaatcaaccctcctcttgaaatcgcatcacaagtaagtatctttgaacttgttgatttttgattttatgttaagataaaagatcatatttttgagctctgtctcaaatttctttccatgcaatcacattagaaagggtatttcctcatccccatctggggagcacccaccggtcaggaatgaagtattccaagagaatgcggcattgcatgtcaagttagcagaaagcttatgccgcaacaaatagctgaaagagaaagcgcaaaggtgtggggaccaaactcctccaccaagagagccttctctccctaggagaagaagaagttgcccatgaaaagagtatatgccaccatgtacaccaagggatctaattccatggtgaccctaaaagtaccaatccaccaaggagaggggaccactaaactttgccaaacattagagtacatgccagacatgcacatacaacccatgcactattacatggagaaggccatggcgctatggcccaccatggaggtatccataaccaagcaaaccaagccaataatgctcttggcaataccaatttgtcaatggccaacatgggagtacgtgcccgacacacccatgccactcatggaccattgcatggagatggcccacatggtaaacaaaatttgtctccaaggtcactccttggaaagaaaagaaagaagaaaaccctctaattcaaagagaaagagatgacgtcccatgggtagttgtgccacatattaccccatgaggaatcaaggaggacccaatccacataatttttctcttctctatgaatcccaaggaaatatgaaatatcttcatagaaataataatataccgccacctttgagtaacaatctccatagaggtgacatgggagttcgtgtcaacaatgatgcaaatcatgcattaggtaatcaaaactgtgtcacacatggcagccatgacccatctctgaccacctcatgttctaagtaatataagggtcgacgtcgaggaaaaaaaggagaaccctcaccgtgaaagatgacaacctacttaagaggcgagttatccttcaaggtcacaagataccactacattttcccaactgggggcataaggaaatcatcaacaaaccttcctcgaagacagcgacaacactgattcgctaaattgctccataagtatttatgacgacattcaactttggttctatcaagcacatcctcaataccatggggaaggatcaagtgaaaatatatacaggggcatatccaaagagaagattctcatttaacacatcctcatgttcgtaaccacacaaatattcctccttttcaaggagccaatcctcatgttggtaactggaccaacattaattcctcctcatcaaggagccactccacatgttggtaaccattctaacaatcctcctctccctataggactctattatggtataccaaatggaaatcctcgcataacaatgtttgaggaacaactccaacaacttttgaataacaataaaatgaaggagtatgaatctgatgaagagacagggcctttcatgccttatatcttggcattaccttaccttctagagtttgaaatgccaactacaagtatgatgggaccactgaccctaggatccacataagggacttcaatactctcatgcaaccacaccaggtggttggaaatttgaaatgtgtgctatttcctactaccttatccggagccgcatcctcatggttcaaaatgtttaaaagacactccatagtgtcatgggaccaactcttagatgctttcaaaaaggagtttcaaaccgcgagaacccgcaagcttgaatgttcttccttggccaatgtgagacaattgccaggagagagtttgaagacctacatcaactgcttcaacattgaagttaccaaaacctaggcgttgatgatagtgcaaggctgatggcactgggggcaggtattgcccatggttcaatattttggaatagccttcaaggcaagaatgcacacaccattggcaaattcatgaagcgggcacaaaaatacatcaatattgaagaggcaaggatagcaaataacctccctctccaatctttgcatcccactcaagccgcattagcgccgccagaacttaccaatgccactaaggctactaactctttaaacaacaacaaaagagaaagcatagatggcgaggaccaaagtcccaagaagagtaggagtgatggcccttatcgctcaatgtatttaatctacaccgagttgccaagagaccatctatgtggcgaatgaggaccgagttccattgtgagttcttaaacccatgaagcatgatcgagccaagagagatgcctcaagatattgtcaataccataaggacatcggccacacaaccaatgagtgtcgaaacctcaaagatgaaattgagactctagtccttaatgggacacttacccattatgcacaacacattttttaaggaggacatgtcaactagctgaaactccaccaatggagcgagaaggcatttaacatttcttaagattttctaccttattttttgcaaagacaccttttgtgcaatttttagttattaaactaccacctttattttctggaatgtaagtagttaaactcgcatttataagagtgctacagtaaccaaatcttttactattatgccaaacccaccaaagagtaaaataggtaatacttaacctataaacactcgaggaaaaaagataacagtgcttgcaacaaaaaaaataaatctcaaagtcgttactgatacaccactttaagtgggtgggattttaaaaaaaaatttccatgaatattttttaaaaatttcacctcagacagggggcaaagtcggtgtacaaacgagataaaagacaagtgagggcgctccaaggagccataactcaaaaaattctgcttaacaaagacatcttgaatggcctacgtttgagactttgacaagtgggtcgcgtgctacaatcgagtacctaaagagttaaggctcatgccgacaacttgctcgaactagcaaaatacaagctaccattggcaacaattaatgttatctttaaaatcccatgttacaaagataataagcatcagaattaaataagtaccagaaaatatattcaacttaaaattcaaaaattgctaagatacagaataaactaagttatatatgcttaaaaagtttctaagattcgaaaaagacttgttagtcctaactaataagcactccacaacaagtggacatatacaaaccgacacatgtgggtcacaacataaatgcacaaccaaaaagtgtataagaagaacaagagaatttaactttgttcacggcagaccttacttgccaaccaacttgagcaagagatttaactctactcaaggatgagtttgagaaagggatacaactctactcaacgctcaaaacttaagcaagagatttcaaaactccataaaagttttaaattcaagcaagagatataactctactctaaattaaaaaacttgagcagaaagttttaaaccttgcaaaagtcccaaaattgagcaagagaaataactctactcgactatcacatgatatatgagatataactcacatcacattctaaggagaagccacgtgtttttaaaactccacacatacaagtccaagaacattggtcgtgcccatgcacatcgcttcaccataattacggacattgttcgtgcccatgcacacctcttcacaacaactacagacattggtcgtgcacatgcacacatcttcacaccaatcaaggacatttgtcgtgcccatgcacacatcttca

SEQ ID NO: 18340 - DNA, 2578 bp, Cannabis sativa
  modified_base (2140)..(2147): a, c, t, g, unknown or other
attaaatggaaaaaaacgtgtcaacatgtaattttcccttttttttttggggttttttgaaatgagaaatttgggggtatactgaaagttagcagaacttatacatattaattttcatttagatagttaattttaatctaatagatacatatttaatcaaaattgtcaatatataatatttaaataatataaaaaattaataagacattgatgtatgttgtgatgtaaaaatttgagataaaaaaataaaaaaatttagtaatatattttaaacaataagtacgtggtatatgaagtagtactatttcactttttcttgtataacagagtatatttgatagacggaacggaagttaaaaaatcaatcacggaactactcaaaattaatctcagcataaaaataaatcaaaatcaaaagtaatattaattaattacatgaacatattttccttcttctttattaattattgtggaaaatgaaactgattataatttactaggccaatgattatatatagactatctaaaattctatcaataatttaagcactacaatagttattgctaaagaatatctgaaacattatatttcttctccggtaaaactcaaattgtaaaaagaaccaataaatatttattagtatctatattagatagtacgattataacaacttacttttatgttatttatgaatctgcgagtatttatagattttacgatattattaatgtatttcaagatataagaatcccattctttattgggaattacttaatatactattttttattttttttttttaaatttataatttgagttactccagtaatttttatgtgggttgctatgtagattttaattgtgattttgataactttgttggttactatgtagatatctttaaaaatgcaaaaaagaagaaaaaagtattttgaagtataaaaataaaaaaaataaaaaaaaaactccacctttattttttggctggtttgaacaaactccttctgctattcctagatatggtcaaagtaactcattctgcccttgatattctcgtatccattaattaaaaattatattataagttcaattaatgaacataacttagctaaaaaatttcttatagagtgttataattgaattgggacgttggtagttcttcagagggtccaaatatataatattctttggcttaacgatctcgagcattcaatgtatactaaaatatatatataagattaagtgtaaaaatactttcaagaaataaatagaataattttaaattatctcttaaggattataggttttacttgatattccagagaatgaagaatattttgtatttgtttctcattgttcccaaccaattatccaaatttgtagtcgcattatcaaattgctcgactttatattttgcaccatgaagataagcttcaggccattaaacttgaaaatttgtttcaattcatgtaaagccatcccaaatgcacctgtattaaattattagtgttacaatttcaaaaatttcagtagagattctcctataaatagaactacccaacttgtagataatcaatattatgaatagctagtaccattgaatgctttctttcttttctttttctatcaggatgatctttaagaatgtaccgtctatgagccacatatccttttttccattttacaatcgacgagtctatgtgttagtgcaacaaatcgaacaacctcggtaaccttttgtgcttaagcttgataaattactgtaatctaaaaaatcaataacaatccataataacactacattcagataaaataattctttcgtaaaaacattattgactcagaaaatctgaactagacttctaagccacacccgctctctagattcatgagaatgcaaaagtagtttaagtataagagatacacaacaaatttatagtagttaactccatgtatcgtgacagtaatggagttacgtctacttcgagtttttatttcttgcgagatggtactatagaagaaggctaagtgttagaagctccaatttttaaagagagaaactagagagaaaagctctaaccttttgggtactttttggaaagtgaaaaacgagcttaaggagctctccttttataggtnnnnnnnncccacaaaaataggagaaaaatacaaattagattttttttggctgttaatgataatctaacggtgaaaattagctctttggtggtgatggctatttttcggagcccgacgggtcctgctacgagtaacttggagcttattttcgtaactcttttggggatgaaatgtggtgtcaatatctttaaaattgaagttgaagtgtgagacatgacttgatagaatattaaattagctttgaaaagcaagttgaatagcgtcactctgatcaatattgagtgagctatgattgtcttactgaaggcagttcatgacctaacgcccagattcatatcccagtgccgaagttaacatctcagcgccccgtttgacatgtgtcgttgataactctatgaaaatagagttatttagctcttttgtgcattaaattagctt

SEQ ID NO: 18341 - DNA, 5260 bp, Cannabis sativa
  modified_base (48)..(54): a, c, t, g, unknown or other
tttttaaatttcttaaaattttgcgaatgtcttaaataactataacgnnnnnnnccatgagaaaaaatttgactaaaacattatttcgggtgccaaaatagataagagtatatcaatgtatccattttaaggggtgcattgtagaattttcctataatataaatatataatttgtgcattatactacacatatgactaatgaacacgcagatctttgtaatcccataattagcaaagaaattaagatcatataattgcttcactcatgcgtcaaactaattaattatatttaattatgcctccactcatacttttgcatatatatacgtaagcatattagctagagcaattttaatttataaatattattatgttgatgtgtgtcagtgagaatttgattatgttaataataaggaaaaagatatatatatgaggtctataaataatcacgtacgtcttattatataacttgatgcttacctaatcaacaatataaattgagataagatattttatatacttttagcacaatttaacatgcattggtatggttaatggttatatgatttgtcgtattatcttcattaatccttggcaactaatataccatatttatagtagaatatggaatccagatgcaaaaaaccccagtacttggaaccttttctttagtttttagtgctcttttgcctcgtcatggaatcaaaaagttgaaaatctggacccttcttagattaattagtttatgctttaattattatattaagtaataattatttcattatatatataattaacactcttctttgctagtacgtactatcaattgtaagccaatggaatgcaggtttcaagcactaatatatggaaagtatgttccaccttttaagacaacaaaaaaaaatatatattttgcacgattttacattattgtgtataataataattatatatataataagttttgcttaacgttttatgcaaagaaaataccattctactatatctctctcagaggttaattattatttatataattactattatatatatacgtacgtggtgtatatgtttgaacagtggtctacaagtggaagactgatattacgagtgggagtaattaaataataaaagattgtacctgatctaaataattgagtgattgtttaatttatattgtcgatatacccaataactattatacttgtcgattttttcttttttttttttaaatagtacttaattttatacatgctcatcatttcctactcgaattatattttggttattatcacaatatataggacttcatttcatgcatggtgtcttctggtcctcgtgtgcaacacttttctcattataattctcactacaatcatatcactagtcataatcaatatgcaaatacatatgttggatatgtcacattcaaatggcaaaatttccacaatgacagctccaatagtatttatctattatctctagagtaacaagtagctagctaatattgataacttctacactttgactaaatgtaaaaaaaaaaaggagttttcaaaagtacatgtagagaaagaatattttctaaaatgcttttgggatacatgaacatatttgtttgatgattttccaatcataatatttatttacttttttgaaagtaatgatgaagacgtaactccactactatacatacatgatcatcaaagatcgtgtgtgatgatttttctctgaaagaaagaaaaaaaaattgattgcctagaaaattagcagataattctgtggttggtgatcggctatacattttgagggccataaaactttgaaattttcgttccttaacctctcgataaaagtttcatcaccatgtgcaaagttacactaaatcaatatttttttttttccttgactaatattgagtcaagtcctagtatgttcattttccttttttaagaggaaaaacagaaatagcttattaattattttttaggcatattatttaacaagcatgtctcgaggcaaagaaaaaagagttattaataacaatgactagtcataaacaagatttctaatgccaccgactacataggtaattgtgacttatgagagatttggatttattttaatttggtcaaatattagtgagtctgtgtcattcatagcccttgcttttttttaaaataaaataaaataaatatatatatacacaattgactgatcgatcgatcatagtgtgcatgctaattaattggtgtggagcatgtgagttggtgggttagaaggtatctaacacatgtttgctatcttagcagctatatatatatatattaattatatttacaatatcaatgtcgttaattaagtatattattcaatcgaggatttgaaatcaagtaatcaaaatgattaattaatgaaacactaattacatcagtagtactactttacatatatagatataattttatatataattacatgtttcgaagttgcttcggacgagaataatgggcttcatgttatatggtctaataatatatataaatataaacacagcagtattatgctaaagctatatatttataaatatagctcgctaatttagttaggtgaactatatatattgcagtctatgtactgagtccaattccatagccctatatctaataaagagatataatggagatttcattatcatctacactacttttgttttatttaataaatatatatagtttgttaattaatggttgactaatatagttgtaataaaacttttgtcgtctttatcattaagaaggaagattgattccgaatatcgatggtcatgtatacatattatatatataatgattaataaggtttattagttcaagctagggatcgataagaaacgcaccaataataataatggacgagtggaaaactctatagtggttttgtgtgcatgccatccatggcctaacaaagttttatgtatatatatagagcttatataacagtgatcgctgttctttcaacttttctgcaattcttgaaaaacaaattattataataattaagatcatgaaaggttatatgtatatatatatatatattcattgattaatttgtaaatgaatgagttttgaactctttacatcaaagtataatacacaagcccaaataagcagctcttcatgttttttggtcccccacttcatcatacatacaaaatgccataaaagataagggacgtccaacatatttgttattaattaaaaaataatttcagtatataactatctatctatatatatatatatatatatatccagctaactaaaataaagatttgcccaagttgacaacattatatatatataaaaggaataatttattaatggcgcatatccaaacttgacccggctaaatctttctgagattgattaatctgttttttttttcttattattataattctctatgtattagggaatttgagaaaatgaaatatcatataatttaaataaaaaagaaaactcaaggagtgttagagagagttattggggtgaaattttgaaagtgaaacagtttggtagctgtcaaaatttggaaatggaccaatatatatagatgtatgtgatataggcacgagggggtaacatggaagaaaattgaaatttgaaagaatcgtttgtaaattaatttgtttggttaggcagaaaaaaccattagaaagtgagcccacaggaggtttaagtttcatctcttgttgtggccaagagcagtagtagtagtcaccacatcacatggggttttaattttgggtatcccatgtattcatgtacatattaataatacataatctggggattatttgagatatttggagattaattcatgagcttattgaaaatttattcataatgatatataattaattaataatatgagaaaaagaagagaaaagaaataaagagtgggaggaattaatgaaagaaacaacagcaaagacaagcactggttgtagtagttgttgttgtatgaaaacaaaaggcaaatgtgggggaccttaacacatggggtggggatgcccttgagagaggttttgagttgagacttgaaatgaaagagctttctttctgaaagtggagccaacttaaagttaagaatctttttgcaaaatgttggttggaagcacacacttgggggcaaaacctacctatatatatcatcactctcgattatctatccattatttttatattaattatatacaatacatatatccttttttttattaaagtgtatgtagtagggatattataaataatatatccattctattcatattctgatatttcatattcatatgtatatttgtggtattatcttttagaacttgcacataagatcgaatcatcaatatcaagtatattgtatatatatggcgtgggaaaaatgttataatgcatgttgatgatacacacgagaagaaattattatgatgtatacatataaatataaatatactttgttgtacaaataaaagtcgataagatcatgattgccaattttgatcattgtctgaagaatcctataaagcttaatttttaatacatttatatgcatatataaaatatatatagaggaaaagttgtatacgacaacaaacaacattgatgatgagtgtacaaattagctagcaatagctatatgatcgacctttcgaaactttcataagagagccagccaccacaatattgcataattataatgtcaactgaaattaataattggatcttttcttcaactaaattatagcactacgacttccttataaagtcactacttataacttcttattagttaggctggcaaagcttattacatttaattaaatgattttcttataaataatatataaaattttatggatatataagccaaattatagtgcaatgcagatagactccataactggtgggtttattacttattaaaataaatataatctttttcctaaattatatgattcttagagttttgccttgatatttttttttcaaaactttccttgaattatataaaccattgcaaatgtcccacttcttatattttgctcattttttaaaaataatttaattatatgatcaggggttatagtggcaagacaagggtctaattaacatttttaagttgatatctagtttattttcacattaaacatacaaatattacatgtatattcatgttttcataattcatggttaaattg

SEQ ID NO: 18342 - DNA, 1957 bp, Cannabis sativa
tagtgtttcttggagactactacctatttacaggctcattatagaatgagttttgagtatttttaatttgacccctcaacaaattataaattaacttatggtatctacacaacatatttccatgacaatttaatacccttttgatacccataaagtaattggtcacttacttttgtatcactgtataataaatacattatacatatgtgcccataaatagaattttaattcaacaataacgcggtttttcatcaatctaacttaaggaggtcgttaaaaaaaaagagattagactaagattagtggttgtcagaaataaatcgtaaaaaatgagacaacaatttttatagtaattcaccctatttgattgacagtaatgggctagttgttttattaatcaagacccaaacacaccagaattatgttctcaagagtgcgtttagggagattagatcgagcaagattaaaaataagatctcttggagtgtctttgtgattgactttagaagaataggccaacgtgtcagaattctatttgatgtgaacgattgaatatttctaggaatgcataagagttagagagaaaaagagaggcgccaggtcttaagtcagataatcaactcagatctccttcctttcctaggtctaaacattatgtctatatacgcttagggtttgctactcattcccccataatctgggggaatgttacatttattccgcactttaacatttaataataataaggaattacgtaaaaattaaatatcttactggagatagttaagcgttgaaagtcttctagaaacttcatcttcaagagataagttgaggatgtgttgaaagggcttctcctttggagagcaccatagtgagcaaaaactgacaccaaagaagtgttattactggtgtaagggactatttgggtgactactggcactaggaaggtgctagtactcgtgtggcgtgcttgtttaggctccttcatggagagaagtggtctcaggcgattcctaacaactaagagagtgttagtatgtgtggtattaatttgggcgagtactaaaactatgttggtgtcaatacttgtgtggcacttctctacttggacttcttggattgtctttgacaagtctttgaagattagtacatttcctagggtttatgctttaaacacccaaggacctccttcgccctaacctacacgagtattgccccaaagagagtgtcagtactcatgtatagcactcctatacccttttgggacttcacttgtgctatgcgaaaactgccccttggggagtgttcatgtagcaccatttcccttcatttcttgtgcacttttgactataggattcaagacttggtgcatgcatgtgatatttttgttaaagtagcaattctccttgagaatttcttgatatgctgacaccaaggaagtgtcaatagtcgtgtatgactgcttctctttgcatttggtgatgtcatcttgtcatgtatgctcttgtactccaataagttaagtattggtagctacttgttggatttcttctcatataattagggtttcatattaaataatcctatctcagatttatgaataatgctaaccctaaggagcgagtattgacacctcagggatgtcagtactcacttaacactcctcatgcgccatgtggcactcaaacaaggtgccatctagtccattgtttgagttctgacccatcaagtcttctcacgtcttattcaaagtcttaaaatttgactattttaatttctcaaaaatcgaatataataaatgtgtttagttgataatcggataatagaacaaaataaaacatgtgatttgttaagctaaatctaaaaactattttaataatggttcacataaatgttatgttagttaataaatgttacttttcaattaagcagtatattttttttttaacaaattaaa

SEQ ID NO: 18343 - DNA, 1781 bp, Cannabis sativa
ttaaaaaaaaaaaaagaaaaagtggcatactttattgatcactgattcagtggatcatatactaacattttcattatattttgacaggaatatatgttgtttatatataaataagtatatatcatatgtacttatcacgagaaaccaaaaataaagtgatatacagcctcggccctaagagatgctcaatttaattgttaatattgattatcaattatcttaatacatgcaataagcaaagtttgaccgatgatgagaatctaaaaaggcttaaatatatattttgtagtcttgatcaattttacaatgatgaacaaaaatattatttaatgtgatccaccacgccaattcaattacctcaaataaactaaactcatcataaaactaatgtctcaaacacgtgctatgtatatatacatatgaattgaatacacatattagtttttgttttgttcagctaaaatttatttatttatatataattcgttcatgtgtagtggatgtgtaataattaagtgacatgtgttaattaatttgatagtgaaaactttttatacctaaagtaataatataaactataagactatgagacaagagaatatttaaagaagatcgtgatgatctttagaaataccattattatagattatgaatcccttccaaataagaaaaaataatgatgttattttgagaaaatggaccttgaaatatatttttttaagatcaattgactttctgaattaatctcactataatttttttttaagtgaaaattaaaaaaaaatatatattattaagtttatgtgttgaggatattatatatgatagttatgactcactgttagttaaaagttgttaattctggtagttaattaagttcttagcttgactgtgttagttaactctggttgttacattttctatttccagtctttgttctcagggtatatacatacctctcttgtaatacttttcattattgagaataaagattcaacttattctttttcatctttcttctgtctctgtcttcaaagatctaacttggtatcgagagcacgtcgatcatgaccacttttggagagccttcagtttccttctctggtgttctgttagatgagagagtctgttacttttctgtttagttagttacttctgttaatttctgttattgtccttgtaacaaactcttctgttgcttactgtgtatataaatagacttctctctcatttgtaaagcaacacagttaattcaataaagaattctttgctcttctcttttctggttcatctttctctctttcaacatggtatcagacgcttagctcggtcctttcgttctttcatggccgattcaacttccaccactcgaagtcaatcttcgaattcgtcaccaagaactacaaccattcccttcaatcattctttatctgttaaactagatgacaacaattttcttccatggcgtcatcaagtatatgcagccattaaaggctatcgtctcctcaaatttcttgattctaaattcattccacccaaatttcttacagcaaccgatgaacaagccaatatcgtctccgatgagtttgtcgaatatgacattcaagatagtctcctggtgtcctggttactttcatcaatgtctgaaaagatcctcactcgaatggttggttgtaactccgctgctactatttggtccaatcttgaagagtattacttagctcaaaaccgtgccaagatcagtcaattccgaactcagcttcgcaaaaccaaactcacca

SEQ ID NO: 18344 - DNA, 6798 bp, Cannabis sativa
ttaacaaggaaagtggatcttcatcctgcagttcgatatttgatcggaagcactgttggcatggctggtcttcaggtccattcatatgtttccataacttaatttctttaaagatcaaaacttggttctttcccatgaacatgtagctagaaccgaacaatatttgatcgttcttgtaatcgtcgctgcaggttaccttagggatatctacccttttatcgtacgtgccagtctcccttggcagcgctcatcaagccggggctttgacactaatgtcactgatgatccttctcattcacacattgagaaagccatcgccgtctctccttaaatctctgcctaaagttgctaagacaatctagctttctacacaaatttgtttcgatgaaatgatcggttacttactactactacctctagtgcccgccgccctcttttggttggcgttcttgagaccttattttgtcattaaaaatgaattttcattgtacaaacacaaatatgatcgcgcttttttcttgttgtgtttagctaatgttattgattcaattcctcattgttgaacttgaaacttttataaattgataaaataatacaaggacaattttccttacttgatgatgtttcgtgttataatttttaaagttctttgtggttgaagaagttacgtttttgttcatggagatcggttaggagaaattcaattgaagaagacgaagtagagaaaattgatagaaaataacaaaactaggtaaaatattaccacattataagtaaatattatttcaattattcttttcaaaaaaatatatatttattatttcttaaaatgatataaaaaagatatacccaatattttgaattgaagtaccatattgatccagtctagccaatgacacatgtgagaaactgaaaaaaaatggtgtccttttctgttgcagtaagcaataaattcttatatatatatatatataggcatatatatatttcaatatgcagtgtaaatatgtatgttacatattttctttattgtactaatagactaaataactataacaatgacatgttaaagtaaaattcaataaaaatattgcgtgtcacgtcactgtatgtaatattttagcgaaaacattcaccataagtgaaacacgctctactctagagctcaatggttatgttccaaatgtgcaattcttgttccaaaactctcaaaacgacattcaccaaacgagatgtttcatcgtattcgaattccatttcctctgaatcaactacaactcttttcggttttgttgatgaataggcaccaaacaaaccgcaaccacaaactctcatctcaactcttttggagtactcatcatcataataattcactcctctaatggctcctcctgagttaaacatcttagttaacccaattggagcaaatctcgctccattggacaactccttcactggaatcaccgtaaacacttcatattctcgcgattttagtgtcaccggcaaagatgcatctttggggagatacactacttctcctgtaaaattttaccacaaaacaaattgtataagtttcttatctctaatgtttaaattcaaattcagttgttagtgataatagtccaaaaattcaacattttaaaatatatactatgtttaatattgattgatatgtgcatattaatatacaacattttcacacatagtattatataaaaatatgatataatacgtactaaacagactcgaatacatctaacacgatgtttgatagagaggagagatgagtggatggaaagtggagggagaagagagttggaggaagacatttttcctccaaatctcaaaaatctaatccctctacatttggaacaatttaaaaaagaaaaaaaaaaaagacaaaataaacatcaaaattatcctctaaaaaaataatgaattttaatattaaaaagatattatagtaattttaacaactaatttcctcgataccatcctttccatcctaccaaacatggcctaagtttcaatgacaataaattagttagttaattagttagtatcaaagttttcataacaaacataccaccaagatgggagaatatgacaacatcaccactccaattctcatgagccaccttatgtagataattaacatctttggctctaataaccccagtcactatgcctggattttcatcatggataagattcttcttcccaaccttgcaccaccctgctccttggcaattgaaggctccaacaacacccgaaatcgcgttcatgttccaaatcttcaaaaggctgcaaaccttttcttttttaggaacatgggaatgaaatagagtaaaagctctagagactatagtatgatattagtgtgtacctttttccatctctagcaggatccgaaaacaaacaatctcttgttggtcttccggggagtttagccctcaagatcgagccatcgggaagaacaatcttctttaagagattgaaatcatgttgaccaggcttatcactgcaatatatgaaaaacaatttcttctttataacaagtgtttgaggagaaagaaaatgcagaatgtaattaaccgaaaaacatagtacctaacatagatagggcatcctcctactgctcgagctgcagcgtggtattccgccattggatgcaagctctaacaattgaaaagaaaccgaaaatggtgaagccaacaatggaaaattaaccacatgcctgaacatttgagctgtagtttttttggaactaacatgaaacatatcccaatcaggctgcatgaattcaccgaggaaaacggtgttgtaagcaactgatgcaatgtgaattgtgtgtgaggctggatctcttggccaaaaatcgtccgaagcccttataaccgcagctcgcttagagcttgcaaaaacataaaaaaaaaaaaagaatcaaaatcaagagagaaatataaacataactgtcatgtaatggaatggattggaaagaaatcaattttcattctgttcctttgttcggttgattctaatagcataacttttccgccattttcgtggaatgagaaatgactattccattttgttctatttttattctcattctcattcttatttccgtgttttcattcctcttaaccaaattcatgagaggttagcaatatatacctgtataaaccatctgtgttatgactcatacaagaaataattccattatcaggaaagtttctagcaatagatgcctccaatgcttgatgatattgtctagttagtttcacccttccaccgtgtcccgctccaagagtctctaaaacactctgaacatcgactttgacaccattgataccggccgatgcaaggtacgaatgaagctcattgtaaaagctaaagactttctcagggttgaccaggccaagaccattcttggtaatgttttccaaacattcacaaggctcattggattgaacaccaggtgatgaaacaggataagtcatcttggattcgtagtgttccatttcggttattcccggtctaacaccaccccagtaacctgttatagcatgccatacataaacatacctgaaaattcatcaaaacaacaaaagagtgtaaaaattggctgaatttttcaagttcaacaatcatttaaatgattaatttgcggcataaatactaagtttaactccaagttatagataaataccgatggaaaataacatgttctataagtttaacatgccaagtcaatacccacgtgtcattttcttattgatatatttcaatgaaaaataaaaattgatggctagatcaattagaaactgctatgtaattattgacttgttgacttgatacttaaaagtcagttaagtaagaaagttcagttctaaaaatataacttaaatattattactgtaaaaaattaaacttaggtatctatctataatcgatagttaaacttaacaatcatttcttactttaatgaatgttgttctctaatatcagaaacgatatggctaagaccatctttgccatctttctgaaatttgtgattttctttgatgtttgtcaacctatttgcaaagctgcaaagacagaaagagaacttagcaagaaactcaaactgagcatcgagaaacagaaaccgattatgccctctaaaggcacttactttgcggaattatctgccttgtgttcagtaccagtaggatccatttcaacagattgccaaccatcgtcgattatcacgaatttcgcgggacttccacccttctctaagctctccaatccttgcttaagaccctctgaagtgacatcagtatagaaagcatcccatgtacaccatccaaaccagttcaacatgtctggcatctgaatttaaccatttatcatcataatcaaaattggttgaaaaagacttaaaacttttgtacaaaactaactgactaaactaaccttcttcttctcacggtgacaaaatgtctgtaaatgcttttcaacagtcctgaaatggataaagataaagatcagaaatttacccaataatttgaattaaacaaaatcatatgatatcagacactttcttgacagcattggtgaatattaatatagtctactgataggtaacgggtcctcttcgagacagaatgaatcccaaaatgcattcttcaaaacagtgtcaatctcccaaataaactaaaattctattttctcattcgatatccattaatgactatacaattatatattttgtttatggctttcatagtgtaacatctacattttcaaatattctaatattcaaatataaaataaaacatcatataaagtctaaattttaaataaaaaagaagtattgaacataatttatgtaatttctttttaaataaaatataaatcgatttattcggttatattgagcaaattgtaataattttcatttttcaactcacccaatatattaattaggcattttagattttcgttcgtttatttgagttgcatttttcgcgtttattcagtttagtttggacgattagtgaaatatttttaactcatacttacttgacagcattagtgataacatcaaaggggtcagatccagctccaacaaacaccaaatgacttccctcaaaatcttcaacatcaggatcacctgagaaaattagacaatttttttagactcaaattgattatcaatattgatttttgataatatgtatatgtatatatgtatgtacatatatattaccactttctaagcagatttcaagctcatcattttgattcccttgaagaacagctctaaagtcaccttcaagaatgggtaagaaaacagtgtaaagtgaagattgatcatcattatcaatagcttcattagcttccacaatcaaaaattgagtctcaaatggaatctcttttccataagagcccattctctgtgtcatccaccacattttgaacctgaaaacacacatgaaacgcaaccccctgtccacaaacacaccaaacattattacattatgatacacaagaacaaaaactcataaagatactagctttacaatgtaaaattcaaaagtaatttcttggggttttttttttactgaaaaaagttttaaaattagtttataagaatcgtgtggcaaaataatcattatgaaaacttttattagtaaaataattttttaaatatttttattagtaaaataatattgtatggttgcagaaatgaacatgaattacactacgagactataaacgactaactattatggttgcaaaattattataaatttatattgttatttcacattattagtttgataaatttgacaatatgataatacataatatgaaaatgaatttaagagaaaaagctcttaatttcttttgcttttttcctaaaaataaaaaacagaaaaacaaaaagaaagaaagctataattttcacaaatgtaacaaaagaagagttaacaaacagaaaatgcagaaaaaagttacaaactttgttatgtttttttcagaatttcaagaagagagagtgtttcaagcaattctctctcctttgatctgttcttattaataataaaaattaataaattaaattaaaaaaaaaaatgaataaatcttcatacatttttacatatattatcattaagaagattctcaatataattgaacttaacaagtaatataaacacagaaccccaaatgaattttcaagtgaaacgcagaaccacaattatacacaacactataaacatatacattatacatatatagatacaaaattacaaaacagaaacattttcaggcatttcttctctctctttgtggtgttcttaacaaaaaactcaaagacatttatacaaacgaataacatacattacatatatacctatatatatatatatatgggatgaaagcattaagcttaacttactgaagtttgccgagagagaagactcgacgactgccaatctgatcagagacaacaccaagaaaagccccatgatgatcaccggcggtgtgtgtgagaacaatgttgtcaggaacatcaaccagaacagtgttccccaacacccttaaattcccctccgttgccgttattcctgctcccacagtcatcttaatcaaaacccacaactcaaaatcacaacttttttgttaaatcactctctctaaactaccttcctacatatatacatatttatagtgtcatatatatatgtcagtgcctcgggtatcgtgtcaagctcaaacatttatcaagggtcctaattagaactt

SEQ ID NO: 18345 - DNA, 2920 bp, Cannabis sativa
gctttcatttgtttttagggaagccaatcaagtagcatgtattagccaatgaagctttgaataacaaagctagtgccatgtgggttggggttgttcccccttgtgcgagtcaagttgtgcgaaaagattcgcctaatccattgtattgattgttgtttgaatgaatcctctttcaaaaaaaaaattacattttatcaaatatttgtatatatatcattatgtacgcactgttaagatttgaattaaatctaaataaattgaaaaggtaaacatagagaaaattgcaatcctttgatgcaaattcaagattttgctttttcaactaccattttgaaattcatgtattaattaaaaaattgcaagaaatatagaggtaattattaaatatttgttttttgaaattgcaattattaaataatgaccccaaaattctgacttctgtaattttccacgctacaacagcaaagacagagagaagcccaaaaagttaggaaaaagagtgtgtagtagatgatgtttacaataaatgggaccaatataaaattttccttttgattttttagattatttgttggcaaagtaatagaacttctaaaaagattttttggtagagctttcactactttgtttgtttgttttttgttttgttttttatataaggttcactagtttgttatttatgatagttttttagttttattttttctcaataatagtcaatattatagttatttagagtgtaaatcttaaatttttttgataatttatttattttattacatcgattacttttttttatacatattattgtaaaaaaaaattatttaaattttatttttagcaaaaattacttaattttttaaaaaaattaattggtaattataaataactatattatggaaaaaaagatgaactataaaattttctccaaccaacatttatttatttattttgcaagaatcaacatttattaaggtgtgctatttgttatttgctcgtttattattatttagatctcaaaattaatattcaataagggtattttaaaattaattgattataagtgaagtagtttatgttcgagaaatgttaaatgacatttatggtgcttaacacgcttatcaggtgtaatatcgctattggtgcaatttaatatcgagtctcatttattttaatttaataaagattataaaaaatcgttaactaattataaaacatcatatatcgtgtaataatactttatatatggcttaatatttttatataattatctcataatgcaacaaaagtatatatttttcttatttttattagggaaatttggttcaatatgctcaaatgtaaaatatggtgtttgaatatactactaaattagaaatagtatatttatacttttgatatctattcttcctaaaaatacctttgcatttcaaaaaaacttctctctctaactctctcactcttcggcattgaaccccgacctagattccctgtcgtcgaacacacagacccaaaacctcggttgcaagcccctgtcgtcgtcttctctcacgacctctctcgttttttgcgtttttttcttttagttttgtaattttttgtgatatttgcgatgtatttgcaatggtagactaaatctgaggttaggaatgaaatttagcaatgatgaatgatatttggtaatattttgtgtatttaacgatattttttgatataaatacacaacacattgctaattattgtgaaaacttgagtgtgatttcaaaaaaaacgtagaaaataaacgagttgagaactctagcgatgggtaggaattttggaggttttgaagtggttgagctcatggattttgaggctttagagtggagacaagacttagttagaataaaagagtgagattagataatcagatataaaaacacttttatgaaatgtaaatatattttcagaagaaaaagatattaaaaatataaatattttatttttaattaaatggtatattaaaacacatgttttaaagtgaaatttcccagttattaattatagtttgaacaaatcagtgttatcttatttttacactaatgagccttgaattcttttttttttttttttgataacaaatgagccttgaattcttacgaagtcattcaacggctgattgattcgttgaccaactaagctttctcaaaacagctttcccatacagttcatcaatggcccttgttgacccttcttcttgcttagacgtgtattcttcttcctccttaaatatttctctgtttccaagtgggtttctcatttttttctctaagattatatgggttttgaagattgattacttttaggagacaatttctcaccttttaagctattcattttctgccatgggaaactgctttagaaaatctgccaagtgtgctcacgcttcttctgtcaacttttctggtaccaaatttactttctttatgatcaacctattcctgttttctgtctttaaaaccattgatgagttagatggtattgctagttttatacttttggtttcgtttatggtttctgtgaaatagattttgatatagatattagattgaaattgtgttcttatttactttgtttaaattggttcactaaagaggatcattcaccacccactgttatgatcctctaaaattcatcatcaaataggtttgcaaccattgacttagtttaaaaaccttttgttttccttgcatttctttatataaaatcacaacatgtaatgttataattattctttgtttcaaaatccatattgcttctaaacataattttggtttaatagtttaaatcatagttttttttgttcctgaatgatgttctctattccccctaaaaaagaatataaataacatgattttggttgtaacttgtttacatttct

SEQ ID NO: 18346 - DNA, 3985 bp, Cannabis sativa
tatccataaataaaatgaagttaaagtcttttggtgcaattattcctaatttaaatgagtgtgatgatttgtgtgattatttagtaatggagacatattaacgaaaaatatgcttaattaaattaattggttttccaaaactattaggcaatataaaatgagaaaactattcactttctctaattacaataatgagcaaaataggaaactagagaggttgccttttctttcataatactgcgtatctgtatccatctcttgaaattagagatattgttgtgtgttgcaagaatgaagatatataggatatatttttaaaaatgtcccactcgcaccctctgatcggcttatacgagctgtctacatgatggatggagttggtcaggtattctcgtacactctgcttagatattaagttcatactttgagcactagagctctctacacgattagtagtgagtggaattttccgtctaagtcacagaatctatttcacgtgtcacccagatagatgtcacattatcatgtgtggagattttgtgagaaagaaataaataaaattgatacgtaagtgtgtaaaattaattaattggtgtagcggtattaatttaaaacgttaattttaacagaaaaataataaaagaaaataacgttaaaccaatataaccagacatatatatgttggagggaatatacaaatacatatacataaacataaacgcacatataacatatctatccttataaggatggaaagtcaatgagtctgttttaaataaattgaatatacatagggttatcagtgacagtaatcttaaggaccatggttgacgaaatacttaattgtgattttaatttcttaaatggaaagacatagcttggtgacttacgtggaagattacacgcatatgtgtgaagccaaacaacaaattaaagtcaaactcccaactcccaagagaacataacaacaaaagagatgggaggacagaccattaattgcaagaaactgatcataataagtcaaataagcacctaaaatttcaaacttttccattatcatctcaatcactctcactgaatgatacataattaacaaaatattattcgttgcccttgtccccctccgaaaattctcctatatgtgccctcctttgtttcccccactctaataatcattactcctacggcctaattaatcaaacacaattttggtatatttctttagccggcggcccagaaatgattcacaaactgttgttgatttcgttttgccttcacctcttgttggtatcaaacctatttcatcccagcttcagtttagatttatactcggcatgtagtaacaagtaccgatgtgggagcatcggcgatgtggattttcctttctggggtgatggcaggcctgaatattgtggtcaccctaaactgaagctgggttgtcagggaaacaatgccattatagagattgaaggaatcaaataccaggttctagagattgagaaggaaaccccaatcattaaaatcgctcgagttgatttcctgaacaatgggatttgttcgccactatatggggacaccactctggataaggacatcttcgaatacgcaccagcctcagaagccatcacaatattctacggttgtaattctactgacaacatgtatggtgggtttgattgtaaccctggtgggaaatcgtttatattaccgggaaataatactatggaaaagattgatgctcatttctcatgtcgttcgaatgttattgtgagggtgtctgatcctgtacaaacttatgctgaatttatgaactctacgttgattgaagaggctctgaaagaagggtatcctgtttcgtacaaggtggagtttgctgggtgtgaaaactgtagaaaatctggtggggtttgtggatacgactggggagttaatcggaccacgtgttactgtcaaggtgatctatctccagtgctcaaggacgtatgtcccagcccaccggaatctggagacacaaaacttggaacaccgcctaactcaggtacgcgttgattttgactcattcctatctagtttttcatctggttttcttttacttattatgattgttgtacgtgccttaaaaaaacttcattttacaaaaggatggatctgcaaaacagaaatgtcctgtgcaaaactctttagtcatataacgctaataaccttatccttatcatgataaaaaaacttgcttataatactttagtaatattggtgatcattagtaataagcttatacttatacataattatattaattgattcaactttttgttgaagaaataagaacttataattaaggatcataaaactgttctctcccatggatttagcttgtgtagttatatctttgcttggttatcatacataggttatagaaaaattagatcgattaatctttttaacttgaacaattagattaatccttttgttgaccatatatctcatcattatagagcagatttagtctacataattacatttgaaaacagagcaatacaaatatatttggttggatttttgccactgacatttgtttctaaaagttaggtaaatacagtcatcaggaaaaaaggaaagagtcggtaaataaggctattaataaaattagaaaaatagttcattagcccagtctctttttcactctctttttttttttctagcgtgtgattgtgactgtactcctatatttaaccatacctcaacaatacttacttggtcttgttcaaaaaagaaaaacaatactaacttggtcaatattttgtttcaccaaacagcaatattaactaatatatttacaatttatgttagttgcgtctacttgcactctctgattattactatttaatgtgagaatcttgagacttatattagtcttagatgttagaataaagcattgtttagtgaccattttgcctaattcaagaacttgtctgcccagttagataacttgtcgctgtcgcctttgaatgtaaacgctttgaaaaattaaaaaacttttttatttagtattcctcgagataaataagctctaatactttctagtagatgttgaacatattttagacttgtcaactactaattaagctggccttaggcatttaccttcttctacttcttcgtattgtatttgtatttggaaagatgagtttcgtagcagtgtaaacgcgcttgtatttgctgattgtgttcccattatatatgagacacatattttgcctaaaacaaaatacatatacgttaaagttttatattccatattcagttaaaaaaaaaaaaagcaaagaaaaggttgtatatacagtattcgtaattgatgtgtataaaaatatttatattttaatgcttgataagctcaggttacgtaacaatttttggtttgttagacatgcacattgcgcgtgcagggtagagtgaacttttatatctgtaacgaaaatatttcgggtattacagaaacgttgggctggtgataagcggatcttggtcatattttaaagttgatatctttgactatctggtatttacgcccaccaaaaactagcctgctaaattaggccactcccgccaaagcccatccttgttcccttttcataaacccattttgtacctttcttttcaaaaaaaaaaaaaaagtaaatttagaaaagtattgtggtactttgttaaatttgtttttataatgttcttcgtttaacaaacaagaaaaatgtagagaatgtttggtattgtttatattttttgtttttaaaaaattatttttagaaatgagaacaaaaaatagtttttgaaaattttaaaatacaagttatgtttggttagtgttttttaaaaataataatgactaaaattgaattagtttttaaaacagaaaacaacattttgttgtttttaaaattcttgtttttggaaaactgttttgaaaaaataaggccaaacaagctaa

SEQ ID NO: 18347 - DNA, 2314 bp, Cannabis sativa
gagagagagagagacctgagtgagtgagattgaaagagagatcgagggagtgggttgtgagtgagatcgaggatttgagatgtttgaactatttggtgcttaatctgaatgttttgatgagagagaggcgcgagggtttttatattattagccctattcccaacggttttgaacctttaggcaaagtatggaccacggtttaaaactgtggccaatactttgcttgacggttctaaaccgacgggaatagtgcattatttttttattaattttttccgcacttataaactttcgcctaatctatacgagtgttaaaaaatatcgcttatagtattggcaacgattttcaatactcaaatagtttttcagcgatggtcccccaaaaaaagtatttttggaaccgttgcgaattctaccttttgtagtagtggaagccaaccctgcaaaaatcaagacattagtagatatgcgatctccttctaagcctaaagaagctcaaagcctcactggtaaggtcgtccctctttaaatcgttttgttttgagatcttctaataaatgtaaataatttttccagattttgaaaggaaataaattttttcaattgattgacaaatgcgaagaggcttctcaggctttaaaaacgcaactggagaaactcccaatactctataagatgctatctggagaagtactgtcaatctacatcgcagtgtctgtctatgcaatcaagtgctcactcatgaagaccaaggtagacaatatcccgtttgttacggaaacatttgctcgacctagaatcccattatccaaaaatggaatgattggcttttgcactcattgtggcttcaaggaagttacaactatattttcaggctcatacaattgaggtattaactaattatcctctttgacaagtattggccaagctcgatacatctggatgccttcttaaatggtaaaatgagctcagccaattcgatatttgatacaaactgcgattcgcgataaaaggccaatcccttgcttactttattcttggatttccttatgaacaagtagcaacaatctcagaagaatgacttgatccaaatatctccaagggtgcgggttggactctatatgttgatggagcctcgaatagtgaaggagtaggaggagggattatgttaatcattccaaacaaattcaaagttcatgcaactttaaggtttggatttaatgcttccaaactataatcaatttttaatttcctaaaaacaactaatttttttttacaaaaaaaaaaaaaaactaatctttgaaaaatcaatagcataacaaggatcaatactttgtcgtcattgtcaagatctcaattgtcattgccaagattcgtttcacaaggtcttcgttgcccagatttgttcacaaagtcgtcgctgcccatatccgtttgcaaggttgttgccatgccatatccctcctcaaggttgttgttgtccaaatccgctcgcaaggtcgtctccagcccacccagatctcgccctccctagttgtgacgtcgttgccatcgagccgctacccagatttccacatcagattaattctgcatctcaaatctgaagaaaatcggtagagagtaaagaaagaggcttgctaatatacatttataatgaaagaaaaaaaaataaaaaaaggaggaaaaaatatacaaaagaagaaggtggatggtcagaataaagagatgaagtaaaaaaattagtcttttctttttttttttttttttggtttattttgatctaaataaaataaagaaatagaattataaagtattcacatacttctcaaatacataatgttagttgttcatttgctgtagaacagctccacctatgggggatgttttccatggccctattgtaaaattagtatatatgtaaggaaaaaaaaaaacatagcacaaattttatacatagttcaaaaattcatttgaataatctatatcaaaggatcacgttcacgtccagctaattaaacttaattagattatcgcttggttatacctatttttattcataatgtattataaaattaatctatagcttagttgcaaggagtctcaacgtaagtttgcttgttttggttattgtttttctttgacattaattggtgtggaagatcaaatcaaagaccaggattattaaagattaaaacaatctcaaatacaattttttattgattaatttgccaataattaaaaaagcattcactagaccagatcattctcgacaaattgagggttatgatggtttataatttgttagcggtttttt

SEQ ID NO: 18348 - DNA, 6321 bp, Cannabis sativa
caattccctgtgggattgacctcacctgtgtgagattactacttgattgcgtatacttgcgtagcgtttataaaatatagaaacacccatgggtttgcaaactagggaaatgaacaaactgatgtacctgagtcatctctcatgaatgcagatgcgaggcagtcacgaccaggaaaccaagaaattccttgtaatgatggaaggaatcttggaaatcaacctaggtctggtcaacccccgagacattcataaaggccttctcgcacagacatagagaatacacacacatatctgagtagggggcgtgtgttaaatctcttttggagaagaagaccaatgcgagatgagacacgtgaagctagttcaagtactggggagtcacgatcccacaggcacagtaggtcaactagacaaacatgagatgggaatagatctcgacattattttactgatcaagaaagtatgagtaacttgcgtagttaccaatctgaaagttactcagggactagatttgtgagtaagtacgatcagagaagctgtgagcctgatctccatgaataattaaatcagaggtagcagaccttcgagagcatttaaatcaagatgcacctctgcgtaaccagcttaatcaaaatgcgggtcaacaacctgtggatcccattcaattgcgagtaatataattagaggacaagttcagaaaatatcaagatcgagagtatggaaaattaccaggatatgactcagatgaagaaatggaaccattccaccttgatatcctaaactctcaatttcctcaagaattcaaaaatccacatgtctcgcaatatgatggtactactgatccagtcgcccacttgaataattttaacaccataatgcgaggaagcaatgtttcaaataacttgcgatgcatattgttttcaatgtcattaacaggggcatcaagtagttggtttgataacttcaccaaccattccataacttactgggaatagttgtcgaaagatttcaagaagtagtttcaagctatgagagatcgtcaaccaaaatcaccttcattgaataatattaaacaataaccaagagattccctcaattcttatttaagttgatttagtacagctacagctaaagtcagaaattcaaatgatagcattcaattaacaaccctccgtgctagaattacaactcacttatcaactgtaggaggagagttatgggatgacttgcaagggcatcccgtaagaaatattaatgaattcaatgtaagagcacatattttttttgtgaaaagaagaggcatagaatgaaatcaagctgttaaagtcagatttgagagataaacccagcattagcacagcaacagcgagcactgtgacttccaaagtagaaaatctaaatggttcaaataccaagaggaaggatgtgtcaagagactcatccaaagataagaaacaaaagaagcatgagaagtatctacttatttatttagtgtatactgaatttaatgaaactcacaaaaatatttacctcgccaatgaaaatcgggtcgcattttgcagactagacccaatgagacacgccaggaataagcgagatcccaataaaaatttttcgtttccacaaggacattggacacacaactaacgagtgttgtcagttaaaaaaatgaaatcgaaagcctaatctcgcgaggatatttaaggcagtatgtgagggcacaagggaatgagcataaccagcccaataacccaaataacccaaggttgcagcctccccctgtagagggcgaggatattggttatctctagagggccgcatctcgtaggaaacagtaatagtgcactaaagaggtatattaatgaggtaaaaaatgagctatcaacatttgctctagaacctttgaagaaagaaaaattagatgaaccacccattgtcttttctgaagaagactcaaagcatgtacgatattcacatgcggatcctctagtaataacaattcaacttgttaataatagagtaaagggagttctcgtggataatggcaactctgtcaacatcctttataaagaaacattaaagaagatgggattagaggatgcaaaattaagactttgtatggtaagcttgtgtgggttcacaggcgacaatgtcacgagtttgggcatacgtgaacctcccttaactatgggggaaccactgttgtttgcgactcaaatgcaagagtttttagttgttgacatcccctctgtctacaatgtgttgatgggtcgcccagcttgaaaaaggtgcatttagacccaaacaatcccatttagtgtgtttgaattgggaaaagtttgggggaagaactaaaatagcaactaatcaccttcctaaaggaaaaccaggaccaattcgctttgagccattcagatatggtcaggataaatccgaatgtgatttttcatcacctaaatattgatcctgattatcctgcgaaatgtcaaaagtggcgaccactagatctcgagagactaagtgcactcaaagaagaggttgataagttattaaccaataacttcatatgagaagcattttattcctcatggatatctaatccagtactcataccaaaaaaatggcacttggaggatgtgtatagattttgcagacttaaacaaggcatgtcctaaagactactttccactaccaaggattgaccaattggtagatgcaatagtagggcatgaattaatgactttcatggatgcatattctagatataaccagattaagatgcatatctcgaatcaagaacatacaagcttcgtcacaaatatggagctttattgttacaaagtcatgccatttagattgaaaaatgctggagtaacatatcaacgcctcgtgaatggtatgtttgaaaaccatataggatgaaatatggaggtttatgttgatgacatgttggtgaaatcggtcaaaagcgaggaccatacgaaggatgtcacggaatgttgtgccatacttaaaaagtatgatatgaaaccgaatcctaaaaaatgttcttttgtggtatcattggggaaatttttgggtttcattgtgaatgcaaggagaataaaagctaatatagacaaaataaaattgctactttaaatgccttcaccgacaaagctaaaagaagttcaagctttaacggggagaatgacagcacttaatagattcatctcaaaatcaattgataaatgtctttcatttttcaatgtcttgcgaggcaataaaaaatttgaatggaatgaagagtgcgaggaagcatttaaaggaataaaaaatacctttccacacctccagttttggctaagtcaattacatggtaaacaccattcctttattgggctatctcagaaaatgccataaatgcagcattagtgcgagaagaggttaagaaccaacaacctgtttactatgttagtaagaggttattggggcgaaatcgagatacccacctctagaaaaactcgcactatgcttgatacatgcatctcgcaaattacggctatcctaacaaatcaaccattacgacaagtactatatcaaaacctgatgcatcaagaagattaattaaatggtcgattgagttagggcaattcgaagtaacttaccacctgaggatttcaatcaaaggacaggctttgactgactttttgatagaagaaattaactcagaagaagactccaaaataggaaataaaattgaaacatggaaactgttcgttgatggagctttcaacgagaatggctcgggggcaggagtattagaggtgtcaccaaaaagcttcaaattccattatgcacttaggttttagtttgaaacttcaaataatgaggtggagtacgaagccttgttagcaggattaagaatagtcgatgcactaaaagttaagaagattatgtgcttcgatgatttgcaattgattgtaaaccaagtcttgggaaagtaccaagcaaagggcctgaaaatggccaaatacttagagaaagtttagaagaacttggaaaagttcgattatatcaaaatagagaaaattctaagagaacaaaactctaatgtagatgccttagcaaaactggcatcttagtttgatctcaacaaattgaacttggtcccggtggaggtacttgacgagccaagtatatgtgagaaggaagatgttgatatgatagatgctctgcgaggtctacatggatgaaaccaatcgtcaagtatctatgaaatggagaacttcccacagataaaactgaggcacaaaaactcttatatttgattcctcgctacacgatgatcgaaggaaaattttacaaaagaggatattctattgctctactgcgatgtgtgttaccaatagaagctaatgaaataatcaaagaaattcatgaaggcttctgtgaagatcatgcaggttggcaaagcctgtctaaaaagataatccaccaaaggtattactggaaaactatcaataagaacacacacgagtttgttaagagatgcgacaagtgccaacgattctcacatatacctcgagtaccacccaccaaactaagaatcatgacctcgccatatctatttgcaatatgggaaattgacctgattggtagttgtggtagttgacttcttcacgaaatggatagaagccgaactattagtatccattacctacaagaaggttcttaattttgctatcaagaacattatttgtaggtttggtattccaattaagatagtatctgacaatggtactcagtttgatggagagttattcactgagttctgtgagagaaataaaataattaaaagcttctcgttcgtatcgatgcctcaagcgaatgggcaagtagaagttgttaataaaaccttgaaggatactatcaagaagaaattagacaccgccaaatgaagatgggttgacgagctaccacaagtgctctgggccatagaaccacagagaaagtagaaatgggacacactccattttcattggcatttggcttaaaagcaatgtttcctgtagaagtaaatattgcgatccacagacgtgaattctataatcaagaacaaaactaaaaacttctgagcatgtccttgcttgaagaaaaatgcatggagtcacaaataactaatgttggtttcagcaccgtatcactagatactttaataaaagagttcgaaatagaatctttaaagtaggagatttggtattaagacgtgtatttgaaaatatgcgagatccaacagctagagtgtttaacccgaaatgggaatgtccatatatttacaaattagcttggcttaatggcttactaataaaaaaaactactgcaacaacgagcatttatgaccatattacaagtaatttattttgtaatatttataattattgttacttattcttaataaagatttgaatatttcaagtaatcataaagtttatttctttaaaattacttgggggcatatatgtgtatgataactagattctacctagaaatatatgaaaaaataactaggttgttaaaacctaaaaattaaattatttaaatcttttcacaaagaaaatgatgattgattaaaaactgtcttaggatagtataaagtcaaaaatcgaaaaacctttcattaagtggaaattaaaatagcagttttacgtgagattttttctcataaaacaacaaaaaagctaaatgcgatctgaataaataacgactcgcatattatagcatgtattataaacgagatgccaacaaatcttgaaaaaataatacacaagctaaagtatgaatagaggattaactactcatacgagcaatcaaataatattcaaaaacagttctaaaagaaatgttcaaaatatttaaagtttgtcttaacatagcagactactaactacttgtagaaaacatagcaaactactaactgctcacgaaaaatatagcagaacactaactgcttgctaaaagcttagcagaatactatctgctcgtagagacttagcagaatactaactacttgcataaaatataacatgataataatattggtgaacgtgtaaccctaaaatatcaaaaactaaattgagaaaactgttttgttgtgtgaaaacacaatatacaaatatcattaactcgagaaaagcatgataaaatggcataaagtaaatatataaattactaaactctttagaactagtaatcatgaaaagatcaaaagaattgagtggaggcagtgttgggttttgtgccctcaataaaatccatttcaacataatcagatttacttat

SEQ ID NO: 18349 - DNA, 2692 bp, Cannabis sativa
acacatacactacatgttttttctttttattattataattattgttgtaactaaatattaaattattccacaattattatgaaaaactagttatcattttatttcatggacaatcagatattagaagtcgaagaagaaaattgatttaatttattgggtagaaactcaccaaccccaccagccgtaaccgatgaaaatcaattgttttggcatggagtattaaatatagatgtatgtatagtgtagatgatgaagctcaagtcaaataatgcatttaataatattaaccccacaaccatattggtttcttctttttgttttgcatgtgtttacagggaattgtacatgaattccctgatgggtcctattccaaaggaacttggaggattgaaaagccttgttagcttggatctttaccataacaacctctctggatcaatcccatcttctctatctaacctttcaaatctcaaatttttgtaagtatataatgtttgttcttttgggtgtaataaattatacaataatattaaccatgtactgtactatatattcacttttcactcattgtgaaagagttcattaatttagtatgggctcacgtgaaacttaatgcaggcgattgaatgggaacagattgagtggaaagattccaagacaacttactaagcttggaaatcttaagatcctgtatatgccaatctatctatctatctatctattattcttaataatgataatatagatgtacttgtgttagcctaatcaatcattatatatatatttatatgtagtgatgtgtcaaataatgatttgtgcggtacatttccgacccagggctcgttcgccaagttctcagaggaaaagtacgtaaaatcaaaatcattattgttacttctttttttttttaaagtaacttttgggacaataataattattaaacaaacaaattgatttgtttgatatttttgttactaacttgatccttgttaaaattgtttgaatgtagtttcaaaaacaatccaagactagaaggacctgagctgatgggatttgtgagatatgatattggagaaagctgtaattgatgtataaatgtagtaacaaaagcagcaacaaattgttgctttgctaataattgtttccatctaaatctaaaggtcactttttgaagcaagggcctataaaaaattgaaaacaaccatctaaagtaaattatgaatagtgatgattggtctctcatcaaatcacttttgatgtgtcatttacataatagtagtgattgggcttgggctttgtgtaatgttgattgagagaataaacccaatttggagatttataagttaagcttcttcaaaattctagtttggtcttttacaatgcctagctattactattcaaccatcttgctcatatttcccttccatagcagtccatgtttatttcaaaggatattcaaattgttgtcatataaaacattgacagagctaatattgaatataggtgtgttaaaggagttcatatttttaatgaaacttcaacgtgtacaactttaagatctacttattcatcaaaaaaactttaatatatagaataagtcacatgattcttttgatcatgagtagtggtggccatcatatctatcatctttttcttctgttttagcaggaactgaccatttttgtacctgcttgttggatttctctgcctccaaatttaaatggtgttattacttattattaataatctgtggaataaaatataaggaaaagtttatagtacaccacgctaaaggaatgtttcggtagtcttctatgtgatttggtatttacaaaaaaacatgtctaataatatttatagttgtatacaatacattatatttattttttaccatttgtaaattttaaaattttaaatagtttacattgttgaaaattatgtttaaatatcttgttgtacatctaattgtttttcttatatgtatgagttattctaaattttatccacgcatatctacgtaagctaaagacagagtacaagtggagtacagtcctgccagtagcataatagggcctccatgcaagatatagcgaaatcgtcaagcaacaatcaaatggagtgaagcgaatccttaaggagttgtacaaacatccttagctggccaagagaagcctataggccagccagagtgagcatataggccggtcaggatctgggcacatggccggccaaaaagtgacttccggaccaaggcaactttcgttcgactaagggaatctggcctctataaggaaacgatgtacaaagttgtcctccacttgccaaaggctggcctcctcttggtaaagttgacaagaacatgacctgccagatcctggcaggagcatggccggccagcattgacatgataggattttttgtacaactctacacgtgaaatgcaagccacctgcgaattgggcccttgtcaacctaataaaaaagctacgaaaatttctactttcagggggaaattaagtcatttgtatttatttatttaatatgtaaatatctaagaatttcattgtcagctagggttttaagcttcttatataaatgccttaactctagcttaaaaaatctaagtcactaagcctaatccttagcctccaaattactctaagttaaaaaccctactctctctctctctctc

SEQ ID NO: 18350 - DNA, 4219 bp, Cannabis sativa
  modified_base (772)..(780): a, c, t, g, unknown or other
  modified_base (809)..(809): a, c, t, g, unknown or other
taacataagaaaataccatttaatacacaaataattttaataatattttgacaattaaattaccaaaaaattatctaataaggttcattgctctttttgtggtgattaatccacgggaggaactgccatttggctaaacttttatttgatcttcaataatggaagaatacagaggaaaatacaagagttgagttcatcaacaatggtgtcctataccttacaaatcaactcacttgagagagatgtgatcaaacacacacatcctctttaacaactttcctcactcattacaaatgtaattaacatctaaattcctttctagattgtcacttaaagaagtagaactgaaataactaacttgggagctcaccagatgagattaagagtagcagtataccaaatttctaaaatctctcataaaaaagtatttatttttaaaaaaaaaaacgaaagaaatatctattattatatttataaaaaaattaaataattttacggtcacccaaacgatatattaacgtgcataaaaaataccatttctttttttctttaacaatatggaaagaagattgaacttggggtattggatctcccaattgctttgccaaaagaaaaattaattggatctcccaattgttttgtgaaaagaaaaattaaggtgacatttggtaatatttttatttttaaattttttaatcataaaaatgaaaataaaatttttattttcattttttttttaaataaaatcgaccacttttattttttaattttnnnnnnnnnaaataaaagtgtgttctgtaaattttatntttatttttatttgttgattttatataagtcgggtactgggtcgggtctgaggtcaggaccgaggtaggtccaagtctgaaaccgggtttgagatctgtttccactttccaatatttaagttggagtcataatttaaaatatttattaaaaaactgttaaaaaaatttttgaaagtgattttttaaaatttagattcttaattaaaaaattaaaaagtaaaaataattttatagaatatgattttaaaaaatatttttaattttttaattttaaaaataaaatactaattaaaaaaatattaccaaagattatatggctatgtccactccaaatgctattattttattttatttttttttggctaagacactccaaatgctatttactttcttagagcacaacaactattttataatgtcaacaaaaaagaaaaaaactattttataatgacaattcttttcttttggccgaccagacagcttcaccccttgcctttgacagtaaataaaatagataaaataaaataaaagagtgtttaatttaagaatatatatatgatagcatcgtactatttgtcatctatttctttctcctttggttttttttttttttttctatgataaccttctttttctttctcctttggtttggttaaagcaaagaatttttttttttttcattttaagtctatttttttatttttaattaaagaaaattggttttgttctctctttgctctcctcgatacccaccacagtagctgataactcagaagcgatgtgggatacaattacagcaccatcatcaacacctcaaattcagtaaaccctttctccttttacacacccatacgacgtcgtttctccatctctggcttccatggctgaatcttccaaagacgacctcgtccagcttatcaagcgttttggggcttatctcaccgtcaggatgtccaatatcttctcgatctctttccataacctggtttttccctcattatttctctctcttttttattttcctttatgatttacggatctgattaccttcttttcccatcaagttttgtctttttttttttacataatggttgaatgggtttttccaatttatgtgccaattttgtttctcccgattgattttgtcgaattttgtcatttcattccgacaggtttcttttttagatcatttgatgtgtaaaagggtgctttacaaacaatttttgttatctggggatgaagaatctgaattttattttcagaggaaagaaaacactaatttaagaaccaaagcaaacttttttgttgttgttgatattgtggccttaaataaaaggttaaagattttgactttgttttcacatttagtactgctgtcactccttggtatgaaatttagaagaatttttatatgttttgctcatggaaatatctgagtggtgactgttgagttggttgatttgcctgttcatacattttgtcagtggatttatttacctgataatgcaatttgagttatttataacacagttaagtagcctttgattaagatttctagtgactttgaatgaatggtatcagaatgcgcgatcggttggggctattgctggccttgcagtggcaatagttttcacctggaggcttttgagatcacccagtacacctcaaagaagacaactaaaaaggcaggctcctggtggtgccagtagttctagcatcacttcacatacaaatgcacccttttcaccatctggagtgttgccgtcagaggatgctagagcacaaaatgttgttgacgaattttttcaacaagtgaaagtaagttttgatctgttgatccgacatttgaattatgtggttctttgttctatttcatgtactgaattttcatgttctcttattttccagccaaccttggggcaaatagttaggcagaaattgagtgaaggaagaaaggtaattctttctatgaagtatagcacatgggcagtagtgctttatttataaaagaaaaaaaaggaggaaaatgcaatcactttctagtacctgctcttcacatcaatatctccttgatccttcctatattaatcaaattgaattttcttgacaggtgacatgtcgattgcttggagtacttcttgaggaaaccagtccagaagagcttcaggtagtaggatctctttagttgtttttttctcttaattttaattttttattcacgtgtttgtagttgcaacatggggagaactgacataattttcttaatttttgtcagaaacaagtgactgtgaagtcctccgttttggaagtactattggagataacgaaatattgtgatctgtatctgatggaaagagttttggatgatgaaagtgaagtgagtgcaaatctttttgcataaattactataatttgttatgtggtttcatgagttaacgtgatctaatgcaccttgttccggaggtgttctatgttaggtagcgtttggttggaaagaatgaaaatataagaataggaatatggatatgaataggagtggaatggaatgaaatcaaatttgcataaaaaaattgataaaaatttattaaattttttctcatcttgaattggaattgttttcttccttttcaaaatggaatagtcattccaccaaaaatgatagaaaagtcattccattggaatgacatttcaatactttaaaatgtaaccaaacaaaaaagtggaataaaaattgtttccatttcattacctccaaccaaatgccaccttagtgtttattagacttttagcatgttggcaacataaagtagtttaaacttgttttacccttcaccaaaaaaaatgaaataattgcatttctcaagtagtagtctaatagaaacatgtagtattctaatagaagccagtcacatcatacaattttaaatggtacaaactaggaacaatttgaatcatttttgcatgaaaggtgtaaattgcaagtgttcattacattataggcctcttttttttcccttttttttttcttttgtcttcccttttagtttcctgaaaaaatcatagttacagactaatgatttgcggtcacatgttccaaattctaactccattactattacatctttccccttcttatttatggaattcttgatttttcagaagaaggttcttttggctttggaagaggccggggttttcacatctggtggtttggtcaaagacaaggtaatgagatgttcgtagtattggaaagttatcagttgctgaaatatctttttctatccagtttcgcttgttggtttttatgaagtctgtcatcctcgtgttacagcaacttagtacctcagctttttatttcttttagagaattttcgcctgtcttcagttagcaaattgtcgagatgctcctt

SEQ ID NO: 18351 - DNA, 3221 bp, Cannabis sativa
atagtaggcagttagttacaaaattgattgtaatccttacaatatttttcccctgaaatcatggggttgaaaattgcacaactgtgattttcccagttttactgggtcaaaatgatcgtgtatttaaacatgtctttaattgtagcgtttggggatgtctcgacaggaacttggttccaatgaccttgatagtgagctggagctttttttttcttatccttccgagatcgacaatgcacgccttgttgcttctttgtttgaaagcttaacgtttcatttgtggcaattgcagttcttattaacagagagcttctcaaggctcatttgaatgttagcttctgactcgtcaagattgtaagtctcattgagaagatgtctgaagttaactgggggaagttacaggaatgggccttcctatagtgagataggcacctcgcttattatgtctcgagtgcactcgactgttgtacttattttttgcattttacactaagtgttatcacagtcgatatgcatcccttttgtcttcccagatgtaacagagttgatgtctcgctttatacatccaatgacgtatggtttcttgttaatacactaaacaacaatttgtatatcttttcctcgcataagaccttacagacagcgagttccaaagatattctgccacttacgcaattaatgagttattccattaaaagtgatttcatcgatccatactccctttatcttgacacatgtccttcactaaaatggtaaccaaattttgaatatagcaattacatatctaatttgaaaagtggttattgatatttctaggatgttcagatattctctcaagtggttgagagattccctcttaaatattagtaaccaaatccagttatagatatctatttatttaaaaaattaaataatgatttaactactataaataggagcctgatttgagtaatcataacacttctttatactacaaaatttgaaatatacaaagagaaaagtaaattagtttttctctctattgttcttactcatgtgttgagactcaaccagaacataggttatacactttatcctaatagcccacactattccttgtgtgtggtggatcaatttggatgacactggtgtgagtccaattgcaatttcctcatcaactagattaaggggcacaacatacgagaacttttgaggataccctgatagggttgaagaggtatactctaatcttagtacttttattactttgatttaatgtatacacatctggagatcctttgggctatgatacaatgataatcacataatacgaaactcgtctattgcgtacatgatgtagtaccataaaaccaacacctatagggtgccttgaaccaggtcacaagaagtatctcataagtagagatgtggtgtttaaagaggatgaaatggccattaaaggaaaggaggatacaatagctggtacatctcagacacaaggtgacaatttattgtttcaggtggaacaaggtaccaaattagatcaaattataaaaatcctaccaaatgattcaacaaaaaataaatctgttacacacagatgcaactcaaggtggactaagtacttaccagttggcttaagatagagaaaggagagacataagggcactaaaaaatatgcctatgctgaatttacagtctatgccttggctgttgcagaagaaattgaaagtttttaaccaactagtgttattaagaagccattaaagggaagaatgggaaagcttggtcacaagctgttcatgaagaaacgatgtcctttaagaagaaccaaaccaagatagttgctcctaggcctgcaaactagagattgatagggtgcaaagggattttcagggtaatagaaagaattttagggatataaggaacaagattcaatgttaggcttgtggataaggggttcacacattaacaggatatagatttcaatgatatattctcatttgtaggaaaccaaacatccatcaaaattattatggaaatggtacaaaattttatcttgaggtggagtagatggatgttaaaacaacttttctacatggggttttggaagagaagatctatatgaaacaactagagtgatatgacaatggagatcccaaccaggtttgtcttttaaaaaagtttctttatggtctaaagcaaggacatgggcaatgaaacttaaagtttgatgagtttattatgaaaattgttttcaccaagagtaaacatgatccatgtgtttactacttaaacaagatatatctattattgtatgttgatgacatacttagttggcaaggaaaaattggttatgaactaggtaaaataacaacttaagagtgagtttaagatgaaagacctaggtgtagccaaaagaatacttggcattaagattttcaggaataggccacacgtaatcactctatcttaagagggctatctttagaaagtgattgacaagtttggaataaaacaagctaagcttgtttctacgccactagctccgcattttagagtgtcgtgtgaaaaatctcccaaaacagaagctgagatggtaaaaatagagtaagtcccctatgctagttatgtacgtagtctcatgtatgccacggtctacacaagaccgaatttttcatattgtatgtgtgtgataagcaaatacattacaaatttatgataacatcactagactacactcaaataaattttgagatatgttagagcaacaatgagcacaggtctggtgtatggaggagaaacaaaacaaagtgaggaagaagtatcttaatttgtagatttagacttgttgaaaatatcgatacaaggaagtcattgactagctatgtgtttacagctctaggagggtgtataagtttgatatcaacctttaaaatggttgtagcactctcatcaactgaggtagagtacatgactgcaatagaagcaatcaaggaagctataaggctcacatgattgacaaagaaaatgggattcaactcagataacatcatagtgcactgtgataatcaaagtgcaccccatttaatgaaaaatttgatgttccatgagaaatccaaaaatatagacataaagttatactttatcagagatgtcattgttgcgaaaatatttggtgtgaagatgataagcacacatgtcaatcaagctgacatgtttactaacctagtttaggctat

SEQ ID NO: 18352 - DNA, 3805 bp, Cannabis sativa
tgtacctttttgcttatcttgctttcatcccacttatcttcaataaaaaaatctagtacattagtacattgtactagacaagttttaacaagtctcccaatgtacctacctacttcattttttcttgcttgaaatttcaatgcttaaattaagactgatattacaagcaaatcttaaatctaaagttatgcttaattcatcaacttattaacatatatataacaaatttaacatgtctttgtcttatttaagcataattatcgtgtcatgagttaaacctattaaacgtattaacctaaacattcaaaaatgacctaaacctaaacctatttatttcatgcagattttaaattgtgttatcctgtctgatctaaattattatccctacttaaaaaagttcctgaagctttacttttataaaaaagtaagaaacagaaccaaagtactaataagggattattagttaaacaatgattaacccttttactccaaagcttgaaattaagaaactgttttgtgttttattttgccatcatgagcaggtcaatcaaaaaagaacttttctttaaagaaacaaatccacatatattgactagtgactactagtaagtgaaaaattatacatataataataataattaataaatagacacattacaaatcgatttactttagtctttattcatatactatcaggcttgattgaccaagctagctgttaaactagtagaaactagtctcatctcaaaagtagtgataaagattaaaccatttcttgtactacaagggtaacaccaaacaccatctcattcattcttaaggacacttgtatctgttgccacgggttctcatattagcatagcactcaccacatttttccctgttgccgtacgtgcctggtggaacacatctgcatctgtcacaacatgtttcgcatgcccttttgcaagtatttggccttgaatgtgctgaacacctagtagcacacaatggtttacaatctgcacagaacaaaatcatcaaacactttgattacaaacaaatatagtaactaatcaagagggcttatgtttctgttaaaatttggtaaatggatgctaaaggagagcaaaatttatagtttgtggctctaatatatgttagaatttggtaaggtaaggtgtgattaatattgatgggttcatctcaaaaccatttgaaaatgggaggaatagcacataaattgacattttattttcacacgttaagaatgttggactaactttaatagattttatatatttgtattataattaccttctttggacttaaccggaggcattgatggtggtgttggcttgactgggggcttgtatgctggtggtgtcactactggaggaggtgctgatactggtggtttgtaagctggaggagacactggagttggtggtttcaccactggtggagccactggagttggtggtttcaacactggtggaggcactagtactggtggcttgtatacaggggcaggaactggtggtttgatgactggagttggaggtttggtaacaggagttggtggcttcactggaggaactggggccaagggagccttaggaggatatgttcctgttactggaacatctgcataaacaaactattttaccaaatacaaaagctttcaagttagtcaaaaaagcaaacagatagtatacacatcaacaaattcaactatatgaagttttaaacactctctcatgtctctaatcatcataacaggcctaaaactgaaaagggtatttagtattaaaccatttagacatcctaacagtgagaaataaacaaaaacaaaataaagttctgatttttccacatgtattggaataagtaaaggaatgtaagaaagtgaagaggttcatagtacctctgtagttactaagagaatagtaaccaatagaagaaaagatttgagagccattgggagaaagttgagatggtttttgagagaagcagagttcagtataaatagaaagagagagttgtgagtagtagtattagctggcggtttggttaaagtaaacaagtgttgcttgacagcttaacttagaaataaaagtatggctcactgaccaatatctgacttaatagctagtatctcgacccacttgacccccaaaaggactaaactagtttatctatctcttcttctttcactcatcacattgtacgtcaccactaatatcatgtcttcacacgaggcatatataaatatatatatatgtccttgtattgtaacttataaccaaagctaaagaagaagaagcacttctctcactagtactattttccagtcttgctttgctagtgtgagattccttttctttctttaataatcatttcatatgtagagatatattatatgatataatttgaaaaacaattaaagtcagaggcttggtgacagaggtcaggtgaagggaccagagtatttattttctttatgaaataaatcaatactataagagcagccatagactattcaacagtaaaaaaaaaaaaaaaagttcgccttttttcaatgttttacaccatgtttggtgagagggacaatttaagaaagatgtaaaatatgtgttcatataaaattttactattagcagattgtatttattaggcaaatagtaacgtaacttttgctaaaacacaaagagtttcttgaaaatttactttggatatgaaactttaagtatttagagatgttttttgttatttcaataatatagttcggtaacaaattgtttctttcaaagcatgcctcatttattctgctcgcaacaattcaataagttctctgggtaaaaaattattagacattttattttttgaaactactacttttaatgttatttgacagacaataatttttatatatctattatgaatttacacattcaataatttttaaacttggtaatgttgttatctattttattaagcgatcaacaaataaagtagcttataattttggtagagcttctttattctatcttgattgtaattttaatttaaaatctgttcgaactaatttgttaccattgttgataacagaattttatggttaataaaactaaattttccattaaaaaaatgataacaagtgtctttaagtaaaattgaaagaataaaaatataattatttattaaaattacaatattattcttttcaaatatagaaagactaaattttatacatttagagaaaaaaatgtatcattttatctttaattttccttatcttttcctttctacaacaaacacatgatttattctctttccaactctttccttccattcctctccttctactcaaaaatcctttctaccaaacatagtcttaatattttggtacacatattatagcaacaaggtgacacttaatctgaaaaactgggtgatatttccactatataatcaatgctaatatgtttttcccaaagaggaaacaattaagagaaaaccctcttggatcacagctcatccctattaagccttattgacttgagaatttgtcttactcactttacaatgtattaatatatattgtatatatatatataagcaagctagtagtgacggtgggatggttccttttgctttgctctttattattagtcttagttcagtgcatgtgatattcacatgccatgtcataagaaacatgggaattctcatacattgatgatcccttctagaaataccccatacatattaatgttacttacttactactacttacttagtgtacttactaatacaagtgttt

SEQ ID NO: 18353 - DNA, 6446 bp, Cannabis sativa
agctagttattagcggcgggctattaacggagaatgtccgccactaataatcattagacgtgaaaaaatatgttattaaatctgctgctaatacactaaaatattgtagtgatgagcttgaacattcttaactaagtacaataaactataatacaaaactacactcagtattctagttgtactagtattggtagcattaattcgtactttttatattgcctaacaaatattttttggtgtcccggaacaactctatgtagaccatactgctattttggatatgttaatctaaatggaaaaatataatatgtgtacactaaacatgtgtatatatgcatttgaatactaatctcactttaattctaaatttaagtgtgctgatcaatctgagtggaaaactgctcaatgatcagaggtcgtataactttgttctgaattctcctttaagaacattcaattccacctctaacacaacagaaatagaagaagaaaattgaagaacttggctactctttctttgtttttcgggtgaaagtaagagagagggggtctagtttcttgagtttatctcttgattttgattaatctaaagttttttataaatttatattaatagtcatataaataattattcttttaattaagtaaataccaatttacttactaaaaatcacaatttacatattacaccttgacttaattactataaaaaaccataagctaatgggtgaaatggtcatattccaattatttcatataatctcaaaatttccaactatccatacttactcctggtacctctagaattttaatgtatactaatatgatatttttggtcaaattaaccgtcgagttttcattgttgtcgaagatcaaaacatgaaaatattaaattgtatatataatatatttaacgtactttgaatttaataaaatctccataattaaaaaattatatgacatatgtttatttttaataatagaacttattttataataatacatgtatattaataattatataattaattataaataaactgtaattagctgctaatttttatatctaatcatgcggttattaggtatgttttaatttttttttttgaataatttttatatctaaaaacaagaaatttgttgttttgaaatctattataccaatggaataagttttgaaactctaaatcattttaaattttatgaaagttggtgatgtcctaaacacctattgtatacttttatatatataaagattaatttgaatttttctcctgaattttgacaagtaccaaatcatgttctctgaatttctcaggtgattaaaaattctcctcaaacaattgagattgttggatttaataacttttatcaaattttactaaagaaagtctaacgtggatgaaaatttagaagacacaattcggtacatgttaaagttcagaggacatgattttgtaaatatcaacattctaggagaatggtaatttggtgcatggataatcgacatattagcaaaattgaatgacattagataaaaatccttaaatctaagagaaatttttaacgatttgaaaagtgcagggagcacgatttaatacatgtcaaagttcaggatgtaaaaatctaaattactctaaaaaagttatatgtattgtaattttttaaagagcattgggtaccaatggtacccaacacattttatggatgacacttcacaattagcgatattttttaaaagttattttctcaagaagttatgtgatacttgatatttaattatactaattgtagtatatacaagttatagcaattcctttttttaaagtatcaaaacaaagacgctcttagacctgattggagcatacgatacgcccttactatagaattacccaataaactcaataatatattatgcttgtttttactttaaattatgtgatcagtataataatatagatactttagatcgatcgaaattaaagggcacctacatctagacgactttttacttcatcatattgctgatattattattatacaaaagtacatatatatacatatttaatttattataagtttcaagggtgtgtacatatgtgtttgtataaatttaaacaaaataatgcatgtgttttattaaataattatatataatactttgttgtctcagtgtctcatctatggacaaaacaaagttcaaccttcctaggtgagatcttacttaaatagtatatagaaacttcccttggaatgagtttgtgtcaactatactgaaccccatctattagaaaaataaatactgtaatattagttcaaaaaaagaagttgtcttatttcttctaaagtaagtttttgagtacttcaaaagattccatcgaattaaataattacgaagatgtatcatatttgtgttcaaattaagaattatatatttataaaaaaggattataattaaaagccatttccattggtaaagtttccctatgaaatgaatgttttttttttttgctttcgaatttttaaatttttggctagaaacccatgaaatgaatgtttggcttttggaggtgaacaattaatgtttagatgagttaaagagaggattgatgagagtgcaactaccccatctttccatttgtcaattcccataaagcttttgtttattgcttccacctacccccacaagtccctgttctcctcaatctacctatacctatatagctgccattgtttccctttttcttctatcccttttgcacttttaatctcccctttacactagatattattatatataggttccattaattaattgaaaaaataaattagaaaaagttgttacactacactaaacgtataatgtgatcacatatgaattttgagcttaaaattaagtacggaaagtctagggaagagaagcaagaacacgtacgcatatatatacttaatttacaggcatgaatattaatataatgttacatatagaaaatgaaattacgaataatgttaatgctataattgtcaacaacctcaaacacgttgtattaattaattcaaattcataaaacacatgaactggatgataatggcttcatttaagttaaagctgggatggtctctcattgtgcacctatttgattttgagataaataaataaatactggccaagaccaagagagtttagagaagagaaacatgatgatctgtagtacgtctctggacccttctcctagatcagtaaaaatctataagaatgaatcttaattgctacatgctataataagggtctgatcattttgaaaaagttttaactgatgaagctagattttagattaaaaaaaaaaccctgataaacctaaatttcaatacctaggaaattaattattaagattaattatttcttaataatatctagtatttagttaattaacacacacgcaaaaaaggtttttcttcgcttttctatatatgttaattaactacatacctaccttattgggtagtgtgaaaagggtatagggtttaattaatgcttatatattatatgttgatcattattaatttattatatgttttgattttcagaaccctttattgttaaatatgaagaaataatattagttatatatgggagatgagactaccaaacaaatacaaggggaaaaggaattgaacatcaggtattgggaaccattatttgagagaaatgattttcattggttgaccaaattaacagtggcagacttttgacttggttttgccgttcaaatatgtgagtgttaaccctattgcattaattatcgaacaaaaatcttacgtcctgtcttaattattcatcaattatatctctgcttgctttttcttgggaaaaacgtataataccccttctctcacacaaaaaattttagtggtataaaatacatcttttgcattgatttgtattaatatattttagattaaaatatagtatatactttgtgtacaatgatattgtattgtattgattttaagaaaattaaaaaaaatataatatatatttttatttattatatcatgtcatactacatccaatcacactcctccacccactccaacctcgacttccctaacccggtcaagatttggagcccaaaactaccttgactgcgattagaactgatcacaacacaaactcgaacgggtaagaaccatagactactcgaacttgtacctagacctatgatgtaaactcaaaattggatcctgacctactcgacctcagacccaatctcgagagtcggaccccaaccttgaccagaactctaacacctgaatttggacctgggatcctggccattacacaaaactgactcctagctcgatcttaacccaacctaggatccaaatcgtactagacctagattcgaccttggaagctgactataaccttaaccccaatcccaacctcgagcctacatcagggatcaggaccccaaccttagacactggcctcgataaagattgttagcttgcagctagaccctaatcctgacctcgaccccgaccccaaccttaatcaattaactcgaacacggaccttgactttaggtcctaccacaatatataatacaatctaagttcagaaatactacaatataatatattaatatatactatttctcatatattgaataatatgatttgtatagtattaaaatttgtgattgtattaatttttttttctcaaatatatgtatcgctcaacaaacttcaattacatcttgtaaggacttacaaacgaagcttgaataaattctaacattacaagctttcaaactatataaaatcatctttactacatctcttaagaaaacattaatttattataattctatactttatcacaacttttaaactttgtacgataacaatctttgtagctacataattatgattccacaaagcctcattcctagcactccataattcgtagaccaggcatgttgtaactataggaaaaatttatttccttagcttgtcaatctgggctcgatcaatcctatgaagcagtgtgaataattgagtagtttttacccgccagcccagccagttcttaacttcaataaggcaacttttacttagatgacaatcaaaaaataaatgctcaattatttatatagagcacccacaaatcaaacagtcactatcttgactaatatgttaaacatgtacagtctatatttggcgagtaatttgtttagaaccgcaagccacacaataatattgtgcttgggtatatgttcaaacgacttcaaatcacatcattaattatctcaattatttataattaggttcaagtaaggttgtataactcttaggtattgtatatgtacctgtcattagagtgtggaaatgagcattggttctcaatttgtcacaaccaccactttatgccaatatcaactataagtgggagcttcataatcccactagtttttatccctatctatttgacctacaaattgtcttacttagttgttattacccaaacatatttttttattgcagcattattccattggacagttctcctaaagtccaaacctccttcactattaggcttataaattcctcctaaaaaacatatccaggaccatcaaacatggaatctccattccataaaaaatcttagaaaataacattaattttgtgaagtattatcttagacaaaatcataatttgcaccaataagcatgaatggagatgagtaccgagttggttgatgtaacacgctaggactatattcataaagtatctgatccgatcaaatccgcaccatccaatctgcacgatccaatccaatccaatccaatattagtcagtgttcattgctctgtattatttctatttatgaaattgaaatcttgttgttgatgttgttatcattttttgtgatatgttattatagtttttcagtcttagttttttgtgatctgttgttagttttttattctcaaaatctcacattttccttatgttataagttaattgttatcccattctgggctaagctaaaatctattctcactttaaacccttcagtttgtgaatcagatccgataatggctagagagagaaagagagagtttggagaggaacgaagccctatgctgctggtggtgttattcggggggaaattttgggttggggtttgtttgagcgatgttgttgtgtagaggagagagacttttttatgcttataccccattgttgaatttgaaccgattccttcttttgagtaagaaaacaaaactaaaaaaaggctacctttaatctgagaggacatggtgaaaacacatcaaaaaataaaggataaatactcaaataaaatgtttatgagccactcaatataaacacaacctcttttaaaataataataataaatattaattattaataatatt

SEQ ID NO: 18354 - DNA, 8614 bp, Cannabis sativa
  modified_base (2354)..(2360): a, c, t, g, unknown or other
tattctaccttattttttaatttaaaatgagaaattaactataattatcaaagattcactaattagatataattatcgaatctgcaatttgtttagttaacattctttgaggcagttaaaattctcttggcagttttttttaattttttttcttttatttctttaaagcaatttcttcaaaaactttgggatgatgttattttttttcagtcgatttgggtatattggcgaatagtgtcagagaaattgaattgtcaacaaatgataatgccattgatgagtgaaacgtatttttggaatacctgaatgaagcaattccgatgttgattccacatgttatttcatttaacaaattatatgttgcaccttaatttctgtgagatttttgttgtaacgtgtcacaatgtaacaagcaaatatgcctttccttttgtatttgattctctatataaatgaatcagtagcactcatgcttatcgagttgaattttcaatctttgcatttttctcaaaatcaaacttggtatcaaagcttttgaaggctaatgctaatggcaaatgaaggcagagatgtcacaggtcacaccaacaaagacaagtttagaaaactcttcagcaagctccggtgttcagccaagttcatccatggttgcatcacctcaggtaactcctttcaacagcacattgtgtcaatcattttcactcaagctggatagaaataactatccactattgaaaactatgattttcaccataatcaggggacatagactcgaaggcttcctcactggacagaggacgtgtccacctgaaaaacttcagagttcccacaactgatgagaaaggaaatgttagcacaatatcattcccaaacccagagttcctcatactcttttttgacctagtcttggcctgccaccaaaacatctccaagctcggagacaggctcttcgacctcatcgtatccaccaaatggaagagcctgaatctcttcctcttcctcttcttctccttcaacattaggagaatcgacaggacagacctcaccctggtcctcaatttcctggatttcaacatccccagtggtaacttcagtgtcctccctaggaagtctaggttggtccctccaagttatagaatctttttcacgtgtcacccaggtagatgccatgtcaccttgtgtataaattgagataacacaattcaacatggcacttaacatctaaaattagatgaaaatgctaaattactaatataatatgagtttttgaggttcaaccgtcaaaaaattgagtttaaaaagttaattgctagcgaggtaagatttttagagattttgccacaatttacttatgttactagtggcaaagatcaatacaaaatgaaaaaagtaactttaagtagtataaatgtaaaagaaattaagtgaaagtaaaaacataataaactaacttattttagtattttatgtaaaaatctctaaattgttcttctttttattgggcttaatttctcttgaccctctctttcaatgtcaatccacgttgaaggcaccaaaaatgttctatttattgattattctttctttcctttttttttcgataaaggtaatcgttttaggttagagaaagatgtcgaaaggcaaaagtgaagagattcttgccatctaaaaaaatttattgattcatgggccgcaacattaatgttgcgacttacataataaagagatactcttagaaagctaaacaataaaattttaatattagaaaaaaattcctaatgtgtttctgtttcacgaatatatctaaaaaaaaaggtagatcagtatcaaatcaagtgaataataaaaatatgtaaatttctatgataatgtaataattatcttatctgtagaatttctattgctaaaagcataaccattatgtatgatttaccaaaataaacttgaatcataaaacaactatatatactcaaaacaattttttaagaaaatatattttaatatttcttttctaattaatgtttttagtgagctaaatatggatcaggttttttgacacgacacaaattcgacacaagtacaactaggcacgaaaaaatacgagtttgggcacgacacggcacaatgctacaaattggcacgacacgacatgaaaaatatgtccttaagcacgacacggcacgagaagtacaaaaagcacgacacgtaagcacgaatagactagcctaaaaagcacaacacgcgacaagcccaaaaaacacagcatgatatattaaaatatcttataattcattaataataataataataaaatataaatttatcaataataaataagttaaaataataataannnnnnnatataatactgaatattataattctataagtaaaactattaaaacataaaaaaaaagctaaaattatatattaatttatttatcgggtgggaaataaaaatttgagtatttattagtaaatattcaaattctaatgatgctaataattttttttatataattatcggtaaaatattgttcaaaatataatataactaaagctataaatatatatacattaataattgtaaacaaaatgaaaaggtaaagcatgaatttaagcctgaatataaaaatgggctgacttgtttaagaaatacaggtcgatacgaacaaagtacgacacgaatttgagcatgacacgaaaatattgggcctacgggccgtgtcaggcctaccctttaaaagtattgacacgacactgcacgacccatatttttctgtggcaaggccatttttgaaaaacacaaataaatacagatcgaaccagcacgtcacgcacaaacttacaatactagttgcaaagtctgtcacagtaattcctcattcacaaataaatagaagaatatattctaatgtcctttataatgatgtttagttgaataaaggatttctatttaaaaatatataaatagaggacactataaataataatataaaaaaatttatatctatgttacataatttattcaaataaaaattacatttgtgatgctattataataatgtactaaattagtaatatggaattggaatttattgtcattttgttatcccaaacaagaaaagcatatgatctctttaagaggtgggaattaaaatgcatatgcttattatcttatataattcactcaaccactaaagtaaattattgctaatgtaggtccttgtttatcttagtccactaagtagccaagttgcctttttttcacttgtggtgacaaaggcttttccaagaaagacaagaaaagatcccatattctatttctggatcaaaactgatttggaaatccatatgggggagacaaaatccacattacttattggagttatgtaaccttagtggctcaaagtgacttaaaagggcatatgcttagcttaaccaaacccacttagaaagtttgtgtcgaaacaatctacaagtgggataacccgtgtgagatttaagtctacaaatgtccatttcacaatgtttcacatctgattatcatgagcaagctatcaccactttttttcattcttgagctaaatcaattaaaagtcctttaatgtcatccaaccatttaataaaattagcttttattctaattggataataacccatagagaaacaagaagcaagaaaaccatggagaagaaatcatagctttgaagatcataccatcccttctatgctctttcatgactccaaagagggagggagagagagaaagaaaggaaggggtgggtaacataagagagtacatttgtactaatctttatgtaatgaaatatctcctatagccttgtgatatatattatctgagaagctaaagaaattagcttctttttaagtttggattaatgggcagaagaaaatctcaagatgttgaacatgagaacaaagctgtgatgttctgtagctctgggataaacattcagcaactgagtcctgatgagaaaatttactgtactggaggcttatttgcaagtgttggtcaagtgggaatgggatttggtgtttcaccaagtcctttaaagccaaggaacatcatattgaaactcccaaacaccaattcttacatgaaatatgtttcagttactaaatctggttttcagttaagttgggttccagagttagaggcagaaaaggttttggagtttggagaagtgaaggcaaaaaagaatgacagaggtggctttaaactgagaatcaagattgagaatgacaccctgaggaagttgatgagtggaggcattgctggtgcagtgtcacgcactgcagttgcaccattagagactataaagactcatctgatggtggggagctgcggcttctcggctggtgaagtgttcagatccatcatgaaaactgatggttggcaaggcttgtataggggaaatctggttaatgtaatccgggttacgcccaacaaagcaatcgaggtatgaaatcaagactcctctttgaatttagctgctgaaataacagtctaaatcatttcacagaagagaaacgttttgtgaaatgatttgcttaaccattgatattataatatttttccatagctgatacatctggtttctatgtgcagttgtttgcttatgatacagttaagaagtatctgactccaaaatcaggagagcagaaaaaaatcctaattcctgcctcattagtggcaggtgctgttgctggattcagctcaactttctgtacttaccctcttgagctgctaaaaaccagactgacaattcaggcaagctcaataacattttgatcttttgtattgttataagaaatgaaaataagggcaagagttttcttaaccaacaacaatttaagaagatgctcacccttcttcacttgaattaaacaaaataaaaaaaaaaaaaaaaaaagcaagtgctaaatgatatctaaattacacacacaaaaatcatcactaacaagcataatttcattgcagagaggagtgtataagaattctttacacgccttatcaaagatcatcagagaggaaggagctgcagaattgtaccgaggcctactaccaagcttaattggagtgatcccatatgctgccacaaactattttgcttatgacacgttgagaaaagcttacaagagagctttcaatcaagaggagattggaaatatgagcactcttttgatgggttcttcagctgctgccatttcaagctgcgcaacgttcccacttgaggtggctcggaagcaaatgcaggcaggagctttcaatgggagacaatacaaaaaccttcttcatgctcttttaagcataattgaaagggagggaatttcaggactgtatagaggattagggccaagctgcatgaaattgatccctgctgctggaatttcttttatgtgctatgaggcatgtaagaggtcaatgttagaggaaaaggaagaaatttaaggtccaaagaagcaatttattacgaagaatatgaaatattactacaagcatttcaatttagtttggtaccttacacttctcttatatgtttcactttcagttcactaagagaagaaaataaaaaaaaaaaaaattaacttctgaaaaatcctcaactaaaggctgaaagcaactgaaaacctataataataccaaagaaatctctaaatttagaaagtcatgtctaaacaatacaaaatcccatcagataaccccatctcagaatatgatagctcaacagaacctaaataaaacgaaatatagttgtaaagaaataacaaaaagaaagtacataaattgcaaaatcaacgaagaaattaaccacaattggagactacaaaggaagaccaaagtttgtaagagcaagaagtgtatctgtacatgattaacttctcgtaaaaatatgtgaatcaacagtgtggtgttgctatttaaaggtctgtttttagtttacattgcgattgtagtggaagtagttttagtgaagtgacgaattttgagatctataataggccccttagcttattaggtgaaaagttctaatattacctgttaggaagttcactaaattgcaatgtgtaacccatctaataaaatcaacaatcaaaaaagaaatgcatgagggttgtacattaatccttcttcagtttacaatgacatgcctcacattcctttctattttgcattcacttcagataaataatcacatttaacttgttcataaacactgaatattaattcttgagaaactataaaagactcccatggtaagattagaagaaaagcatagtacacttgaatagacttgatcgatttcgatactattttcccatttccattcaaatgccgttgcttttataaagtataaactgagcaactgtgacaacaaaacaaagaaagaaaatactaacattttcattaatattattcatttttgagaagtacatgcgacatttatttactatggtgacaagtaataaagaaggcacacaatcaaatgaataaggtgacatattcataggatacaaaacttgcgaaccaagatgcacataccaagaaaagaattccatcaacatacaaagagaatgaaaaaaccaaatgatcagataacaaaatttgatctctagtagaaaaagtattcttgaatctaaaagctcctaaaacacccttcgtgatttaccagaatcacgacgacaacagcagctcaaaatcctaaatctaaaaattagagcaatataaaatagctttgattttcagaagcagcaaaaccagaaaaactaggtaagagaccctcttcaactttgctcttcagcctcagcagcagcagcagcttccctttcctctgctgcagccgccatcagttcgtcaaaattttcagtcttcccaaggacaatctcaatctgaacggaaaatacgtcaagcaatcagtaaagaaacgatttgtgcaacaataacgatgaggaaactaggcgaggaatatgataggtaccctgtacccatatatacaccatcagacatcaataaccagagtacatttcttgcacctttaaagacacaatacaaaaaaaaaacacacacacacaaataaatggtgaggaacaatcatccatccgatccaaattgtcgaacctcaactggactttgaaaagtatccaggtgtatacataaacaaagaaaacctattatgatcttctgaacaagaatagagtacaatatcactcatacaccacaataccacatgaaaatatataaagatcccttgacaagttggagacaatagagaaaagcataaaattgtcttgcatggatgcccattgtgtaaccctgtactgtatatgcacaataacaaatcattaccttggccttttggattggtcgtcctctggagtcatctttcatatcaacagtggaggtcatgatctctgagaacagttgaagttaataagaatccatagcatccagtgtggtgagaaaaaaaaagatgttacaaaatagaaaaatcttactcttttcaacagctaatccattgttcttcagaatttctgcaacggtgacaactgtagcaatggctgcaaacataaaattacaagtacacaaaagaattaatatctttgaatactatcatatatcattaattacactcatctgtacattaaactttaaaagcataactcgtgaacactattccataaaacagagcattaagaaaagagccttatgctccatcatgaataagcaattaatagtacaaaaatttagcaaaattgttgtttaactaatcccagctaatgttttatagcgatgactaaacataaagagcctaaagcaataggcaataaacataaatcgatgagaacatagaaaaaataaaaaaggagtaaaaacctctgaagctaaaattaacgggaaaaaaaaagtgagaaattacccattccaagagcagaaagctcaacctcattatgctgttgcatgtacctctgcataaacagattgcatgaacatatcaatcactagtttagagcattgtactcattataatataagacaaataaaactcgaagaacaaaaggggaagattgaaaataagtaagaaaaaaggagttgttaccttggctagattgacgtagaaaaacaatggttttttggtgttggaaacctgaatccgatttttcttgtaggaatctcctggtgctgctaagttaatgttgttcactgcctcggttatctcttccattgctaaactatttaccaatgagaagaagaacaaaaattcccaaagccaaaaaccctaaccctaaattgatttctcgtcccttctctgctgtgatgagagaaaataaaataaaaagcacaataagaaagaggaagccgaacccaaactcaaagcgaagctgtttcttcacaggccaggccagccaggcacaataacttaactgaaggttgctatcattccaattccaacaaaaatgggccttatcttggcccacatctcagctacagctagggtcatatctgccttatttcggtctcaaacgtgctttttcacttatattttgcaaatttaccattttcaatttcatcattatatttaatatttag

SEQ ID NO: 18355 - DNA, 2042 bp, Cannabis sativa
ttttataggtggcgcttcatgattagttagcaatactctttaaaagttattttcttaaattgtataagactcgataattacactaatagcagtatcacaccgaagtgagtgctaggcatcgatggtgcattttagcaattttcttcactttaggaaattagctcacaaatcttttgatttggccttgtgggattcttttaaatgtcacgtttcaactttgttgtcttttaaaagtcgttcgttatacacactttctaggctcaaatgtgaggatggtatattaaagttagtctcacattgataatgtgtgaaaataaattgttatatataagatgaatgattacccctctcgttatattttacaccaaatgtgaggatgatattttttgtaaaaaattatgagtgacaataaattgtaaatttttattcaaaatctagtatttttgtaaaagcccataaaaaataacagaaggcattttgggctaaggccccaccctaaaaacatacaacagaaaaaaaagaaatttatttgtattgactttcaataaaaatattactcctgattaataatcaacatacaattgatatcttaactatagaaagattttctttagcataaaaactaaagatattttgaagttaaatttgaataatgtataaattaaaattgagtttattattttaccttgcttttatttatcactagtaaaaatggatagtgctattaaaaaaaataattacatatttatcagaaaaaaatatattattatataaatactaaatatgagttaattactaaagtaagaatatacttagactagaccatttttatcattagaatacactgctaaatttgatttagaatgagtcaatattatattttattattgatcaactcattacatttggtgtaaaattagcttaaaaagttaagaaaagcttttaaatttgattgaaactacataaaatttttattcaatatataaataaaatgtaaaaaaagtatccattgctattaatgctaaagtaacactactataaaaataatttttctcgacgtttttaaacaattatttaaattatttttgttagtttctataactgtcgcctatataaccgtcgcaaaacaagtaaaataggcgacgattaaaaatcgcgctaatgtagacttcgcgacggtttaaaatttcaaattcataaaagtgttgaaaaaaatctgtaagatctgtattttttgtatttttttttctttgtatataagaatccttataataatttataatgtaaaagtagaatattctccttctagtaaataacgtggtatatatatataaattaattaaaggtgcgtataggaaccaaactccaactcctaagtcgacgtcgtatgtaatttgaacatagattattatactctaacaaatagaataggctaattaatacaacgatgaaaactaagataatattaatatatatatatatatacaatatattaattacgctcatcaagcctaatacaaacaatgactttcactaatatatattttatatattatatatatatatattcaagtcgatatatataccaacaaatttacatgctaaaggtagcttctggagaaatcttatgaaagttttgccaattcatgatgatgactttgcatatgaaactcatttacttcaattgtcaaacttattgtgttaatttatctgactgtgttagatgcttatacagagaaataaagctttgtttactaattagttcatgcttgcatgcatgagaactgcaggtatattttacgaaaaaaaatctataatttacaattaattaaacacacatatatataaactataaagtaatatatattgtgtataactaataaatagtcatcaataattgagtattgttatcagtacccaacgctatatatatattaatatgacattttgtaaataattataaaattttttaggtaaattagtaattttttctcttgaattttgacatgtattaaattatgccccttgaacttttttgaccg

SEQ ID NO: 18356 - DNA, 5534 bp, Cannabis sativa
  modified_base (1512)..(1514): a, c, t, g, unknown or other
  modified_base (1654)..(1663): a, c, t, g, unknown or other
ctggtaaaatatttccaatagggtattgtccccaagaggtccaacaaagtttctcttataacacaactcatgctttctctattgttgcagacttatttgtcaatggaacacgcacctaggatgcagatctcataaactagtgtttcaaccctggtgtagcagcaacaatcttatccataaggcgtttggatgaagatggtgacactcttttttggaagtttggttcaaaggggagattttcagtcaaaaatgcatactggctctcacaggaggctcgatttcatgaggaaaaaccagtttggaaaattttatggcaattgaaactccatcctcgacaaatgcttttcatttggaaaattctaactgcctgcctacccctcaaaactcagctgggatttgtgagtgaggatgaccatcaacgcattttttgtggggaagaagcggaaattgaacttcatattttctacaaatgtccttttgctcgtggaatatggtttctttgcccgtggggtttgagaactgattcaattgcaatggataattttgaagactttttcttgtggctatgtaaaactcaaaatgattggctgatgcaaattactgcgtgcgttgttgaggcaatatggagatacagaaaggatctaattttcaatggaaaagctccttcaactccaacaactctgactcaaattgctctaagagctgcagaattccaggaaattcatagcagtaatggtgatgtacctcaccctgctagtgaaaacttgattatgaatcctacacatgtcagttcggatacttcatttgatgcatgtttccttgtggatgcctctgccgtggatgatgctgcaggaattggggtagtcctgaatcgatctggaggaggggagacaattactatccaatctcaatgtttggtttcgagtgttcttgaagcgaaattagtggcaattctcactgctttggaacgcgcgtgggaagatcagtaccattctatgcttatcgaatctaactcaaaagtggcaatagaggccctgcggttgggggagcttcctctggcttggggttcatttatagttttcaagaaatgtcttaagtttgcttctatgttttctgttacttttaagtttatccatcgtgagaataatactttggcatatcacatgacttctcaagctagagtgcatcacgttttccatattgctttaaggttagggagtcaacccctgttgtggttgacatttgagactttgttttcgtttcttgcgttttgtttcaatgaaggttttttcaaatcaaaaaaaaaaaaaaaagaatcacgcttacaacaaaaaaattaaatcttattctcttcattgtattcaaaattttctaaaaatttaaaggcaattataaaacaatataacatatataatcataaaataaattacattaaaaattggatatatactattttggatcttgtgttttgcaaaaattatcaattaaaccctctgttttgttaaatgacannntagaccctatattttttaaaatagtaaaaataggaccttgaggtcaatttttaattattttattttttcatataaaagacaatttgtaacacaaaacaaattatcattattaaaatttgttttgacaaaaaatcaattcnnnnnnnnnnttgtacaattttagaaaatacaagatcaattttatcatttaacaaaatagaggatccagttaataaattttacaaaacacaaaatcgaaaatggtatttacgtttacaaaattctcttcaataccagataaaagagtgtgctaaaatgtttgcttgggagtgtagtgcatagcttacccaatattttttttacataacctaaaaggtttcaaatattctcgagcttgttctactattttttactttaaattataatatagaatgcacggataatttccactgaaacagctaatcatgtaacatcaaaaagcttcaataaaaaacctctatcatctgcttaggacaattctttgacagcatataatatctttctaaaataataattatatcttttgttgacaatactgaaaattattaaattcgtgacaatacaaattacatgcccaacacagtattttaatactaggtagggttgtccttggtcaaattttaaagatggtagagtttttacaaatataaatatgtaataattaaaatataaaagactaatataacaacctaaccaaagtaagttgccttacataccacgtttctttctttccaataaccagtattaaggggagcttctggctttcctagtgcttttctttttctcaacatctctttcttcaggttataaccttttacttccatatggattctcatctctttctctctaatcccactttttcttttcaatttctcttgccttttccttgagcttctcttttttcctttctttattttcctttttgaatctttttgggtttgtttttctctggtaggtgtgttgaaccagagggattgaaacggtttctttcgatacataacacattcaattcaggttttaaagggtattggaattgaaatttaacttttgaactttttggtaactttgtgagaagagaatccatttttgtccaacttctccaagaataatatttttttaagcttttgtgtaatcaaaaggcaattatggcgaacgttattggacatgtgaaggaaggtgaacagcttgatttgcctcctggatttcgattccatcctactgatgaagagcttatttctcattatttatacaaaaaagttgttgataccagctttttgtgtagagctattggagaagttgatttgaataagtcggagccttgggatttgccttgtgagtattctattatcatattcccaatcattgattttttttttttgttttttatgaatcttaaacaagtaaatgattttaaccattattgctctttccagggaaagcaaaaatgggagaaaaagaatggtattttttctgtgtaagagacagaaaatacccaactggtctgagaacaaacagagcaactgaagctgggtactggaaggcaacagggaaagataaagagatttacagaggaaaatctcttgttggaatgaagaaaacgctggttttctacaaaggcagagctccgaaaggagaaaaatccaactgggttatgcatgaatacagattagaaggaaagttttcagtccataacctccccaaaaccgcaaaggtataagcctctttcccttgacttttggctctgtttttcttttaatgaacataacttaattatgttttttctttttgcttggacagaatgaatgggtaatttgcagggtttttcagaagagttcaggtggtaagaaaattcccataaatgggttgagtagattaagccctcttggaaatgaaatgggcccatttggtctaccaccattaatggattcttcatcaccttattgcaacaagtcgaaacctgttttccagtcgatgaacgtgccctgcttctccagccccataaacaacagcaacgttattagaaaccaagatgaaacaatggttgattccttgaacattaactctctatacggtgtcgtttcaaaccctctttcaacaaacgctgttctcccaagaaccccacttccgaactcgctttactcggatcaaaacgctgccgtttcatcccacatgcagttccctaactcttatattgttccccataacaataataatggcgaagaccagtcgatcctcagggctttggttgagaacaatggatcaaacttgaggcaaatcttcaaaacagagagagaaacggccgtaaatagtgaagtcaacacatctgcaatggccgatctcgaaatgggtaggagaccatttggtaatcaagttattccaactcatgcagctactgcttcagctggttcagttgatatggaaaacttttggaattattaagaagaagaaaataagaattgaaaataaaaactttgatggttaattagaagaaaagtttgattattagtaatattgttctttttagtagtattgttctcaagaattaaagcttcatggtatgtattgaatatcttatgaatctaaagaaaaaagtaataaaagtcaagtatatgttattgtaagaaaatgatatgattgataacttttttagttttgaagatttgcaattttgttttggtttgggaatttgttaggattataaagctttattatttggcattagtattgtcaattcgcttgaatacaaattgttgacatatgagtatgagattcagttggtggcaactgattttattttttattaaataaagaagtaaaaaaatgaaatttgtatctgtgaatttttagtaccttttattactcaactcttatctgaataagagcatgagttgcattactgtatttttttagtgattgattttggatttcaagtgcttgtggtggggactcattttggatatatggccatcaattctctctcggcacgtgcacgttaaaataccaaacacacgcaaaagcattaattaatagtgactctgtatttgtcaatcttttatttttctggtaattaatttcttttaaaaataattaattgacacttgaattttattacatacatggcttgcaagaattgatctcttccttctttagtaatagtagtacattttataaccccaagaagtaactagatctcttaataaaaataattaaatgattaataattaatttagaaagcaattaatacaaaattctaattaccttataagaccatctagaatacaagatataattcattcaaaaaaaaaaaaaaaaaaaaaaacaagatataaaatttatgttaaatttagcaaaaaaaaaaaaagtttgtaatataattagtccactatttataattgtcatttaatgcgcaagatgtaaaataaaaaaaaataattaattatattcataattattttatatttattgagaatataaaaaaatatatatattattttgttttttatggtttaaataagggtaacatgataaataaaaaataatatttggtaatagtctattaatcataataattagtgataatataataaataaaaaagtcacatttattgcgaatcaaatttaacacaaatttacatgtgccaaatttagcaccctgtttagaacaacaatagaattgtaagttttcttcaatatgctaaatataaccatatactactttttttagtactcaattaaaaattttctaaaacaactacaatatatggataaaaacatattattaatttttgttatttaataataaaatatcattccatttcagactaaaaaaccatttcagactaaaaaaaaactatcatttcataattgaagaacactaatccctaacaatactatagtttattggagaatattgtcccacatagattaaatgtaaaagtattgagccatacataagaatatgagctactccacccatcaccaattagttttgagattgaaccc

SEQ ID NO: 18357 - DNA, 11587 bp, Cannabis sativa
ctatcctaaagatcactattaccatctactaacacacatttctagcttccaataaactcttctagcatcttgagtggctcccttgtttctctaccatccacagattactggtatgacaatatttagccaaaaaggctctcacccaaactttatcctcctccttcatgatcagccaaaatagcttgacaagaagagccaatttcatgtatttgaaccttcgaatgcctaatccaccacactttttaggttgacatgtctcattccaactttttaaagcacaatagttccttttctccacatttccaacccaccaaaatctcgcaaacaagcaatctaattcctcacataacgcgctaggaacttgagcaatagacataaaatagttcggaatgctttgaaggacatagcttataaaggtagttcttccagcttgagacaaatgtttggccttccaaccctccaacctgctcagaattttttccttcaaaaaatgataatcttcccttttcttagcagtaaagaagaagggattactaaggtacttctcctttggatcaatacaactaataccaagtaaccccttaattttttcatggcacctccgggtagtgttgggcgaaagcaccactccgcatttctactgctaataacttgacccgaccaatgtttgtacttttgtaaacacttcattagagtttcagcattccttgctaaggcttgacaaaagaaaatagattcatcaacatagagtagatgagtaattggactagcattcctcgaaatatgcacaccaactagatctcatcccctttcagctctcaaaataagtttagaaagcacatcgctataaaggatgaaaaatgaacgacaagagtggatctccttgccgaagacctcgattaggattgaagagagccaagggggtgccattgagtaaatttgagaagctaattgaagaaacacattgtataatcagcttacaaacttgaatgctaaatccatttgcttgaagtactcacaaacaaaatccccattctaatcggtcataagccttgttcatgtctgtcttaactaccatagcccctacttttcctttcttatttttcataaaatgaagcacctcatggtccataagagaacattctgcaatccaacgcaccggaataaaggccgattgaaaaggagaaaccaactgatcaatcaccccttttaactggtccgtcaaaatacgagatttgatcttatacccaaaattacatagacttatgggacagaattgctctccaacaatacttgataatccattcggtccaggctacttcaagggatgtaatttgaagaccacctctctaatctcacagtcatctagaatcctacaaatcctttcattctcctccaaagacaccttatcaacaaaaagcaactcaaatcttgatcgataaacgactcagtagatttgtatatcgattggaaattttcctggaagtagaccccaatatctgcatgctgcctcaaccataaaccataagtgttttccactcacccaataaaattgcgtcttttgcgaattacattcgaagcatggaagaacttaattgccatcaccaaactggagccaactttctcgagacttttgtttccagatccaatccattctaccttccaattccataatttctatctgaatttcatcttctttttccacattaaattgggaaattagctcattttaaatatgtaccagttgtcttcgaagaaactttaattttctatcacaaaagccaaaaactttgtcattccatatcttcaaatattatttcgtatattgcaatttcctttgcagtaaagagtcatcgtttccagtattctccctcttccaagacttctctatgactttctcacaatccgatctcgaagtccagacttcaaagaatctaaatgggtactttaacttactgtttctccccacaggtttaaaaaaattggcgcatgatccgagcccacaataggaaagttgtggacacgagcctttaggaattccatacaccagtatgcatcagcaatagccctatccagtctcttttgaactctaatgcaagcatttctagagttttgccaggtactaacactaccatcatagcctagatccacgccacctgaattgaacaagaaatctctgagaaactcccttttgcacatcgtgaattttttgcctccttccttctcgaaatcatcaaggataacattaagatctctcatcaaaacccaaggctctccacactcagagatcttatccgaaatccattgccaataagctcttttcaattcttgatacagggtgccatagacacaaaataaacaacttatgggcttctaaatcattgttaggctaacaaataagagtaggctcaggaaacaaatgtggcttttgggacagacacaaccaatcatgaggaatatcaagactttgggcaatagtaggtccaatatcagggataatcgttcctttcattaacattagcaaaatttggttgaggtaattccaaaatctctggcccaacagtgaaccccttatcttcttccacctcctttaactttccctcctttgccacgtcagcaccaagaccaccatcattcccaagaaccttattcccacgcctactacttgtaccctgtttggcaatcgagtaccgagtagtggccttccagccttgaaccgcctctgacgagtgatagctcagctccaccggagctcctaccgtctccacttcaataatcttttccttacccttctgattacaatccttgtttccgatgtctcaggcactgatcttcttctccaagttcccttacgtcatattctattaatgtcccactcatgagtttcatccaaatcgactatcatttttgttactccctttccattcatgttgaagcaattgctcttccctgtatcgcttttaatctaaatgatgtacatctggactgctttacccacctttgaagtaaccatcgccatctgaacatgacaagttttgtctcaatgagctaatctactacagttgaaacagagatgaggtaatttctcatacttaaattgaatccacgattttggtttcccatctgtcgtcaagaagaaaccagtaggaataagatgcgacaaccacacctctatccacgctctgatatgtccacttctcaccagcaccttcttgctcttaatttcagccttcacgtacaagcccaccttctttgccaataggaacattatcattcgtcgagcatctagctggaaaaccatggaacaggacccaaaatctcgctaccttaaactctcctacccgaacttctccctccacatgccatggcttaagattcaacgaaattccattcaccaaccatggtcgtttatccagaatataagaacaaacttcctcatcctcaaggaagaaacccaaggctccatcttcacatttcttcatcctctaaaaacccagtatacgccaaactcccgtaagaatcttcttaaccaccaaggcgggcatatccttgcatcctataactttcccaacacaagcctagttagccactacatcttctaaggtaatgtcctcaaagagctccaacatctccatctcaagcgcagtgtcaagctgtaagaatttgttcttatcctcgtcaataacgcccaactgaatatcttcgttcacagggctgagcttagccatcgcagcttaaccaaacaaaaaaggccagaaacaaacaccaaagaaagaaagcagtgacttcggacaaatatgagaccagtcaaacagaggaaaaatgactcctaataaagaaagcacacgaaaagtagaaagtctctctaaggcaaagacacacaagggaaaaaatcgcaatctattaagagactagattctaccagaagccaatcccgtggatacgttttttgttattttttagttggttttttaactttttgtagagaaaagtgtatttttgtaattttaaaactttacaagcatatttttgtaaattaaaaattttgagtcgtaaaattataaataaggcataaaagaatggtatttttgaaaattttccttacttttttgcgtagggaggtggattcctttgttttcatcatagaccccttgttttgagttctataaagttttttgtttataaaaaaaatatatttttttaacaatgaacaaactttcattaaaaaagatcagtgttgagtacatcgaaaagaaaagatggaaaatcttttatccaaactagctcaccatctactctgagtgcgtgcacagctaattcatgagcagcgttattggccgaccaacgaacatgaatcagggacgcctcagaaaaattttatacaaaaaaactagaaatatcatctaaaagagaaccacaatcattgcaaagaaaagatctcttagcaaaagtagaaattacagctaaacagttagctttaatagaatggagaggaattctaatgccaagtgaccaatccaacgccaccctaagaactattgtttcatcttgaataactgtgaagtttcctacaaaaccaaaatagaacataataaggctcaccccaaagcataacaccatactaacaatgataaaaaaataataaaaagaataaaattaataagttgagtttgcatgtgtttttgtcttatgttcttgaaattgaattatgtgttgattccatggttagaattatgttttattatgttaggtttgaaatctaattttcaggttattttttaatttgatgttgttgtcaatgctagattagagctgaaagttttgtttagttttctaaactttgatgatgtaagttgatggaggtatgagtcaaattgatgtgggtgtttaagcatgtagtaattgtgatgttgtatacttgattatactttgaatttgtttgggaattgaatgcatgattatatgaagtttcagtgaattaggtaaatttcaaggtattgaaaatttagtatttctaggtttttcaggcccagctgcggcaactagatgtatggtcgtcgcggcgaggcttgatcccaggataggggatggcccctgcccagtctcgtcgcggcaactttatggtctgttcgcggcgacaattagtcgcaacgactccgcgacgacagttcagtttagctaattttctttttgggcataatttttgactttgaactctattttggatgttttatataaaagctcgttcgagctctattacatggtccagagttagattcttaaatgtgaatttttatgaaatgtgatttggggattatccctgttgtgtgaaactcaagaattgtgactagaaataccggcacttggtcaggatcacctatggattgaaattctcctcaaatgctggaaatcaggtaagacagtgaactaaacacaaagagtatagcgcggtggcgcggttatatgttatgtgatttttatatgtagaattgtgagttagagttattaccctaagtacatattgcaataaatatgtgataatgtaatatgtgaataaatgagaagagttatgtaagcataactagattagactcggtaactaaaaccaagataaaacctattacgcccttatatgtaaaaaagtcgtaagagcgtaacacgtaagtctatgtcatatagacattagatgcagtggcatcaatgtatttgagataataagatatacagtgcagtagcacagttataaacgcaaagacgtaatgtatgaaatgtgatttttattaatgttcatactattttattattgtcttgttgggccttggctcacgggtgctctattatgcgggcaagggtaaagtagtatcgagtcaaccatgagttcaaggtttttgaagatgaattgtatatgttcaagccaagttagaccaggagggttgggtccaacatggaattgtatagaaattttattttcccacttaggtcgccttgtatgaaataacttgtaatatttcgaaaatgatttttacggaatctcggatatgtaactttaatattttgttttatagtaaagtatgcttttattacaagttatttatttaattaagttaaatataagttttttaatcacctggcttatggacaccggtcaacgggattatcatattgtaatcacgacacgtggcgttcgtttaagtaggacgttgcaacaatggagtttaaaactccagaggaaaagtggagtgataaaccaccatatcaatctcatctgaaggtttttggatatgatgcatatgcacatcagagtgttgggaagttagagccaagggctctaaaatgtgtataccttggatacccagaaggtaccaaaggatacaagctatgggtaaaagaaaaactttgtttaaaaactataaacaacagggatgttatttttaagaagattatatttccttgtattttctaacaacccaactgttttaggaaatgtgggcaaaactaacaaggcatgtagcacagttagctttgacccatgatttgaagaactagaaactactcaacaaaccgaacctaataagaatgctggaaatgactgggatattattcaggtggaacaaatggaagatggggtagaaatagttcaggtggaaacttaagaaatcaagataaaacataacgagagaatctcaatcactattagttagcaagagatagggaaaggagggtccctaagccaaactagaagtacagttataacatctgagatgagaatactgcctatgatctactaagtgctatagaaggaactaagctagaacttgagacctatgaggaagccataaacagtaaagactcgaagaaatggctaaatgccttggatgatgaaatggggtcattagttaagaacaagccctggatacttgtcaagagacctaaaggaaagagcatagtgtcgtgcaattggctattcagacataaagaaggtagaactaaaggagaaccaatgagttacaaagccaggttagtggcaaaagggtttacttagaaggaaagaatcgactacacagaaatattctccctttagtcaagtataagataataagactaatgttagctcttgcaactcaacatgacgtggacgtagatcagatggatgttactataactttttcacgtggtaaacttgaagaagatgtctacatggaatagcctaaaggttttgaagctaagggaaaggaagatctagtgtgcaagttggtcaaatctttgtatggattaaagcattcccctaggcagtggaataagaggtttgatgaattcatgactaaacaaggattcaaaaggagttactttgacacatgcttatacttccaaggaaacaacattagtgatatcatctacttgatactctatgtagatgaaatgttgataataagcaaaaaaaagagctaaagcaaaacctggtcaaaggatttctaaacacggagtttgaaataaaatacttaggcactgctaccaagatcctaggtatatctataggcaaaaataataactaggggactctgatactatgttaagaagattatgtgctaaaatttattaaaaaattctcaatgaaggatgctaggaagattagtcagcctataacaagttaatatcaaaattctacgaaggattgtcctactactgctaaagaaaaggaggaaatgagcgaaattccctattcaaatgttgtcggatctataatgtacctaatggtaagtgctaggcctgacttagcttatgctataagtatactaagtacatggctaatccaggaatgctttcactggttagccatgaaatggatattaggtatctgcttggaacaatagaaacaagtttgaattagagaaagtcacaattaccaactaagataaaaagatattgtgactttgactatgctagagatagagatactaggtagtctacatttgcctatttctttctaataggtggaaattatctacaacagaagctgaatatatttcagctacaaaggctattaaagaagcaatgtggattaaaagagttctaaaagagctaaatctcctaaaggaaaatcatacaatctattttgataatcagagttgtatccacctatgtaggaatccaattttccatgacatgacaaaacatgtggagattaagtaccacttcatcagagaaaaagtgtcataaggagaagtgcctatggaaaaggttcccatagaggacaacccttcagacatggggactaaagtggtacccctagcgaagttcaaacatagcttaaacctgctagggatttgaaatagtggatgaccttaaatgacatcgagcttagacccaatgagatcatatatactatcatcgcttaataagataatttaggtggaatttgtaaagatgaatcctcttattgagctcaagaaaatgcaatcaaattagtcataagttgttacaacactttcttgaaggcttcagatcacagcagaacaaataaagaccctaactactcaactaatacgtttacaactatttttcagctcagcaactgctcagtgctttcaccaacatctcttctaagcctatttaaacctagatcaaggtgaagagcttcataccagagatagagagagaagatccagagagagagagagagaatgatgagtctgagtgttaagctccatttgcgtttgttttgagagaaaaacaaaatagaagttagggcaaagttatagtgaagaaagatagaaagaaattcaaaagattgtaatactgattactagtcaaatacatgtgacttgaaattaagaagacgatgtaaccttacctaatttgatagtgaaatctcaagtatctcagtggcgagctcgacaaggatgtagcccatctttttaggggtgaacgttgagaaaattcgttgtgttcctcttctgtgtttgatattcttaaccctaatctctgtaattttaattttgtgtattgttcttgtgcattttgtgtgtgaatctctaaccctagcagactgagtttttctaagggtttcttgaaggtgttcgaaccctagaagctgaaaaaagattagtcaatagggtttggttttcaaataagggttattagggcttttctttttgggtcattactgttcattttggactgatggatgttaaaatctttgcaatagtaccaattttcgcaagttaaattagcataataagactattgtataacagactaaaatgccaattattaacataagcgtttacattactaatagttctagataatgatcaaatgttcccaaaggaacaatatccaacagtatcgttcagcagattactatattaccatattaaaacatgaagagttctctctctgtccagagagtgagagagagagagattaaagaaataaaagccatcttaaaaggtatgactttatatatttacataacccatttgctgctgtagcacattaattagcactaaggtaatttaatgatgtacgaactttatgcttgtttcatattcaaagcagttacggtagagaccatagagtccaccccacacacgttgtgacccctgcagattttgtaatatccatcctctccccagttctgtccccatgaattctttatgatccagtatggcttatttttgaacctgatctgagagtaacctgcagccccataacccaccaaaagcaccccgtgatccagatgccttccgcagatgtatgggcacgaaactcctcctatgtatgtctgcatgaaaaccgcattgatgccaactgcaaagtaaaattaagaaatcgttattaccaccaccattttatttttctttttaaatttgacaagagccaatcagaaagatatgttagaagtaattacttgaaagggggccattcttcaccaaattggcagcgatttgctcttcatcaagagacacaacgctgaagttagatactgatgcagcaatcttggtcttgtcaaacttgcaggtaccacgatcggacccagtgtagggatagtccacctcacgctgaagtccaccggccttgactgtgtactcataggcatttgtcatcagcccaccatcacagcctgcgtcacaagaaccctgttcttctggatcgcactgcaagaagtacatgtgtgatctaactaattgacatagataataatctctagataacgataactttattcaagtaatttcttcaccgttcccttagcatagaaaaattgtcaaagttgacatcccagctttactagcagtcggagaacccaattctaaatcaaactttggtcaccatatgttatatatatttttggaaaagtctatagtacaaacggctgttccggtaaattcctatttagttcgacattcacgagaagtttttagtataatttttgttttttttatgatagtctacattttaattatttacttttaaattttttaaaaaatttagaaatattttgttgaaagcctgactatgcgtgtaaaccaactttcaaaatattttcattgaaactaatccaaagattattaaagctctctaagtaatcgctaccttcttcaagcatcaccatcgttagtgaaccaaaataatccaaatatgaaacacatgtaaacttttttcaatttcatatttcattttatacacaataaacagatatgtgcagcacacaaaaataaaattcaagagtttcagaaatttctaacagagtcaaataagaaaattatcagtattcagtttcctaacatttatgcttatagagtcaacatattaaatcaggtcccgatgaacttcaagtttactagatatgttacttttaggaaagaaaaaaagtcaaacctcgtggtcgcaatccacaagctgttgctcactcaagctaacaagctctccggtggccagaaaatgagctccctccagtgcccccgtggtactaaacgaccagcacgatccgcaagaaccctagttttcaatccgatcataaaaacagcatgagataaaaatgatattcaaattatcttcagctaagatcaaatacaaaagcagattctcacctggttcttaacctccgtgacggcaccatgatctcgccagtcaaagtcgtctggaagatcgttagtaggaaggatcggagccttttgagcgtcggtaggtaggcggagaggtttgaggccgagaaacgtccggtggaattcacctggagtcagatcggaaaacttagtgactccatgaacggcggtagggtcaagcttctggtgcctccttgcgcggcgaagattagccttaaagacgtcgaagcggtagtcgtgttcctccggggtagcataggtcttcccaaagttgtgcttgaagctggtgaagtggtggtcggcgttgagaatatgatcatctccttccgaaacaacctgacggatcagaagatcttcgtcttcgacctccttcgatttcacggcggagggcagcaccgtagatgagataagagagagaacgaagatagtgagaagagtgggtcggtccatcttggaaagagatgttgggttggggctac

SEQ ID NO: 18358 - DNA, 7011 bp, Cannabis sativa
  modified_base (5179)..(5196): a, c, t, g, unknown or other
aatagttatataaagtagtttatgcctttttcttacaacaatatatacatatagtttaaactttaacatataaaattaaattatttttttggttggtggagttcaatatatatttaaagctctttaactatatgacgtttttataaaaataaataaattaattaaatgaattaatttatacatttttcttgtataatttgtacatatatcttaaacttcaataactaaaaattagtgatgagtgtagtgatattttaaaattattattttgtaatgttgattttttttattttgtaaaattaatgattaaatgaactaatttatgcatttttcttgcataatttgtacatatagtttaaactttaatatctaaaaattaaattaaattatcctaaattttatttaataataactttttttatgaatacttattttaaattttatatacaatttagaatactttgcttaatttgatatttttatattcaagtttattcatttaattttgctatttaataatgttatttatacttttttttttcctagactatatataagaaaataaaatatagactatatattttatgaacaagtattataatttcaagactattttatggtcaagactcaaatatgctattttatggtcaagtatttttattttaaaagataactgattttttcctttccacatataatataaaatttaaaagaacaaaacatccgacacttaattaaattttgtaacattaaatatttaattttgtattttttttttcggtgaagggattaccttaataattctttaactcaacaattatatacttttagcaaaaaaaaaaaaaaaaaaaaaatacatgtatataaagacaatatagagactagagagtctcagttattgaatgtgtatgtaactaatgtaaaaatacgtcaagttaattttttttccaatatttttttggtttttataacaagtaatatgtctttcttttagggcggtcacactctttgttgctttcttgaactaaggagtgttaacacagattttcgttaactatatttgagcctaaattgtgatagacttgcacagaaattaaaagcggtaaagaaaagataagaacacaaaggtttttacgtggttttgcagttaaaattttgcatagtccacgagtcaatcttattagatttctgataaagctctcaagccttttctctcatgattttttcgtccctctttctagtgtaacttgttcctatttataattacataggagggcagtcaattatctagttgactgatattttacaataattatcccctgaagtcgtgggattcgattacataccacgtaaaataaatgcagttaatatttgaaaatcacacagctgtgacaggtctccttttaccgggtcaatgtaaatatctattaaatacattataaatcgtatcattctgggacgtctcgctgagaatatagcaacaatgaccttggtagcgagctggagcttttcccatgtctttccgagattggtaatgtaagcctcatcgttcgtgtgcttgaagacataatgctccatctgaaaattttaattgttggtgacaaggtgaaccttagcagtcaacatcatttgtatgttagcctctatctgagagagctgacttgacggagctgtgaaccccattgaaaggtgtctggagctaattattgaaggttccatgagtgcgccttcctatagcgagatgggtgccttgctattagctgtttgaatttacacgctgttatacttagtttgtataatatgtattatacactaagtgtcttaccagccatcgtacctcatcttttttttgtaatgcgtagcgaggttgatgcctcgctctatacgtcttgaagtcgtatggtttctcgttaatgcccaaatcaacagtttgtatatctttatctcgcgtaagacctttcagtcagcaagttgtaaatatactctttcaattctacatttaatgagttattccatcttcaaatatcattatcattacatttgttgatttgtattcttctcaatttgacatgtgtcctcctttggtgtgctcgccgaattttgggtataacaattgccccttataaagctctttttaataaaaagttctttttaatgattacaaagagtatttttttcataatctcttttgaaaaaatgtatgtcctctaattttggcggttttgtggtttcgaggtacatcaacattaaatgacaatcctttccacttcgattttaaattttatccgtaggatcaagtatctccctaatctaacgaaaattatcccaagagtataaaataaaccaaaggaaccacctttgtaacatttcttccattttagaaattttgaggattttttaagcttcttcgttaaaaaaccagcaccaaatttgttcgaaaacttgcatgccatctttgtgcttaacattctttctacgcgtttcatttgacttgagtttcgacttcaagcactcggagagatcctcactgcgttcagggattcgcagatcgcagaccgcaacttgacaccatgcattgtttgacaaaaagcaccaacccgagaacaacctaaggtataaagcaccccgattatgaggctttacccttgtttccaagagcccaacaagtcccactttcatggattctatcaaattcttcacatctaattgcttttgggatttgttgagccctcagacattccatgccattattctatccattaccaaatggaggtactccctctccattggtattaaccttcaagttttcctctattccatttacttgtaactcagtcgcacccatatcattgcattcactattctctccaagcacttggaagttgttctcagtaaccgtgggaataaattctgcttctataaccttccctccattttaaccatttgaaatccttctttatccatctttggctacttctcatgatctttctttggttgcttgggtacccattctatctttccattacttctctttgcattccatttatgacaatcatccgtagcatgtcctagacctttgcaatggttacaaataggggtgtgtctaaatcgatccaatccaatgaaaaccgaccgcaaaacattggatatccaattgtgatcagattgaattggatgttatttttaaatatccaattggatcggttcggatggtggatggggtgtctaaaaatccaatacatctaatatccaatcgaactaattattattttcatttagtttggatagtaattagattttacattgttgtacgtcaaatttatatatatatatatatatgataattaacataaaagttttactctttttttcttgaattggatggatcgagactaatccaatacacactggatctaaaatattggatggatccgatccgatccaaaaaatactaagtctaaaatattggataaatccaaattaaacaaataaatataaatgaaatacatccaatggatagaaccgattcaatccaacatccaatggatgttggatcgattggatgacagaaattaatttgatcggatcagatggtaaaatctatcatccaatatatgattagatcggatatggataggcctaaaaaaattaaatgtgatcctatgaacacccctagtaacaaagaattggcatccattcgtaatgtaccgtaatagtgagctcctcatcccattcattgagaaatgatactctctctgacagttattgtgacagacccacttcaatcataactcgagcaaaatttagacgctctttttgttacgtgtaatcatccaacataatggggttttcaatctgcccaataatcttagacaatgcactttcactccaatacttgaaatcaaaaatcaaggatttgaatccatgttggagcaacttgaacattctcttttttaaagtccacagatgcatcctaaggtttcatcacaaccagatttttttatcaaaaaagatgaatccatttttcataatttcatccctactctccacatctacaaactaaacaataaaaataccatgaatgattcatcctactttatcaactttgtcttttcataaccttcgaacaaacccaaccaggacaccgattgggggattagccccaagtacatagcacaccaaagcagagttccaaaattggatctcatctgctatgtcatccattttgattttgactctcagaactaccttgctcactgtctttccagtttcctcaaattttgaatttatgctttgaataataggtccagatctaagaattgggggaggtgtaaaattacctgaattcaaggcatcttcagacctagttgatgcttccatgaagtgagaaaattcctggcgaacctcctccttcctctagatcagtcgaagcgaacctctctgcgtcaagacctctgtttcccctgcctcctcatcttcatcgtctgagaagtcgattggagcaaatccaatcaactctgccatggtttttgttttcttcactgtgtctgacgacgtcggacccctcttcctcgttgcatgaatctccaccttctgaggccttcccttcttctcaggtccaccctgtgccatagctcagtaggtcgttgagagagaactttcgaagggagagaaaacatttattccaaaattaattattgcggctacattggtgtgctctttagatttgattatatacacgtattttatatatacattgaaagaataaattccattgttatacatattttatattaatctctctagatatatataagaattatattagaaaatattttaacaaaatatgcgtttgattagagaattaattactttcaaaatacattttataaattatgtctaaacatatatttttttaaaaaataatgatagtgatagatacaatattcttaatttgtagttcagagagtgtggttataataaagtgtataaattattagaaacatatatatatcattaattctttttaaaacaaaaagttatcgtaaaattaaggtttaaatatatatattttatatataaatgttattatatataaatgtaatttttatttttaaatatatataattgaattaaattttttatataaaatatttacataatttttatttttaaatannnnnnnnnnnnnnnnnnaattaataaagaatattttgttaagtaattgggatattctattaaagttgacgtgaaaaattaaaaaaattccgttaaactaagaattctgttagatagccacattctatatagaatagatatagagatttgataacattaaaaaatatataatttaaaaaaacttaaatttttttaaaaaattaataaaatatttttctttgttaatttttttttaaaaaattatcatttttaaatataaaatttgaccaagataaaaaataaataatgtatattttattaaaaaaaatgactaagtgggctaaataaatactattaatcaccatgggcgacggctgttccacctcctccgccattgaagaacccattcaaagcaaaggagagattcagcttggactcttgaagaacctctgattcactgcttggatggtagagagtcggggatctcagagcgcatctctttctctctctcctccagatctcatccctatctcgatatctggtatggttccatctctgatttcatcttttctttcgtgttgtttccgaatttatatgcgattttaggtgattatttttgtcaattgatgttgagaaatgaagtaactggttttggttgtggtttaagatattggagtagctgaatctcacaataatctctaccccatatcaaaaggtcccaaaagaaccctaatcctttctctgtggcagttacattctagatattcatattcttgcttccctgtgcataattgcttaccaattattttttaattctaatcttagaaaaatcgaatctttgaatcttcttttggttgaagttatacatatctatatattttattaatgaatcttctttagggttttattattattgcctttctatatttttaccgattaatttttttggaaaattatatatttattcatttgatagatttataaggatattgaattctcgtcacgtttttctaatgtgtttgtttgcttaatgggggtttcttaaattattaaatcaagtttgatgtaattcaatgtcttaactttagagcagtagagtggttggtgttcggagattaagaaaattgatttctatgttcctggggagaggctgatttgggaagtaatagttagataatcggggtagttgattatgaattaataactttgtcttgcagttgatttgggtgtagattttttctagtttatcttgagtttgtaaaaaatctataggttatttaatcttcttgcttggatgttggtttagttttgaaggggagtttgattgtaattatagttttttgattctgggtcgtttcgagcttttgcaattttagtttttaagctaatatgatggttagttggtcttttcttttagtttgatttttttgttttgttttgttttttaaagaatgaaagtaccaatttgatgaataagttgcgccattgtttatggctttggtacctttcaaggtttttgcacttaatatatggctgccctctaattatttaggataattagtttaaaatatcaagatctcatgaaatgtaaaatattataaaatttaaagttaaaagtgtttgcacaaattttactaattagttctaaaagggttgactttggtaaatgtatgatttaagaaaaaatttagtaaaaattacccaaaatatgggaaaattttaagagtttacttttttatgacataaataaataaagctaagtgattattgggttttttgtttttttttacatttatatggtttttttttatgccacatttttgtaaaaaaaaaatagaaatcccatatttgtaa

SEQ ID NO: 18359 - DNA, 9518 bp, Cannabis sativa
  modified_base (45)..(46): a, c, t, g, unknown or other
tctttattaataagtaaatatgattatattgaaatgtgttttatnnagggcataaaacccaacacattgaggatacacacatcatttgaaaagatctctatgataagtttcattaaagtaatggacctatgattttttagattaaattattgctcagtggattgtctcaaggctttaatgatgttagtagctatttcactaagatgaaaattgtgaaaaagaactcaaggattttcgtcctctatctgtgtgcatttgtggagctatgaaagctttcctagatttttaagggtaggagtatgttttgtaatttctaattagtcttatgtaatcatacaatggtgttcgtgcttagatcttgatgtaagatcctttgccttctattgacaaggcattttccctaattgtgcaagaaaatacatcaatgatgccttcaacctttggctcgtgttgatatggaagtaggatctactactattgatccttttgttgctactgctcgatttaatcgtccccatggtgatcgctcaatttgtattcaatgtggcataactggatctcctcattgttataaaattattgtgcataagaaaaacaaccaatgacttacaatttagtatactagaccaacaaatacggaacacatcaagagagctacgaacataaataatgaattaatcagtaaaacagaaaataaaaatactaagtttaacaagtttgagccatgtgcaatactctacatctcggttggaacaacaacaatgatatctttattgatactagtgtttacaaggttacaaaaatcttcacaaactcttaaagattatgacaagaagtttctctctctagtttagactctctctcttacacaaccttactctttcataattttcactcaagtaataattattattctctatagattataaagatcgatggctatttatagattttcattgttgcctaaattagctctaagaacatagttgcagatttacactgccttaaatgatctagctcatcaccaacaataataatccacatcatcttgaagacgtgctttcagtatgaactatttgggagctaaattactcacaagccttttagactcgtacaattgctcctttcaaatgaacaatcaacactgatagtaggatatctagatgtacatctccggataaatgacaagctatccagagagatagttcatatgcagtacatgtttatatggaaacaactttcgaatcctacaaattcatctacacatgactttctggatccataccaagcttctcgtatctactctttggattcacagcttccctttcggatgaaaaatcttgtaaccataatcaacaaatctcaaccttggtttcaagttgaattcgcttgacaaatccttattataaatagtgttgttcccctcagctctccaagttttgctgactccaatcagcttcaagcaatgctcaaatttattactcaaaactacattggttatcatgtccgaaggattgtctttagttggaacattggcaatcttcacaacttctttctccataacttctcgtatgaaatgatgcttgatatcaatgttcttagtatgttcatggtgcacacaattcttggttaattgaattgcactatgattatcacaatgaacagtaataatcttctaattgagtttcaactcttccatcaacccagttaaccacagtgcttccttgattgcttcaatcaaagccatagtaaacatagtaaacacatatctgatcaaagactttcaggtatcaatacacactgcataatcagagtccacataaccattcatcacatccaagtcctcattctgattattcatgccatgtaccagtcccatcttaacagttctgttaaaaaaaatacagaatccatttcagggcttcccaatgctcctttccaggatttcccatgaatctactcaccatgctcagtgcatatgctatgtctagtctagtgcaaaccataacatatactccgggatccaacatcactagcatagggaactctttacatctctaacttctcaattttatcttctggcatctgagtaatactcagtttgaagtgttgtgcaagcaaagtactcattgccttagagttactcatttcaaaggtatctagaacctttttgatatacctcaactgattcaagtatagtaatctcttttgcctttcccttcttatgtccatgcctaagattttactagcgggacccaaatcctttatttcagtctccgtctttagctggagtttcaagtgcttgatctcttgtacacttttgttggcgatcagaatatcatctatcatctacgtacagcaacagatacaatgtatctccatttctctctgagaaatatatacaaggatcaaacttatgcttttccttagaccaatcgtcacataatcatcaaatctcatgttctactgtctcaaagattgtttcaaatcgtacatagactatcttaacaaacatacccagtgttcctttccagcctcaatccttccggttgttttattagaattctttcatatagatgtccatacaggaaggtcttcttgacatctaattgttccagtttgaggacttgacatgcaataagtaccaacaaagttctaattgatatatacttaataactagagaaaatacctcattataattgaatccttctgtttgagagaatccctttgcaaccaaccttgctttataccatgcctcttgtgcacttgaaatgccttctttccatctgcagacccattttcatctgataacttgactgtcttctgaaataggtattacatcccaattccacttcttcttcagagagtgcatctcttttgacatagctccattccatttctttcagtctttacttttcattgcttgtgcatacctggtaggatcttcatgcacaatctgattagcaatatgaaatgaaaatgtgattaaatcagtatgtccatatgtatctagagcctttacttctctctatgtctctagccagtttataacttttcagattatcacttctagaatcatcttctaaatcatcactttcgtgatctacaagtgttttagtctgtactctgattggtggctccacctcaagctcatttctcggagcttcaatttaattttagtcagtattggcttgacttccaccaggtttgtcaataaatcccataacagattcattaaaagtcacatccctactaattatacattttctcattctaggtttcaaacaccatagtctatatcctttgactccttctatataccccaagaaaatacactttaaggccctcacctcatgtttgtcttacttgatgtgtgtatagcaaacacatctgattaccttcaagtgttcataacttgttggcatccctgaccacacttcatctagagtcttgaaatccaatgacaaacatttatttatcaaataaactacagtggacacaacttccacctagaacactttgggcaatccaacacttaatagcatgcacctgactctttccataatggttttgttgaacctcttcatgagtccattttgctgaagagtcttcctcatggtcttgtgccttgctattccttccttcttggagaacatatcaaacttttttgaacagtatactagacatttccattctaagctgtttcactttccttccagttttattctcaatcattatattccagtgcctaaatctttcaagaacttgtgtcttgagtaatcatcaactatagaaagaaaatacatgctttgtagattgtgatgatgttcttgagggtccccataagtaactatgaatgcaatctagtgttcccttggtatcccttttgccagttcaaaacttaactctacaagccttaccaagaacacaatactcacaaaaatctaactactcaagctttacttttccaagtagtccctgcttgtttagttcatacaaccctcttttactcacatgcctaagtctcttataccatatttctatttcatttacatgcttgcttgaaacacacgcctttgtatttttcactgtggtgccttccaaaaggtaaatcccatttgatttccttcccctcatcaccaccattgaacctctgcaaactttcatgactcttttctcaattttaacaagaaatccttgatcatctaacattccaacagagatcaaatttcttttgagatcaggtattagtcaaacatcattcaacaccctttcctcaccatcatgaagtttcattcgacggttctaatccccaacatcttataagacttttatctccaagatacacagtcccataatttctagatgtaaattcttcaaaccaagatttatttgttgtcatatgaaatgaacacctggaatccaagatccattaaaaatttgaattctcagaggttaacagcaaagcaccacttgagtcataaccgtaactacgtacacctacatccctttctaatcttaaatcaccacctccttatgcctctctagacatgctcttctgagatgccctgttttcttttaaatccaacatctaagaatcttctggccatcagactgcgatttagatcttgattttcgttttgaaccttagtgactttctcttttctcacttccgccccttgtaaacaatccatcaccacttccaaaattcttcgattcactaatttgattcaactctctcgaattcaaggctgattgcacattattgagtgtgatcgactctcttccatataatattgtatctttaaagtacacaaaagaattttgtaaagaactaagcaaccacaaggcttgatcttcgtcttcaatggtgacaccaacatttttaagatcaagaatcaattgctaaactcatcaatttattctctaacatatttgtgtttcatcatcttgaatgaatataggacctgttttagatatcaactattcaccaacgatttagtcatatacagactttcaagttccacacacctgcagttgtatcttcttttgcaacctttctcagattcttatctccaagattcaaaatgttcacactatcaacctttgagagagtctcttcttatccttttcagacatcgaatcaggaagagacttctttcctagcagagcctcatacaactattggttaactagtaaagccttcattcatccacgataattcaaagtcattcgtattagtaaacttttcaacatcgtatttcacagaagccataattacaaaccttactctgataccccttgtcaaggattaacagacaccatccatctccactccaagtttgatattgtccgctttgggcctaagccctcacgtttttattgttcttgagcaccttcccaaaaggccttataccaatagagatatgtctatccttatatgcctatgatcctttccatttttaatcaatgtgagactttggttgaacacccaacaaaacttcgtggatatttacatggtttcaaattcaaagatgtaacttctccatcttctgagaatcagaattattagaatttgaatgatcataattctcagaattttagtccttaggctcacagcttcgctaaacactggttctgaagtaagtgctgatggctcaaagaatgtggtttctacactttcttctactcaatgtcaacaacatattcagttgtttgctatttctcagtcataatcacattcatcccttgcttctaaagatcgtccaatagcttctaaatttattggtgtgtcttatgttgtttccactcattcttggataatagacattggtacgctacaccccatgtatgtagtgatgtctcctttattttatgatgtttgtttcacatttcttgcctccattgttcttcccactggtcaatctgttcaaatttctaaaacttgtaccatgtccttgtcttctacacttgtgttagaagtatcatttatgagtaaatcaactcactactcttccttctttagttgattcttgcataattgagaaccattcttggacagtacactagatttggatgaggcataggcaatctttactatctcattcatcataaacacaccatcattcatgcggtctctcatgctttggcttgtactattcctttgaataatactttgtggcactttaggctggattattcttcttgtatcaaagaacattatgctcataagaaattacagttttttaatgttcaaaaaagtacataataaacattttcattgttttatttctcatttgtctaaattgtgttccttttatttcccacaataataaatctacttctatttttgattcattatgatgttcggggaccatatcatattcccactattgagggatttcgtccgtgacgaaaagatatagggtcatgtgtggaggcacattgcccaattgaattttttaaatttattttttatatgtattttttttatatatatttatgtatttttgtctccataaatgtatttttttttttaatttttccatcacatattataattttgcccatataaatttatatttttattttttatcttcacatattttcatatttattctcatatatctactttaacctctataaaagtaacatttttctttatattgaaaatgatatattttttttatgagtacttttttatattaaaagaaaataattttgcatctttatattttgtggctggctctgccaataaatttcgttattttttgacagttgttaatggctattattctataaatacttgaatttattcgttaaaaaccaagcatgaagtcattaagttttaaataattggctatatatatagttatttaattaattacataatatatattttgtcaaatatatttatgtatattttttttttgaaataatatatttatatatagaagtcccttcgaactaaataatgggtaagaaaaatatttattagaagttatcttatattaattcacaacatcctattgtatcacaatttatctgatatgatactttcttaatactataaacattatcggtaatcatcattagataaaaaaaaaaaattgacaacatcctatgatacagctctcctatagtcccgaacccaataaagaaaatagattataacaacaataataatatatacaagattgattgaaaaattcgttaaagtagatagtaaccccaggccagccatgaataaatattccaagaaattaataatatggaaaaataacttctaatttaaccaaagattgagtcatcctatacatcactacaaaaaaaaaaaagattaatatttagtgacaatttatataaatatatataacataaatctagttaaaattcttataatggagagttaatatttacttttaagttgccactaattgatataattttagctataacttaatatatatagcgatataaaaaaatgggataaaaattaatatataaattacaaacaaaatgcattttctatttctaactaatgccttcagccacatatattttttttaagtaaaaaacatgtatatttatagtaatatattacttttagtgacttaaagtaacatttctttaggcactatttaattatatatatacaaatgaaaagtatatataaatttatgttgaatagctagtttcaatatggacattgttttatactcaataataataatccccactagcaaagtacatacatattaggtatatagtttcaaaacaagatattaattaattaaagaaaatcaatactgtcatattatatattccttaaaaatttaattaaaaaactccccattaattcatttgggtggatgtaccataaatcacaatcattaagttttaattaactttaaaaatatcgatcttttttcataaaagtttttgtggctacataatatgatttaaatataatacatatacagtaaattcacatttcctaatatagtcgtttagtcaggacaaagatgtcactacgtggaactccatcaagccgacctggaccttagtaggaactcccaaatatatcacatcattaactgtttccgttagagaatggttaatagaaaaccattgttttttagtagctatgattagttaggtatatttttttaaaaattatttttttaaattatattaaattcgatatttaattatactaataagagtatcagagaaaaaaaaaaaaatactaaatacttttaaataattttcttaatagctagaatggtaagggtcacttcaaaacacaataatgaatgatatattaatactgttgcaatttaatattgagtcacattagtgtagtattgaacaccttaaaatgctcaataaaaataatctaataaaagatatgacaaaaaatataaaaataaattaagaaaagagaaataaattaaagtaaaaagaaagtgaaaaagaaaaagtaaggttttatctctaaatccagtttttttgtcttgcccttatttttcttttcctcatgataactaaatgaagataaaaaagagaagagatagatagatagatagataggaagactgtagacatggaagctttagtataattaagtggtgtggtgattcattcatgcccaaaaaggtacaaaactagctttcatcccctcttactttgacacgatccaagatagagtttcatgttttgtcgacaataaaattggacggatttgccgaccacaccaaacaaaattgctaggatagccatcaatattgattagtttatatatatatttacatttttatttatatacatatcgaatattataattgataatgttcatgaactattatttactttattgtcaaatggttaataatggtaatgctacagataaaatataatgattaacagattggtgggatattgttaagtgaccaaataattctttatattactaaaaacggagtcttattaacgataaactaaagtgttacgagaggatatgcattaataatactgttattattgtaataatttctttttaattatgttataaagtatctaattatatcagaatcacgaacattctccatgaaaggactcaagcaaaagataatgatatgattatgtatagctaggaggaatccaaagaaattccctggcccctaatataatttagctgatcactaaacagtacgtacctttgcttattctttcattcacgagtgatattacttttttctttagttaaatatattaaaaatgtgaatataatccagaaactagaggttcttatagtataggcacaatggacatgcagttgcgtgcaggagactacatttttcgaaagaagctcgactctttgctagggttacgaccatcagcagtttgctatgcactacaaaaattcttacttttggtcacaataaaatttgtaactaaaagtaaaaaaattgtaactaattataaattatttttcctatgttgtaactaaaaagtc

SEQ ID NO: 18360 - DNA, 4883 bp, Cannabis sativa
ttttgaagggtggcaaagttatgagaagtttgactgatgattgattttcaagaccccaaattttgacggtcttgtctcgtgaaccggttgcgaattcgtaaccatatgggttccatgagcatgcccatataattctcttgtgtgcttcttgccttgctactagctggtgacttatttcttctgtgcctaaccaaaaaagaaaaagatctctgttattgtcaatctcaatgggagaccaaaatcatgtaaaaaaaaatgtcctaccaaatcaaccacctctcctccaaaaaaaaattcaaaatggtgggaaaatagtaagccttgtagtataaatggtaagatgagagaaggaccctgtaatttacaaaagttacagatcggaacttttattttgttaatgacaattcgaaccctgtatttttcataacggtacaaaatagtacattgagcttattttttgtcaaaataaaacataataataacctgatttagaagtgtagactggttacattttttccatccgttcgtattagaaattggcttcaagttagttatattttaaataaaaattaatgacaatcaagggtattattttgtactattttgaacagggtccaatttatcattttacaaaacagagagtccgatcaataacttttgcaaaatacaaaatctaaagtagtatttaccgaaaaaactaagataaaatgaaatgaaataagaatatcagccccattgtggcactggcatgctagcgcccttaaactttaaaactgcactcatctttgcccccacaacagcagaaaaagaaagatgagttccattttttttcatacaggcatggtataaaaagtgtctagctatgaaatatgaaagcattgtaacaccgtcggtttagtaactatagaggtagaaacaattacctgctcctttgatcgcgaaaacagaaaactgtcggtctcttgaaattgtcaaaagaaatttgtcatcgtgggagaattccatctgagtcactgtcaaactgtgagactgcaaccgaccaaccaccttccatgaaccaacttcccatagccatatctctgctaccgttgcagactgggcctgcaaaacataataaagagcgaatactttgattacttccattcgcacatgatttccacgacgatacaatacaacccacgtaaaaatgtcatgttaaatacttttagctcgataaccatgaaaatggaataaattctaataaaaatgtactaggaatagctccttatctttaccttacacgacgaggcaacaagatttccttcatgattacagcataacgaaaaaagttcattaccatgaccatagagcttgtgtgactctggccatagtgtatgccatgctagttgatcttctattgggggttcagtcaacactacagggactgcatcggggatagtttcaagtgtgtctatgttctcactaccgactctgcttgatgtgttgtcgttctcatctgcacagaaatggtatgattttcaataactgattatagattctatgtccaagcatgagatagaaactcactctgagcgtaaataggcttttgtgatagcccaagagcggacatgtttgcacccaaaacctgaacaccggtttggatgtcttcaaaaatactatgctgtgaaatggcatgaccgagagtctttagaaaggacaacggagcttcgaatactcttgcaaccttttcatcagctccacagacaaatcggtggttccctttccctcgaataatggtgacacagtttatgtcatgaccatggacttgggggcgagcgatttcatgccagccatcgctatcagaagaagcatcatttttccaaggagcatatatccgagttgtctgcacatttttttcgagaggaaataaataataaagaagcaactctatgttctattaaatgaggaatttttttaaaaaaaagattcaaaccatggagagcaaattacctgatcatgactgacagacagcaagtattcgccattccttgcccacgaaatatctgaaactgcagcaaaatgccctgatggaactttttgtggctgccagttatccaagtcaacaccaacatttctccagagatgaaatgatccaccatatccatgagctaaaatggaatctccattcgagctccaatgaccaccataaaaccccaatgcacaatgacttaattcaccgacagtgacaacattcatccagatacccgaagtcctctctggttgccaaatcatcattgtcttgtccattgatgcagataaaatgctctggggttgacaataggcacccccatctccagaagcagacgggggttgccattctaccgaatatacccaatcctcgtgcccaattagcagagattccaaagaaacttgataagacaatgtgccagcaacaagtacaggaccttttatataagaagctaaactaatttcttctttcttttctccaatcagtacaatcttccatatccgtatgcccttgtcctgagacgaactcacaagtagaatagtttctgtcttgccattggaatataaaggtaacgagaaatctaaacaccggatccaatctgtatgccctttcaactcacaagcatggacaaactgagatgaataaagctaatgtcaataaagagttgcataaaaaggtagagaaaattaatgctcggataaacaaatttcaaagttcataccttttcagacctcccgccacagtagagatgaattttgttatccaatcctcccattgccaatactatacgcccattatttccaggaagttcagctaaagaaagcgcaaccataggttttgaaccaacagagagagaatccagacataacaatttacagtcacctggaaaagagaaaaaaataaacaactggtttaaaattgcttttgttgaaacaattacaaatggtggataagggacaattcattcaattttggtaaatatcatcgtagttgtggataaagcgaagaaaaagattagcataataacgatcgtgacatatctacaaaagtcatgtagatgagttttattattgttgttatgttgctaacatatctacagaagtcatgatgtgagtttcttgatacaaccacttgggtagagctgactcctaaaagctagcctaagaggagggtgcccaagtagaaagttatacactacagtactaatcccatacttgttccatgtgagatcctaacaatacacccagtggcctaatccataggtcgacccttaagcaacgttggtctaacttgagcgtgtgtggctcagataccacttgacacaactacttgggtagaactcacttttaaaagctagagagaagggtgcccaaatagttatatactactaaccaatctcatacttcgtcaatgtggaatcctaacatttcgttagtagcacccacatatacacaccttaagaaatatcacaacaaacataccaacgataacaaaactcgtctacattttatggtaataactatgcctaaaaatgttagctatttgtctattatatagagcagaggttaacaatgtagcagaataaagttgataaatgtctcaatatcagtaaataaaggaaaaccattgtaccatttatagacattctcttgaaattttaatcttgtgggacattttatgtcagtaatttgtagtgaaaatctacattatgtacattttcaggatattttatcttttcaaaaatatcattaaaactatccatagaaaaacaataacagcatctttgacaccaacattttcatccatgcatcaagctgacaaggatttttcagcatctgttctcaaaccaattagttttttagtaagactgagctagtttttatcgataaactaatagaaaatcacaaaaacaagcgtcaaagatgagttagaaaaaaaaaaaaaaaactctgctaacaaagggcataaaattttagtgctttcttggactacctaataatctaacatgagcaaatagaataggttgaaagaagttcaatactgcatttttcaaaacccgaaaagaaatattgataaattacagaatacatttgtctgacctccaatattagcaggaaaagtcacctcccatatgtggactgtaccgtccgaagatgtagatgcaaagactgcttcagattccgaaaccataattccagtaatgcaagtgacacctttcttgtgtgattctggtacttgtgaaacatttctccactataatcaaacagacacagaaaatgaaatgaatccacttatagatgatatctttcaacaagtaagtagagttaaaatttcaaagataataaaaaagctacctttccttcaagaagagataattcccataaaataatggtgccatcagcatccccagaaagcagataatgccgctctaagtgtttagctgtccataaacaaacaattccaataaaaaaattattagcattaatgcttatttagctttcatcatgtttcaaatccaatcttaaatctttcaaagtttgtttgatacactgtattagattgtattgtatacaatctaatattatactatacaatacagtatactgtaatactgtgtactaaacggaccctaactaaacaacgtgtcgtattcaattgggatacagtcaagaaccaaaatttatggaatcaaaactttccccacctctttaggaataaaatgtcaacataacttctcataaaatcaactaatgttaataccaaaggtacttttattacatcatattacattgtattatatagtattacattaaagtgtattatataatatatattttgatgtaattctgtgtttggtattgacttctatcttata

SEQ ID NO: 18361 - DNA, 6247 bp, Cannabis sativa
tttttattttccatttttttcattatgctactttttctctttgctcaccaaaatccaaattctaaacccttcgtattagtaattcatcctccttcaaggaacaaattagtgcacattacatctattatgtataatgagagcacagaggtcaaaagtacacgaaagaacgatgtttcctcacgtgaaagccaaaatttatttctcacctcattattatacaaaaccaaccaaacgcccaaatattgccacatctgaattgcccatcataattccctctgccccaaggtactctttttccaacattaaaaaaattgataaatatgccacgcctaataaatatatattcttaatagccactacatttcggcttaaataggagaaaataccaactagtagtctcttccctaataaaaatgaggatgaaaaaaaaataaaatattatttctcttctccagtttcctcatgcaaagaaaacaaaaataattaaaaaaaaaatgaacactgcaaaatcctaggaaacatggagaccccgatatgaaaaagaacgtacaatatgcaattgacaaaaggccagttgcctttgggaaaggaagatataagagtacacaggatgacgattgatgatgattataactaggttatattgaatggcttggcagctatataagaaattttctattggaaggaaaaaaaagatgagcaattgaaaaaggcataatcataatttttctatggaacaaaggtgtggcatcataatacaaagcagatcatagcaaccaaggatcccacacaaggagagacctggaaaagaacatgaagcatgatctaccattcttacaataacttatctttaatccaatggcttctctcggccactttttccttggatcgatggatagaaggatgtctcccgaacttcgcctgcaaaccattgagattcacaaattaacaaaaccattcattcttactcggtgttatcagcgcagaaacatacactgtttaagtctctacttctcgaatggatgagatttggagagaagaaaatgctaacgtaaaaacttgtggaaacaattgaaaacgttaaaacacacctagaatttttcatttcaaatgagaaggaaaaagagactaaataccaatctgaatgtgtcaacgtctaggtctagatttgcagcgaaactcagctaggagtgctatatgatcagaggaccactctggggaaggaagagctgtgtctttcctcaagctttcctcatccaagagctccaataaggactccactgttaaagagtccgctgaaacaatggaacagatcatgagataaataaatgggttttacagaaataaaaacatcataggaaaaaacaaactggtataacaagaatttacctgtgtaaaatatgtaatctagggtgccaataaaatctctagtacaatttgtaaataaaggttcgtttgttgaaggatccagtcttctcctctgctgatccaaactgataccaacgcctggtctcgcaaatgatgagtaagcgctcacctgttgcactactcgagtgagaaatagctcaacttgtagatggctaaagaagcaatgcactataaacaatttcttaccagcggtagctgatgtaacagtttggtgtgcgggcgcaatatattaagaggatcaactgctaaatctggatgcaaaggttctacctttcccatagcaagaagcgaatgaggagcactgtaacagaattaatcagcacctctaagcaagcaaagaacttgataacaaattctggacacgagaataaaagtgaacaaaccttccaggggtcgaattgaaatctccacaaaccaacatcggaatatctgcactagcagcaattttctccaatccttttaaaagcgtatgaacctaacatgaaaataaatgaaaccattaattgatgtttcaaagagatgacaaactagaccatcacatatagaaagcaaaagtaaaagattaactacctgccagagcttgacatcttttagatcatggtggacattaacatgtgtatttgcctgtaaagtaattcatgacaaaatatatataatattcagaaatgttgtagaaattttttgcatatgaagttggtaaaaatatgatctaattcaaaatactcaattactcataattacaaactccggtattatttatttggtgtacaatttggaaggagtaacaacataaagacaagaaaatacataatcaaggagaaggagaaatacttgtattaaaacccatatatagtacaaaacacagcaatcaccttcctctctaacaagttgcccttgatacccaaacaaacactcattaatcacaagaaagcacctttctggtgcctaaagctccaaaaccccaaacaaatgagatactctggaaatagttttaacgctatcaaataattctaataaacatcacctaattgagcaggaaggaaaatttgcaagtaaaaattattacaaagcatatatctgacaaacttcaaaatttaacaaaaaaattgagtttataattgaaaaaaaaaacaacataaacaagtgaaatgcgtcacaaaccttcaaaagttcccaaaaataagttaaaattattgacatctgctaataaaacagtaaagaaaaagcaaaagtggtccattaccacacaaagcagttgtcgtttccctggattttcagctcctccctgattactaaactttgcttcaagaaccactatgagtgcaacattatcctgtaaaaggaccaccagtttagcaaactatattacaggtattggcactcatagttataactataatttccttcaacctactttaactaatcgacttaatgcacttttcttttgtgcgcttggaatcatagcatcggtcaaggactgtgcagccttgttaaattcaacctgcaaacaaggacaatttaaattagacaataataaaagaataaatactacaatacttatactatgcaagcacagcacttattctccctccaaaacctcatattttttgacgtgtgaaaatctatctctgcggaaaaaagttgcacatccatcaattgtctgtggatttccgttgtagacctaaaaccaacaaaagcacaataaatatgtagcaacaaaaatttaaaaattggacattataccataacacattagaagcctgaagcaacctcattcgtctttctcttatataaagcttgatagccatgtttgtccagctcaggagagaaaaattcatcaaaatgatcattttgaacctgagagaagccaagcaaactacagcaattaagagaaggataatcctatgtgcattaatagttcagatcagaaaatgacccaagaaaggaagaaaaaaaaaaaaaaaaagagccccgcaaccaaataaaataacaggtgtaaacatcacaagatgttcagtcaatagtcagcagcccaataacacaaaccaagaagtaaattgcatacctcctgaagacaaacaatatctgcacggtagccaactatttccctcaacagattctgtctgcgatatggccaagaaagagcccatgaaggacagtagctgtatatgtcactagtggcgtatacatcagacaaaatattgtatgaaagaacagtaaatgttcccgaagatgacatgcgtccatccacctctagccccatcacatcagctccacatacaggaaccaagcgacgtggactaggtgatggcgcgggaatgacacggttagttaatatagtgttaacatgtccaacaggtactttcgtttctgcatccaccacgacacactcaaacttaagaacatgcccaatgtcatcagctgttggtgtgtatgttttcgagcgcccaacttcaaaccatgtttcaccaccattccttgtgacagcagccgggtatagaggtgctgatccatttgtcaagcttggggttgatgcagaactagataagccagtgttgagacttccagatgatgagctattgaagcgaccaaacaactcttcctcctcattcccattttcattcactgcacttgccgcacggtcatgaagaacacgatgatgctgccacgcatctgaaaaacacttgggagagcaatggtaactcttggcaacaggaatttttgccttgacacaaccaagacactgcagtgtggcttgttcggatggatgtatactacataaggcaacctttttatcactttgtatacgatacctacaaagtgaaaataggcaatgaacattatgtatcaaatcaaacattcaaatccaaaggagaattggacattaaaaaaaactatgacagatttttttgtcattgaaattaagcacaaaatatgttctttaatccatgactaacattgaattttcaaggaacagctttaagcctataaaacttggaaatcaatctattacccctaagtggatgttttgttcacaaaaatagagtcaaaccgaattcccatagtgctagtacaacaattcacagtgctgcagcctgcagcaacatgattgtcacccacaaccatcagctccaattaccgtaacattaattcctaggtctcattgactaattaacgtagcagtcaagttcccaaatagcatgaaatgtttcagtagagtaaatccaccttctaaccaataataactgttactgataacaagataatgattagacaaactaaaaaaaataagaaacagcaaacatagagctctagaatgcaaaacgatgaaagcataagtcacaacgaaagacttcccaataaaaaaaaaaatcaatacaacagagacatttctcaaccaaaaccaatacaaagttcaggttttgacagaaacccgtgtattaaaacacgatatccgaaccttaataacccaacccattaaccttgagctcaaaaaactgaaatttaaatcaataaatcacctagtatactcaccatttgtatctcaggaaatgaccatccagcggggcggactcgggcacatcatcggtggtgacggtcttgtccgggcggcgaaggagcacgtagggcgtgagctcgcagcctacaatgggaatatcagaaggaaggtgcacacgcagcacgctcagcatgctttttcctttattcactcttgggagctattataatcgtcacaacaatggtaagaacctatcaaacccaatccaacaccaaaatccagtaggcagatacctggcggatccgccatttagttatccctgatacccgccagccttgctcgttaaccaaatagcaagagaaaaaagagggggaaaaaaaaaaccctagaaatcaaaattcccaaaaaccaaaacctccacggatcgagggcttaacacaaatagacagagagagagattccaagactatgtaaaacgaaaaatcgagtcagacctagagaaagaacgaaaaaaaagcagacacgatagagagaaagagatgtagaaagagaaaaagcagtacgcttgtcctgatttaggtggatctattggataaaagatcgaaaattgtagagagagaaaggtagggctggaaaagagagagaaagagaaggatcgataattagggttttacagaggaagtgatgagagcagtcgtcgaccctgctccgttcctataccgctatacaaggaaccatttttctttcttttctttaattttttttttttttttttttttctatttcttttagagagagaaagaagatgagagagaaaaataggccaagtgctttatagtttatacaatatacgtcttcggtattttatcctcttttaattattattattatttatttatttttggtttgtgcctaagtatatttttctttctgctatgctgcattttgtttggtttttttaatggagtgaacaataataataaataatagttaattagaaaaataataataaataaaaactaaatatgtagatacaaaccgcccaaaacccaataatgaattatacaaattattgatacagatttttttagataattttcttctttttttttgtatttttatttatttctcaatcatttctattttgaatagcgtactggtatttttggtttatcgagtgtattttcatgtcattatatcgaaagaaaaaacattttggagaaaacaaaatggaaagaaaatataggttgcgtttggtaacacttttactttttaattttaaaaacagaaaaaaaaaaaagtagattttttgtttttaaa

SEQ ID NO: 18362 - DNA, 4140 bp, Cannabis sativa
  modified_base (1555)..(1567): a, c, t, g, unknown or other
tttttctacttttgtttctagggccaagttgtattttgctaacgtccttgaggttcctagactaggcttagggggaggcttgcttttgttttggaaagatgatgtcattgtgaatattttatcctactctctccatcatatcgattgtactgttactataaataataataattttcacttgtcttgctactatggctccccttatgtttctaataaacacaattcttggactttgttgaatcgcttttttgatgttgcccctttggcaccgtggcttattattggtgactttaatgattaccttggctttaatgatcgtaatagtcactgtttactcccctctcatgctatgcattattttcaaaattttattggtaaatactctctctcccctcttcccttttctggcagccgcttcacttggaaacatggcacctctttggagcatttagactgggccattgttaaccaaaaatggaacaacctttcccctacgacctcccttcatcatctgggtttttttggttcggaccatagggcccttaaagtggttctggagggcaattccatgatgtttcgacgcaactctacttttccctgtgaaaaccattggctccttgaacctgatttccccgatcttgtaaaaaataattggacttcagataccctcacgactaaccctaataaccctatccttagttttctctcaaagcaacataactgtactgcttcaatgtcgtcttcgggtagaaataaaaataatttttctcggcacattaaatgtatccaatctgacattgaacatcttttggctggccccactatttctccttctgaggttcaaaaagccaatgaccttcaacgtactctagaaaacatcatgctcaaggaagaaatttattggaaacaacgttccagagccaaccggctcaaagctggtgataagaacaccaaatacttccacaatagggcctccactagaaaacgcactaatttcatcaagtcccttactttggatgacaattccgaagtcaccagtttaaatgatataactaactcttttgttcagttttactctgatctttttacttcacaaggtacggatcctgaggcaatggctttcaccctgcaagggatttctaagaaaatcactgccactcagcatgcttttcttaccactccttttgacttcgaggagaactcatcatgggaatggccaaaattctggaataagagatgaagatccaatcgtggaggtgctcagccaatgggagagggcacttatgaaatggaaaactgccaccttagatgccgcctgaaggaggcacaacggcggaacgctaaattagagcgtgatgcagtcgcagctagggcgacataggggaataacactcaaaattaacctgaacctggagtgagaagaccatggggcagaccttatggatcacgaaccaatagacaggaaaatgctcaggaagaataacttggggaatatgagattccccctgaaaatccaaatgagtagcaccctctcatagaaatgagaatgggaggnnnnnnnnnnnnnatgaacaagaaattcctcatggaaatgaggaagaccctgggacacaactgggggaacgtaggtcacctgcgaggaatcaccagcgttcttcccaaacccataaagagaggactcgtacacaccccagtgggggaaatatgacaaaccacaatcaagggggaagaatagagcgtgaagaagcaagtgtgacctcagggcgttcatggacccatattcgatcaactcgaggaggagagagtgctcaacgagctaataatcgagaaagcatgggaaccagtaaatcctcaagtcactcgaggaaaaggtccatgagcaagacgaggtatgtatgtaggacacaatcaatgagtagaacgaggtttgtcagtaattactcctaaccggatctacaagagcacttgaattagaaaaaacttgatctttgccaacaactcggtccaaagcaagaggatcctatccaattgcgaatagacgagttagaggataagttcaggagatatcaagtgggggaattagggagacaatctggatacgacttagatgaggaactcgagccgtaccatctagataacttcttgggaacaactatccaaggacttcaaaaaacaattccaggccgcaagggatagacgacccgaggtgtcctcgctaaccaacataaagcaatagccaggcgagacacttaaggcatacttaagtcgttttagcacggctgctgcaagggttagaaatctagatgatagtacacaacttactgccctttagacggggatcactactgatctatgaaccgttgggggtgaattgtgggatgacttacaaggtcgtccagtgaagaacatcattgagttcaacgaaagggctcaggtgtttgtccaaaaagaggaaggttgaaaagagatgaatttgttaaaaacaggctcgggatgcaaacctaacaatatttcaacaagcactgtctcaacaagagtttaaaactcaggggcctctagctcaacgagaaagggcgattctaaggactcgtcaaaggataaaaagaaatagaagaagcacgataagtacgtgccagtttatactatttacacccagcttaatgaaactcgggaaaatatttaccttgcacatgagcacaaggttgccttcagcaagcctgagcccatgaggcatgcaaggcataaaagagatcccaccaggtattgcaaataccataaggacattgggtacacaatagacaaatgccgtcagttgaaagatgagatagaaagtctcatcgctcggggtcacctcaagaagtatgtgaagagacagggcaatggacataaccagcctagtttgtccaacaaaccaaaaaacgaggggttacaacctcttctattgaaggagaggatatcctggttatttcgagagggccgcatatcggaggggagagcaagaacgcccaaaagaggtatttgaaagaggtaaaaaatgagcagtcgatatttgctcccgaaccttccaagaaggtaaaaactaaagaacctctggtcatattctcgaaggaagatgagaagaacgtgagatatcctcacgtcaatccattggtgattactattcagctcgccaataaaaggataaagagggtgttgatagataactggagctcagtgaacatcctttaataaggaaacattgaagaagatggggctcgaaaaggccaaattgaggcctagcatggtaaatctttgcgtcttcactggcaacaacattgccaattagggcataattgagcttgcattaaccttgggcgatgcacccctatccgccacaattatgtaagactttctagttgtcgatctaccatcggcttacagtatattattgggtcgtccgacattgattagactaggggcaattagttcaatcaagcacctatccttgaagttccaaacaccagaaggtgtgggagtggtacgaggcaatgagatgctagctcgtgattgctatcgcatagagctacaacatagaaaagtcagtcatcaattaatggcgatcttagcagaagaaagtgaaaagaaggacgaggatcttgacccctgggttcaagatgaaagaaacttattaaaaccgattgaagaattggaagaagttgttctcaacctaggaaatcttgcaaagtgtgtttacattgggaagaacctagacgagcagttaaaatagcagctaataagtttcttaggggaaaatcaggatcagttcgcctagagccatggagatatgatagggattgaccctagtattatctgccatcatttaaatatcgatccaaactacccaacaaaaaggcagaaaaggagaccctttgactctgagaggcaaggggcgctaaaataggaagtggacaagttattattcaatgaatttatacgcgtggtgttttatccctcgtggatagccaatcttattctcatcccaaaacctaacagaacttgaagaacttgtattgatttttctgatctgaataaggcgtgcccaaaagactatttcccactacccaggattgaccagtcagtggatgcaactgttgggcacaa

SEQ ID NO: 18363 - DNA, 5102 bp, Cannabis sativa
ttctatcctgattgcaatttcaatttggggtctgtcccagttgatttgttaccttctttggtagctgaatttaatggttaataaaatgacgattttctattcaaaaaaaaaagtagcataatttttaatgcccaagataagtgttaccatggggaatcgaactccaaagaacaaccaaatgatgaaccttatgcaaagtattccaaccaactacgccacacactcggcggtacaattaatcaatcatttaagaaataaaaaataatttgtacgtacttttttttgtaaaaaaaaaaaaaacttataatccttagagatatttaaaaatagaataaataggattattgcctcctaaaaaaactagtaataagaaaagttagggcaatgttaggcaaaacgtaaagaaactagaaaaaaaccttcagactctcatcaacttggttctttcctttcttaaatttagggagagaaatttgttcaacaacattaacctttaatttcttcttaacagaccgacaatcacttttttttttggtaggcagagcaaagtctgaatcatcatcttcaacaacggactgtttgcctttagatttgttagctagatatttaacacccatttttgaaagttttttcaaatggtgatgggaaagatgaagaccgagtaatggccatttatagaacagagaaaagaagaaaaaattagaaaaacatagtctgatgattgaggaaggcagttaaggaagatgaacgaaatcatatttttttggatcaaaaataattttgatcgtaggagaagtttaaagacataaagctacaatgaaaactgaaatgaaactccagtattttttagattttagttttgtttgtattttaatctctcataattttgttgttattaataataaaaaatatggaaagtgtgcatgtacaaaaatttactgtgtattggaaaactacaacaactactgattcatgtaaaaatttaatttagttgcaaattaaatcttacaaagttaaaagttaatttttagttatcagtaaaaggctaataattcttgtttttttttaattttggataatttaatatgatctttaacatattcttaatacacaatctttagttgtcctacgtactatatatattcattataattctattattttattaataatatattacatctacatgtatgtagttatataatattgttgaccaacaaagttttttgtattttttttcataaaaaataactctatttcttacacaaaaaaactcaaatgaaactaaaaaaatgatagaaaagaagggaaaatagatagtgtgtgaagttggcataacatgtgtaaggaatattagtgtaattaaaataatataaaaggtaaaaatgtagtagtaaccttataagagtttttttttttgttttttttcttgaaatgaaacaaaatatggtttggagagagaatagtcatacactattctctttgtgcgttgtctttcttgtcttcttctcttcctgctgagttgcccttcctcttatgcgtgtgtctgtgagtgttttattatgtgtgtgcgttgtgtcttaggtctctcccttgttgttttgtttgttgtttgtctactgccttcttgctcctttgtgttgtcgtctttgggttttgtgtgtcccttgtttatggtgtcttttgtgttgtggggttgggtgtgggatagttttgtttgtcatgtgtttgttggtttgtgttttcgctgatatcagtctttattatggtgggtgttgtggggtgcaatggtgtcaagaaaggtagatgtatctcatttaatgaggcatctattaatcttgctctgagtacttcctttgttaaggtctactccatgttctatctttgtgggaatgttctttcggataaggcttttggggttaatgaagtggccactgcttgtactaaattgtggggtactcaggtgaaggttgactcccccttttctggcaatgctttctttaacgtcttcaggtttcgctttgagaggacttcgaataggaagagggttttggatcttggcccctggtgcattaaaggagagatcttggtcccctggctttggtgtcaaggagctggcatttgacatgatacatgtttggttacaaattcacaacttgccagaagattattactcaagagttaatgctattgtgttggctactcaagctggtaaggcggtttacatagaacttgatgaatctaaacttgttttttaggataagtggattagagttcaggtcgatgttgccattaataaccctctattttgtggttgttttctcaaattgtttaatggtggggcctgctgggtatacatcaaatatgaaaaaattggtaacttctactacctgtgtgggaggttaggtcaccagagaagtggctactctttacaatcaccagttactatctgcaatgctaatggtgtaccatttcctctgtttggacctgggttaaatacctcatccttgtaccagagctgttattctgggaaatctgtcggtcctaggttgggcaaaggtttgggtaggaggatgccgaggtcgagatttttgaattcgacgatgccggtaaaggtggctggaaaggtgacagcaaccgttgagggagcttcagtgtgtcgtacttaaggctcgagtttcatgccttagttgaaagctactgatcgagttcgtctcagacctggtatggtgtggagaccaaaaaatttgtcgtcggtgctgcacattgaagatcaagatttggccatttttaatgggtctccgtcaaagctttctctgtatactagaaaggcttctgatggtttgccaaagataggaggtgtcgtgagtaaaggaggggatcgtgcctgctttgtgatggagacaggtcaaagctcgtttaaacggtcaatgcctttggtgacatatgatatttgtgggctcgagcatggttatttggagacgggccaaagatgtgggttgtgtctctttagcccatgcggagttgggtcgcgacttttctcacgaggtgggccttgatttaacttatcgtggattggtggaccaaggaaacaagttgaaggctttgggctgtattgggatgtctaagggctacggtcttaatttcttgaaccacggtgttgggtcaattaatgttatttcacgggatgcaccgtgcgtggtgggaagagcttgtgtgatcagtaacaactatttgggtagtggaagacttggtgaagacccaaggagctctttaaatggccaagaaattttggcacatttggatgagaagagatctctgaccaaatttttgcaggcctaagaaggttacctacaagaacttgatgcttttgagacattgggcaataataaaaggaaagctcccttggcggatattggggtccaagtgacctccgaggttaacgagcgtactacacttgtcaagatgagaatattggactttgaaactttttctcttagaagtaagcctaacttaggcattagaagagttaagcgggttgtcagagattttccccgtggagtggggtcggtgtgcggtaatgatggagcgagtgctgtctaggtttcttctatctcttcagaggaacctatgaccagtaatgaagtggataaggttttctgtgccgaggtggctaccagctgctcccagcaagttgacaagccaatctctttggggaagtctgctagacttacaacctggaaggctaaagctcggttgatggacatttctattcctagtaagaaggatgccgtgcttgaggatgaggaatctgcaattggagtgtcagtggtaggagtgacccctgtggaggaggatggtgtccctcatccacatgagccatgagaggtggtgcttggaactatggggagtggggcagacctctacagttttggaactgaaagccctgattcggtcatgctctcctaactttatcttcataaccgaattgaaagtggatgccacgtttttggtacgttctcttaagaacttacacttttatttcaacattattgttcaacagtggggagttaggggggtatagttttagcttggaaagcgggttttagttttgaaagcatttgtacctctaaaaatcagatttatcacattgtttactctgaccttgagcaccgtccctggcttttgtcttgtgtctacggaccccctatttccatgagaagaagaaattttggtcaagcattatggatattggtaggaagtttggagggccctggttgattttgggtgatgtgaactttgttttaagtagttatgagcgtgttgggtctaaggggaatgaccaattcctccctttcatcacgaagctgattaagatcaatgctttgattgacttgtccattaaaggggacaacctgacatgggataatcatagggaaggcactggtcatattaaatcagctcttaataaagtagtggtgaatgatgaatggttatgccttttccctgcggctgtagtccaattgctccatacctataattcagaccacaggcccctgtacattcatactaatgttcctctggcttttttgaatcggccgttctagtttaaggcttggtggactaggggtcctagaagctctttggtggttgaccatgcttggaattccttatctcatgcttggctcaagcgagagtattttagaaggctggtgctacacgtcttgcactgagtaagtggcattgagaacggtttggtaagctagattcctatatccaacagttggaacaccaactgaagtacattcagaatttgctgattggatcgagagtttgggtcgaggaagttgaagtgagaagggcccttaatgaggctttaaggaggaaaaccttggactggcaacagagatgccaagtttcttggatcaaggatggtgacaaatgttacaagttctttttcattgctgctactattcgtaatagacgaaatgcggctgtggtaagtattcttaatagaaatgggatatgtgtaacgagcaggaaggacattggtatggagttcttgttgggttttatgccctaaataaaactaatttcaatat

SEQ ID NO: 18364 - DNA, 4763 bp, Cannabis sativa
ttatcagaaaatcaattatttatttatttccttcaatagaaaatcatttccttaattagaaaataatttccataaataaaaatattctaatattcctcccataaagcaccttgaaaggagtacaccccagcgaagattgataagtggtattgtaccaatactccgcccatgctaaccacttagtccattgcctaggatgattgaaagcaaagcaccaaaggtaggtcttgaggcaacgattgacaactttagattaaccatctgtttgggggtgagaagatgtggtatggcaaagcttggtcttaagacaaatgctcgatccttcgtttctctgcctaaccatggtttctcaatactgttaggatttttcttttctctaggcgctactagccgtttcttagcagatggcacacaaggagatcgctacatgtgtgcttcgatgttgtgacttgtcgggatctgatatgttttggcatggggaaggtggggcgagatctggttttcccattccagtgatagcgattttggcgtcactttgtttcgaggccatatctctggttgtgctataaggtgtctctaatgagaattttagaagttggccctcgtggttgtcgccgagcgagatggtctttttgggtcttgcggtggagggtttggggggtcgttgcttctcctccttgtggtgtttggtggggtctctcccttgtggttgttggttgggtgtattttggtggtggctttgctcgtaatctcttacattctcgtttttggacagtagaagatgtcttttggttctatgctaaggtttgccatccttgggatttttgtgaaggttgcaataaaaaaggattggatgtggatgtttccccaaggcgaacgcacccttctgttgttttgattctagtaccgggtgatttgctttgtttaactaattttgtttagatgttagaagtttctcgagttgcattttcctttatttaagtttttcttttcgatataataatggtgtttatcatcctagtcttttgtggtgttggcatttggttcttgtcaatcctattttgttcacatttttgtttttgcctaaccttctgatctttgtccatttaaaccaatgaatgatatttctctctgttttttttaaaaaagaagtcatgctcttaccacactagagtttaattaaagacttgtctagaaaacaatccatagatttttattttctctacactaatttattttcattccccatctcccagattaaaatttttgtttacccaaaataatttattaaaataagaaaaataatacaaaaaatgagcctcaaagagtacacaacattttagaaaatctcaaaaacaaagagcaaagcacagtatttttttatggaacaaaacagcttatgagtacatttcgatgcttcatttgacttactgaattatcaccagttttataagattaacctactcaagaacacaaggaggagatttaagagaatcgtaagagttatatagctaaacctttagtagaggtatataattttaatttaaggctttagtatccagcatcaacttccaactcattaaaacaaactaacattgaaaaagtccaaaaaggctttctagcaatagctataaaataaagattaatataaaatctgccacaaaaacaagcttcaggtttgacaaaaaacaaaaataaaatttctgggcactcaaacaaaaacttggattcctacttagcctacaccttcagctgttgaagaagcagaggcaccgccttggagagctctctaagcacgagtcttttctggtttcctagaagccaactgactttcaggctgcacaattatgcaaagtcatattagatgaaaattgcttgtaaatatcagatcatgtgttctttttaacaatttatttacctctttcttgaccggctcttctttctctgacaaagtcagctcgatatggcatggggatgacatgtaagctgcaataatatggtaaaggttactaaaaagctaaacaaatggagacatgataaatgtatattatatgtaaatactcacggttaattcttccatgggcacggtatgtacgacgcctttgcttttgagcttggttcacctggatgtgagaaacgtaaagtgaatcgacatccaaacctttcacctaaagaagaattgacaggagaaatttgttagaaaacccaagaaaacaacaagatacaacatacaacatgttcgagaaggaaagaacaaacaaataaagattaacagattaggaagacttgtacctcagcattgctctcagcattcttcagtaggtcaagaataaacttggcagattttacaggccaacgtccttgcccatttgagtggcgattttttgcctgtgcagtacgccctactcctctacagaagcgacggaatgggatagcttgcttgtgaaccaaaacatcctccaaatacctttttgccttgatcaaaggcatctttctaattgaaaacgctgtctccctagtattctgaagagatatacaagcaaataaaataaacatctgaataaatatatgcagaaaaatgacagcagctgcgaaaaaaaagatgactaaaaaatatacagtaattctaatatagctgcaaacatatttttactactcagcatactaatatttcataatttattttcgttaaaacaaaaagcaacacacaaacatagtaataccaagtataatcttaacaaagcttcgagatactgcgcaaatcttcaagtaatgtagtttaacaaaaagtagaattgggcacatttgtttaaaaaaagtggctcgagtaattaaaaattacaactatcctagtttacagaaccaaattatagttcgtcgagcgaagaaatgtaccttaaagtgaactctgagatctgaccccctggctttgcaggctgaattacgaagaaacaagataaacattaatgttttataataaaccaaaactaaattataattcctcaaaaatatttcaaattcactttttaaaaccaaaggagttgcaaatgattacaggttcggtcagatcagaagatcctttcaaaacctaactacgaatgttataaatctttaaaatttcgaactccaggtgttaagaaatgaagctctaataattaaatttaaacagttctcgtccatttctaagctcccaaacaacacaatctttaaaaacaatatacagtgaaataacatgaaaaatctttaaaacagaaaatccaatcttacatttggtgggattatcaggctccttagaatacttcacctgaaaatgcaatagaaacacatccggaataagaatctaaagcaagaacttttgcattttcacagctaaattttacaccgatttcgagacaaaacgaggtaatcgcactaaaagctgatcagagaagaatacgaagaagaaaaacgcagagtgacttaccatggcttcttctgaccttccgcttccgaatcaaaatttttcctggcgaagtggcaaatccctagtcgaaaattagggtttccaatatatatgggggtctgttgggaagagttcagaagtagggtttacggcctaacgagatgttttggactgagtttttattgggtcaaaatctgggctttgattaattgggccttataagatagttaccctgttattaacttagttgggctgggccttagctattttatctgtaacgtaaatgggggcaatattgtaattttctagtaactgtatagaaaatagcggtgaagagagggaagcaaatttgggtccatggccgatctctagagagagagagaaagagaaagaagaagaagaaatagcaggaagaaagattcaaacttgtaagaaaaaatgattcttttatctctcctttgcttaccatttttagattctgcgtttatagttatttttctcgttttgttttctcaaattcctttacacaagattttgaattctgacggttaaaagttttggacacttgttttgtttctcttctttgtagtgttggaatatatattgctagttttgtgatttggagaattgggtttgctgttatattggacaatttcgaattgttgtggaaacttttgtggtaaaaggaattttaacgttttactagaattggaatctcttttggttcatattgtggataagtttaataagcaagataaacccaagattgaatttttgttttggtttcgaaaatttgaagggtttgaggattttaaaggaaatattagattttaaagatagtgatgttagagtgaacaatgtcaatgaataacaataatcaggccaagggtgtgggggcagggttacctcctcattttggaaattcagggatggtgcctcagtctatagctgtgaatcagcaaccccatcttctgtctcaggcacaacatcaaacacaaggtgtgtctcattttccgggtcattttcagctgtctgagcctcaagcccagggacttgttcagagtcaatttgtgaatgttcaagcacaggcaaaggcacagggtcaggctcaggctcaggctcaagcacagagtcagggtcagactcaagcacaggcacaggctctcggtcaagctaagcaagcccgaattcgagcagacttggaagctcaagctcaggcccttgcccagttgcacaattccatgaatagtaatgctggtgtatcaacaccttctgtggcaactccaggtactggaggtggaggtgccaagcgagctaatca

SEQ ID NO: 18365 - DNA, 1725 bp, Cannabis sativa
tacgacaaatattttgaatgttttaaaataccgtccaaaattatgctaaacaaagatcattcctactaagaaataaagccactctttaacaatcaatctcaacttcttcacggtagcgaagacaaagatacaaaaggagcccatggaggatggagagagcttcaactacgagccgtgtgatggtcctaaaagttggagtagctgccgaggccaaacaaacacccacgtgatcatggaggaccgccccatatatatcaagctagtatcgacattgtcacattaagcttattatggctatcaaaataattattttagcttattatttggtattaattatagatttttaattattttaatatcaaaattaattagaaagcttcgttgtttttatatattttcaataaatatttatcataattttaccatcctttttggttaatttgtatatatacacaattagagctaaataaaatatttatttatttgttaaatttagcactatatttgcatggaaaaattaaaaaaaaaataattccatcttgtcctaaaaaagtaatttttttttaaaagagacaaaaaaaaattgtaattatatacatataatattattaccaataataataataaaaagttaataaaaaatccatgtttttgctaaatctaaaccttgcattgtctctaattgcacaaaccccaaacttctttatggaaggtagtacaattacagatcaatttatcaaattcctatgttgacaaccccattcagattttatttttctcttttagttgggaaagagggaccagaggttcaattattaagagagataattagcacttaattatcatctttatggtgcagcgtactctaacaaagtatttcttttttttttttttccatacaataataattttgaaccaaatagtgacttaggtacactaaatctttggtttttgagcctaaagggaaccaatagaagaagccaaaatgctgacataactagttgtgttaaaacattaattaattattttcattaattaaaaaccaagcctagcgttttaagtgtcattaagcgttgaaaaattaaaattaaatgaaattggtgggggtgtagttgatcttcaacctaggcccaaacctgtcagaatcaggtggattttggtagtaaagctttgtttataagatttaacacctctaattacctgtcattccacttgaagagaaaaaacccccaaaaaataataataaataaataaataattaattataatcttttaatggtctaacatggagcaaaattgcaaagcaattcacctaacaaaaacaaatgtatcattatccaaagtttggggggtaaagtagtgaacattaaaataatatcaccttaatcattttcatttgttttatagtaccctataatgtgtatagcttgaaaatgttgtgaaagatacaaaatgatgtgatagatggaatctgtgttgttagtaaaataaaacaatgaaaaggaaatgtttgtattttaattgcatcacacttgagagaaaatgaagaagaaaaagaaaaatcttagttacaaacaaaggctataattttactcaaagacactctttttataaagtgagataagcaatacttaaaaaaggtctcatataatggggacttggctttgttcccaagcaccaaccaaacttaatactcttttttttttttagtctctacttgactac

SEQ ID NO: 18366 - DNA, 1953 bp, Cannabis sativa
ctcatacatgattactttactatgactctttgatagactgattttcctaattttgtttctctcaaaggttgtggcacctcgctatggtcaatacgctgaagccaaagagacaggagtacggaaaagatataaagtagctggccaggatatggaagtgacatacttccaagcatatatcgatggtgtagatttcgttttcattgacagtcctatctttcagcacttagaaaacaatatatatggaggaaaccgattggtgagataatatctggtctagttctttcaacttcaacaagtctgtgaataatcgaacctcacatgcctatggttttgtgtttcaggacattttaagacgcatggcgttgttttgcaaagctgctgttgaggtacattggctgaatgcctgtttattctgtctccagatcacttgcacttttctatgcttatacatttttgtgctaatttaatttaattggcgttgggatatcgttttatcctctatctgggattttcaggtcccttggtacgttccatgcggtggtgttgtctatggagatgggaacttggctttcattgcaaatgattggcatacagcacttttaccagtatatttgaaggcgtactatcgtgataacggcttaatgacatatacacggtcaatccttgtcattcataacatagctcaccaggtctgttcatcctcatcttcaagaaaatccctttcacaaatcaatttgtagttactatttacagttgcttttgagtgaataggttcgtaaacttgaattataaagctgcatataatttttcgtgttttcctaataacaaatgttgacttttatgttcattatctccagggtcgaggcccagtagaggacttcctcactgttgatctcccacaacattacatcgattatttcaaattatatgatcctgttggcggcgagcactttaatatcttcgcagctggtttaaagacagcagaccgagttgtcactgtaagccatgggtatgcctgggagattaaaactattgaaggcggttggggtttacatggaatcatcaatgagaatgactggaaacttcggggcattgtgaatggaatcgatacaaaggaatggaatccactatacgacgttcatctaaccacagatggttacacaaactactccctagagacactccaaaccggaaaggctcagtgtaaggcagctttgcaaaaagagctgggtctacccgttcgtccagatgttcccctcattggcttcatcggtaggttggatccacaaaaaggtgttgacatcattgctgaggcaattccatggatgatggatcaggatgtgcaactagtcatgttgggaactggccgaccagatttggaagagatgctcaggcaattcgaaggccaacatagggacaaagtaaggggatgggtcggtttttctgttaaaacatctcacaggataaccgcaggtgcagacattctactcatgccatcaagattcgagccttgtgggttgaaccaactgtatgccatgaagtatggcacgattcctgttgttcatgctgttggtggactaagagacacagtcgagcagttcaatccgtacgaagaatctggactggggtggacatttgatagcgctgaatcacacaagctcatacatgcattagggaactgtttatttacttaccgggattacaagcagagttgggaaggactccagagacgaggtatgacaaaagaccttagctgggataaagctgctgagacttacgaagaggtacttgtggctgccaagtaccagtggtgaataatacggcctttgccaatgaaaataacaattttttggtaaatagtgtttgttttttttttttgcttagtttgcaccctttcctgtaatgatatccagtagtgaaataatcatgtagttgttgtagcatcttccttgt

SEQ ID NO: 18367 - DNA, 6382 bp, Cannabis sativa
attagtgagaaatcgacctaccaatagccaacgatcatcaatcttagccaatccatcagcccctgcttcgaaaataagcccctcctcatcatcatcatgtatcgtaaatgcctcatattgatcttccatattgatcaattaaattccaagaatcacccgacagagaagacaaaagaaacaccaaaacgccaaactaacagatttaatgtaaaacaaacaaaccaggacatacagaataatcaaaataggccaaccatgtcattcgacaagacaacagatgctttttttttttctattggaaaggtttagtttgactggtttaaaaatacttagcttgaagattctaatttttttccttatttaaggatgcttattctagtacttttgattgtgataatgtgaataataactttcataagttaatttcttagaaaaggttttgtatttcttcccttaaaacttggaatgttagtaatgatcacctcttaaaaactcgaattaattacctcactcaggaaattgctaatttatagattagggtacctcttaataaagaagataataacaaacttactaagctccagtccatgttagatactctgttatataaagaagaagtctattaggggcagcgtggtagaataaaatagcttaaagctgagaataaaaatactaaatatttccgtaagtattctatgtataggaagaaaaataatactattaagtatttaaaagatgatgtaatattgttgatcatcatgatggtattgtcacttttattactatttatttctctaattttttttcctcttaaggttgtgatgttgatgcttttgcttcgattttctcttctttgggtcctgatcttgaggacctgtatatcagcctccttgcccaggcttttactgctaatgaggttaggcagactatttctctgttgtctgaggataaggcaattggtttagatgctttaaaagccttttttttttttatcaaaagaattagtttgtcttaggggttgattttgctaatgcaatttcaaattgtcttaataagggtattgattttttagatgttaattcgactttaattgttatcatttccaaaaaaaaaataacatgctaataccctgaaagattttaggcctattagtctttgtaccactttttataaagttatctaaaaaaattttagctaataggcttaagatggttctggccaagattatctccttttcaaagtgctttttatttttggtagggttatctatgataacatctttattgctaatgtgcttattcatgccattaataataaaaggattagtaagaggggctgggctgctttaaaattagacatggctaaggcttttaatagagtcaaatggaatttccttaaaaatatgatgtttcatttcaacttcctagttagctttgtctctctagttatgaaatgtctttctactactactatctctctattaatggtcaggtcaaggacagtgttaaacctactagaggttttaggctaggggatcccttatccccttatttactcattctttgttttaaaggactttctgctattctcagggatcatcaacataggggtctttttaagggtatttctatttccaaaagagctccttctataacccatatttttttttgttgatgacaacattattttttgttatgctgaccaaaattcttgtgtcactctcaatgatgctcttagcatttattccaaaacttctagtcaggtcattaattttgccaaatcctccattatattttcccctaatactcgtgataatattagagacatgtttttcataacctttgctttagagaacatacctttcattagtaagtatcttggtttaccccaatgcatttctagatccaagtatcactctgttttttttttttttttttttttttccattttaaggataaagttgcttcaattatccattcctagcatcataaatggttttcaaaggctggtaaagaaactcttatcaaagatgtcctacaggccattcctcctatgttatggcttgtttctgtttacctaccaaaatttgtaaagaaatagaagctttatgtcaagattctagtggggttctacggatgattctcgaaaactgcattggaaaacatggaaggtcatatgtcaatctaaattcgagtgtgatcttggctttaggtctttggttcactttaaccaagctatgcttactaagcatgtctgaaggcttcctaagtaccccaaatattttacttagtcaaacttttaaagctcgctacttccctaattcatcaattcttaaagttgttaatggccataatccttctttctcttggagaagtattatttggggaagagatcttttgaaaagagttttaatttgaaaaatcggtaatgaaaatgctatcaggactttagaggatcattggcttccaaatcataaattcaagtccttttactttcctcagttgccttcatctcacactttgtctttttttttatcactctttctggttaatgggacttagaaaaatttcgaagctattttgatgaccatgttatagataacatcctagatgtccccatctctagtaataattgtacaaatgatttggtttggggaaaagatagctctaatatttttaatatcgaaatagcttatcatcttgctcttacctctagacatattccttcctcttctttgtttcagcatgaaaagcagttttggtctaaactttgaaactcttatgctccacctaaggttaagcatcttgtatggagagtgatctctaactccatccttgttgtttcctctctttttcaggcatattattccttcccctatttattctctctgtcatcttcaaccagagtctatcaaacatgttttgattgaatgttctagtgctaagaaagcctggaaacattctcccctctatgattactatactaaatataaacactataatattaacgattttctgtatttttcttttgacgagtataacttatttatattttttttttcagtttcctttgatttttatggaatcaaagaaatatcatcttttacaatgaacatctcatctcctttaactatatatgaacggtttgttagttttttttttcatgattatgagaaggcgcaacaagcttcatccaaccatcaaaaacaagttaagaaggatttcatttatgcatctaatgtttcttcaagaatgatgaatgtaaacacaaatgcagccattgatttgattataaactgaagaaacacaacttcgagatagtggttcgagatggatgtaataatatcaaagatattctcatcaaactaatagttggaagcacctctccagatgtaggccatacatcttgctctttattggattcagttggtcaagcttcctatttctattcttgaaactgattgtaaaagtgttgttgataaactttatagttctttttgtaataattcagttcttaatgatgttttagaatgtattagatcatcattgtccttcaatcctgatctgttggttgtttatgttcctagagagcaaaatagagttactcataattgtgctaaaacaagcttaggattaaatagtgagctcatttggaatagttctctaccgtaccttcattgtaaacctgtttactttgtacattgattttttaataaaagttaccagtttttatcaaaacgataataataataaccaaccccatccattacttgctatgcaaacttgtactatcaaatagtgatatccccctcaaaaattctaggacaccccttttcaacatatagagctacatgcattaaagcaatgaccggattggaactaaaaaggaaagcaaagcttagattgttgtctcaactccaaaatctggttcaaggtcttcactttaaccattattctttataatctttaattaatggccattgagaactcaagaacatcacaaaaacacagctttgaaagattaagaatttcccaacatcacaaaactggggaatatcccatacagagacttagcaatacataacaacccataaaccctcctactccatggtagcaactcctccagcagcctttaacttctctataatctcagctgcctcttctttggtaactccttgtttaatcaaaacaggtaccttctcaaccaaatctttagcttccttcaaacccaaactagtaaaagacctgacttccttaatcaccttgatctttgcagctgtgtcaaacttctccaacttcacatcaaatgccgttttctccactttcttctcttcagcctttgccccagcagcagaccctccttgtgcacccaagtccatcccttcggttgatatcttctccagttttggaagcgttagcttgagagtgagagcaggaccgatttgagaccgttcttcgggggctaatgctacaattcgttcagcaagctgaagtattttttccgagggtggcggtctgggaccatatggatcataaaatgcagggtatttatactttttaggcttgacattgggatccctgggaacaaaatcatgctggaaagaacgatgctgcaaaggcccagttatttccctcagaatggaacgaacacgaaatgattttgcaagcacaacaatcctcatagtattgatgaattgagcgaaatcaatatgtcattgagcagaaaattgatttacttcgaaaaaattgtgaatctgcatatttcaaccaagcaggtccaactttattcacactaacctcaacataaatcgaacattttgctgtcttacaaagagaaattcacataataaacaacagcccttcatataaacatactaattcttcaccatttcaatggaagttaaaaacgttttccagcagagcatttacacaaacaactggtgcgcacacaacaacataatgacagactaactaataactttagctaaagataagtggctttttgtatcgagatcttaccgtagcgggtgaacttgaaaaaaagcaaaatataggtcccggagttcccaaaaagaatgcttaaaatctccagctaaagtctgaactgaaatacccaaaaataatccaccaaagagatcaaatgatagtatttaaaacaatataaagagaaaaataatagattgaaacataatagcatacgctgttcatttggcgggttggttaggttgtagagaacttaacctgcgcaaatagtccaatggtttgagcgcccaaaccgatatatgcatttttacttttaatttccaaattcaaatttaacacttcacttgagattagcatagcatagtttaagcaagactgtaaatttacattttcaaaatggtgaaagaagaatcgagaagaggatatcactttacatttcacatcaaaattcaaaaggaaagctttctattaatccctaacaatgacatgaacaatcggcaaattggaacaacaaggcctgtttatgatataatacccattgaacagagggaaaaataatctaagctagcaaacattaatacattaacaaaatggataaacatacatacatacatatatagatagacatgcacaataaataaattatctcttgattctcattggaacatccacaacataagaataaggatattattctcaatttttcactgctcaagctcaatacctgtgcaagtcggcgtcaggagagctggaggcgggagtagaagagctgcgctagctctggctctggcgctgcgtgtcggcgctttccgtcgccgagatcaagagacgagacgaaacgagaaggagagaggagaaagagactaaggatatcagggtttgtttttaatttttctttttttttttttaaagagtatttgccacatttggtctctaagctatgcccctttttagtatttggtggcgtgcataaattgatcaaatctcataataacttattaatttaagggaaatttgatattttatgcttaaacattagataggatgtttaattatacccaattatcacacataaaaaaaataccattctttcaattttcttccaaaaatacccctgtattttcaaacttctcacattccttctaactccattctctctcttctacattctctctcttctttccctctcccaaaacccacgctgcaataatcaacgaacccacaccagttgaacccacacaccaaaacccacaccagtcgaacccacacaccaaaacccacacacacacgaacccacggccaccagtggaacccacgacgatgaacccaatcgacccgagcgaacccacgacgaccacccacaccagtcgaacccacacaccagtcgaatcccaccaacc

SEQ ID NO: 18368 - DNA, 4022 bp, Cannabis sativa
  modified_base (3943)..(3971): a, c, t, g, unknown or other
taaaataaaataatatatcatataaatgatcaaatatatatcatgaatatataataaaatattttatcatatttataattaataaataattacaaaataaaataaaaatatttgaataatataaaattatttatactaaataataatttaactactaatttaatacaaatattaattttctaaattaatgatataatttttctagtaatttaaaaaatatatataattttattatcatatcatttctccggaaattaatttaaataactatggtttattaattaatattattttcaattttgaaagtctgtgtatgataattcaaaattatatatttccactattttgaatgaatacgtttttgattaaaaaatctataaataaatctgtaataattctctcattacaattcttattaaataaattgaaatattttaacaaaatcaaaataaaaaaagaataaaaaaaaatcatctgtatagtattatttatccgatgctactggaaggaatatgtaatcgcagatggataggattagctggattagttatccagacttccagtatgtctaaatattagactggacaacttagcttgtctaatctagtatagtcttgcgttccaaatagattcttagtataattaagtatcggatcttatataacttcaaaaaataacatttaataaatatggctaactagtagtagagtattaagtaccactaattcttaataacaattttgttatcatctttgcaaactaagcatttgaagaaaaaaaaaagttagaattacacgtggacttacataattggccctcctgtcaaattttacaggtaagctacatgctgcaaccgccaaccagtccaagtcgaagaaagagcaatggtagtagaactttgttgtaaacgagtaagaattgttacacgtgtcggaatagaattggcgagtgtagttgacgcggggagaggagcgtgaagagtgtcctgcatgtacgtagttagtagtgatgatataaaaaatgatgaaaccgtaccatgtgcacttggatctgtccttcctcgaatggtacttcccccatataaacaagaaaatgagaaagacatcaaattcacacactctcaccacataaaatttcctcagctccgtcctcccatactatagtatcctcctcttctcctttataccaattttaccctcatattcttctcacttaaattacgtaactaccctcctttaggggcgaaaccatagagaaataaggtgtaacaatataagcaagataattaccaactccatcatgcactgccgttctgttgcactattaaaataatataagggcttattagtaatttgtaaaagatgtgaaagtctataaatatgtaattgtgtaactattatggaatagagattgagaaaatagaactttgttcaattggagtttgacactcactcgaagagtgtattttaagagatttatcctgtctcgaagaggactattatctaacaattagtgctttcattgaaagaaattgcagtaaaagattcactgtaagaactctcggccatggaagataaagagattgttcaactcttcaaagctatggagttgcgtatgtagcagcattttgatgcacaaacgatggcaatgaaattgcatttcagagaacttctcgatgatcaattggagaaactagatgccaagtttaagagctatcttacatcaatggagacacttttcgttcccacctcttcggcaccacctacttctttggaggtcgacaaccacattgatggtccgcttgaattggagagagaggagaattcatcggtgattcttactggagttgtgtacggtgtcgatgatcttttcggcaacaccatagatggcagtgaagctcatctccgtatcaatctaagtagatcgcatcaaatctcattcgatttaccacgaagaaggcagctcatagctcaatgagagcactaattgttagataatagtcctctttgaaccaagacaaattttctaaaatgcactcttcgagtcagtgctaaactctaattgaacaaagttttattttctcaatttctattctataatagctacacaattacatatttatagacttttacatcttttacaaattactaataacccctatagtattttatagtgtaacagtttcacacccaatcttcaaaggaatctcggacaagccagcatcacaattcaacttaacatgtccaattgacaaggccacccacggcaaggccttaggtcccagccgcgaagcacccattaagcacacctccccttcaagcatataattttttaattatgaaaaaattgagaaaatttttactatgcactctttaaaagagatgtatcgatgcattcctatctattttggtatctgaaataattatttagtcaaaaaatttttaatggccatatacattagttatttaagatattatgtaaaattttaagaaatttggaaaaatttaacacaccaaaaacatagttcaaatattgtgctgcacgtgtgtgaaataaattgttttaactgtgctttctatatcataaattattttaaatttcttaaattttgtaaaatatcttaaataactatataatatacatgaatatgaaaaaaattagaataaaaaattattctgaatgcaaaacaaatagatagtgtattgatgtatttcttttaagggagtgcatggtaaaaatattcaaaaattaattagcatataatttctttcattaatatattctaacaaaaaaaaaaattatcacccatttatgtatggttattttctttacatttatgtatggctatttttattttaattttctaaaacaatttcgtatcatttttattttgatttttatttgaatatttagaatatattttattttttattttacaagtatattttttaaaaatatgataaagaaagaaaaaaaaagtataaattaaagatatattttatggtgcttctacaatgtacttttaaatgggtgtactgatgcacttcttatttgtttcagcatttaggataattttttagtctaattttttcatagtcgtgtacgttattgttatttaagatattttacaaaattttgagaaattaaaaataatttacagtatagaaagtagtatttaaacaatttattttacacacgtataaaataaaataattacgtgtgcaacacaatgtttgaaacctacttttggcatgttaaagtttctgaatttcttaaaattttacagcatgtcttaaataactataacgtatatgaccatgacaaaaaatttgactaaaatattatttcggataccaaaacagatatagatgtatcagtgcactctttttaaaggggtacattgtagaattttctcaaaatatatattcaaaagtgaaattaacaaaagaaaattgtattaggtgtttctacaatatacccccttaaaagggattcattgatgcaccctctacatgtttagcttctagaagaattttttagtccaattttttttatattcgtgtacgttataatcatttaagatatcctataaaatttgagaaatttgaaatactttacaatatagaaagcagtgttcaaataatctatttcatacgcgcataaaataaatagtcacgtatgcaacacattgtttgaaccttattttcgacatgttaaattttaccaaaattttaaaaaatttgtagaatatcttaaataagtatgacatacatgaccatgagaaaaaaataactaaaaagtattatgaatatcaaagtagatagggtgcatccatacatcccttttaaggaggtgtattataaatttttgcaattgtattaagtgtattttttttaggaaaattctacggtgcacccctatttgttttagcatccgaaataannnnnnnnnnnnnnnnnnnnnnnnnnnnntgtacgttatagttatttaaggcatcatgcaaaattttaacaaatttggaa

SEQ ID NO: 18369 - DNA, 4257 bp, Cannabis sativa
atcataacaatagaactacaaatgacttgcactacagagaaacaatctgttagtatcacctgtggccattgattttcttttatccaactcagtgcttctcagatccccattgcttctgaaacttcgggagaacttgacccttggaatagttttgtgcaaccttctatcaagaaactacttgcattgcgtgccacatatccaacgccaaaattcttggcctcctcaaacaataccgcatcaacgttaatcttaatgctattaatatgtggggccacccattgctcagctccgtcccccggtaggaaaccggcaaacaaagctcctataattgaattttgaccaagtagtcattcattaaattttagattatataattgagagactaataatggaattatttaattctctgaaaactacgtcgtttttatcattaccgttagagaaaacgaccacacacacccacgcgcccattattttattcaacctttaaaaccccactttccctctaaaaattcaatctttactcaaaccatcttcaacctctttctctctctaatcttcaatccaacacaaacccagaaaaacccttttctcaatctcactaaacaatccaaatctccatagaaatgtcttcaagaaagcttcttgttttcttcttttgcttccttctttactactcaaaaaacccaccttttgtactatcttcaccttcttcttcttcttctgataatgtcagattggatttcccattttttagtctgagaaacttcacactcctcggagattcttatctcagaaacggcatgattgggttaacaagagagctcggtgttccatcttcaagtgctggaacagtaatcttcaataacccaattaagttttttgactcagaaactaataccacagcttctttctccactaaattctctttcaccattgctaatctaaaccctagctctttcggggacgggttatcgttctttctttcgccggataacaggattcttggtagccctggtggttatttgggtcttgttaattcttctcaattgaccaagaacaagtttttggctattgagtttgatactcgtttagatatgcattttgatgatccaaatgataatcatgttgggtttgatattgagagtcttaattcaatcaaaactgctaatactatgttgcaggggattaatcttaaagctgggaatgtaatcacaacttggattgattacaagaatgttcaagagaagttgagtgtgttcttgagttactctaatatcaaacccgaaaaggcgattttgagtttggatattaatctttatgagtatcttaaagagaatatgtatgtgggattttcagcttcaactgaaggaagtactgagcttcatttgattgagaattggagttttcatacatatggatttttatctttaagaacaagaaaaaatcctcataatgtgtctgataattctgtggcttttgttacaccaatgattcctgaagttgattctgattcttcttcaaggaataatcatcacaagaagcttggtttagagcttggaatagctgtaccagccttcttttttgttgcacttgttgtgtttgtttatgtgtctgtgagaagattaaacagtattaaaactcaaaagcttttcttcaatcatgagcttttaacatctccaagagagtttacttatagagaattgaagttagccacaaagggttttcattcaagtaggataattgggcatggagcatttggtactgtctataaagctttctttgtgaattcaggtacaattgctgctgtgaaaagatcaaagcattcacatgaaggtaaaactgaatttcttgctgagttatctattattgcttgtttgagacataagaatttggttcaacttcaaggttggtgtgttgagaaaggtgaattgttacttgtttatgatttcatgcctaatggtagtcttgataaattgctttaccaacaaggaccttatttgagttggtcacatagacacaacattgcagttggtttagcttctgttttgacttatcttcatcaagaatgtgagcaacaagtaatccatagagatatcaagacaggaaatgttttgcttgatggaaacttcaatgcaagattaggcgatttcggtttagcaaaactcatggatcatgataagagccctgtttcaactctaactgcaggaacaatgggataccttgctcctgagtatcttcaatacggtaaagcaaccgaaaagactgatgtttttagctttggtgttgtgattcttgaagttgcttgtggtagaagaccgatagagcgggaaatcgatactcagaagatggttaatcttgttgattgggtttggggtttgtattctgaagggaagatcattgaagctgctgataaaagattgaatggcgaatttaaagaggaagaaatgagaaagcttttgcttgtggggttgagttgtgctaacccggatagtaatgaaaggcctacaatgagaagagtcttacagattttgagtaatgaagctgagcctatggaagtaccaagaatcaaaccaagtcttactttttcttgtagtttgcattatactttggatgatattgtttcagatgatgatgatgatgatcaagtagaagattgtgagattaaaattactactcaacaatgattttcaagtgtttgttactttacaacaacattagattttagagtagattgattgattttcaagtgtttgttaatccattctttgtaatttttttttctctttttcaaattggaatattgttcaatttcatctaattgaactattatgtgatctcagattcttacttatatgtaataacaatctctgtttgaaatgtatacaaagttccaatctttttgtgatttttctgaaaaatttgcatttatatatgtaaaaaccatagccttgtcactattataccaatcttagtttgaaattcatacaaagttccaatctttttatttggtttatacaaataaaaaagaaatccatttatacactaatatatatatatatacacacaaaataaaccatagaggtaaagctgtcactagctcacttgcttttcctagaaaagaaaatactcagttttcaaccaaattggaatattgttctataaagtattcaattccatctattgaactatattttgtatataacaaagctttgtttgaaatttatataaagttccaatcttttgtgctctaagtgattcatggtttttttaatacaaagaaaaaagtatgcatttatacatcattatatatatatatatatatataaatttatataatgtagaaaagtactatctcacctgcttttactagaaaagaaaatgatcactaatttttacaaaaacatatatactaaaaaaagaattacaacaactcttttgattaatatctctgttgatttgattttttcaacctacataatagacatagtccatatatataataaagctttataatcatcatcatctttcatcatcatagatatgacactattgattaaaatctcaactactttcatcttctaaaaccctttttctgaaccaactacagctttttcttcttcttctctgataaaataatcttcaacaaaagatagaacttgaacctgaaaattaacgaaatagaacatgaaaagttactttttttttttgcttattattattacctactaaaccaacaccttaaactttacatatgattaatatatacatatatatatgtatgatgatgatatataagatgggatatgtatgtaaggatgataataatggtgacagaagaagagagagcacactcccaacattggcaaagatcccttttaacccatctcgggttgtgctctctctcttctgtcaacatatcctccatctcatatatatatatatatgtatagatattatatatatatatataacacaagaaaagaaaaacatggggtttcacaatattgtaacatatataaattcttcaatacatagcatggaaatacatgacataacttcatcaatacataacataacttctacattaatttttatatagatatgtatgtgaggatgatgaacacataatatatttatataacatataattattcaaaagaaagagaagaattatatgaagaaaaaaaatacccttttgggatcttagttttgcctcctctgtttttttttttttaaaaaaatatatatacataa

SEQ ID NO: 18370 - DNA, 2349 bp, Cannabis sativa
aacgaataccgctatgaaaaaaatatttcggcatgtgatttcagacgtgaatgttgactaagagattgtaattaacactctataaagcgaaaattttattttttatagtctactaaattttaaagttagtatgaagggtgctaaatgcccacataattattattaaaataaaataaatatgatattaaattgcaatatgacctttaattagaactatgcatcatatatagaatattcttcaaaaattggtgttgggcaacttaacaaacacagctagatgatcaattgatcatatatttctttattaattttattttattattaatttaggagcctgaaactagtgatgagatcatttctattaaattaaaatatgtaaattaaattgatacatctcatatacgttggtggaactcttcaataatactatatattttctccttttagaatatgtaaaattaaattaacatatgtttaactaggtagaatctgttaaataataagatggtaaatagtaacaaaactatatatggtaattaattaataaatgagtttgtggtgtaattaattatatataattgtgatatatgtatgtataggttggtacagtaggaggtggaactcaattggcatcacaatcagcatgtttgaacttgcttggagtaaagggagcaaacagagaagtagcagggtcaaatgcaagaatgttggccaccattgttgcaggagctgttcttgctggtgaactctctctaatgtcagctcttgcagctggtcaactcgttaatagtcacatgaaatacaacagatcaaacaaaaaccttactactactccttaatccccaattatatttataacaacaaacactcttaattacccaaaaaaaaaaatatatgtatggggatgaattatattaagccaaagaacataaataataataccatatatatagtatttattattacctagctagttctaggtgaattactactactactactactcttgtattcttttcttttttttttatttattttaattttcgtgtaaacttttaatgatgtacctgtaagaattaaattgtgtaaaaaaaaatatgcatggttgggaaaaacttttcgttataaaattatatggtgcacgttgaaacaattttttttaatgtaaaatatttgttaattataaatattagattcgtgtgaaattattgatacagctaatttaatcaaccatcaatatctaattaagtgacagcttgtacgaaaaagacttaagcttaatcagtgttccctctcaagtcagttaggggtattgggcaaaaaaaaaaaaaattagttgggatttttttgttttttttttttttgaaacaaaattttattaacaaacaaaatatgctacatcaaaagccccaattggaattttttatatgaaaaaatttgttttttttatatatatattggtaaaattttaaaatataatatattaatatatacatctctttcaagaaagagtaatttgaatcaccaaaaagattaaaaaaaaaaaatgagttacttttttgtaatataggttatttttttttttaagttctctgagtaatttataggttaatagaatgtaaatattatatttttgcaggagtggattttccgaaataatttttttttactaaaaatttgaattactttattttattgccaaatacatatgtcttgtttattcttagttatatataattaattaattacatctaaatttaaaactcattcatatgataaagcattaaataaatattaataaaaatataaaatgtgttagataaaaattatatttatgattagattgaatttgaactttttgcctccattttctttggtcaaaatatatatagtttcgtcgagagagagagctaaatagggaggctagaattttctggatcttattttgtgtttgaatacccacaaagttaggcatatatattcaacgtctttgttcatattctacctataataaattatttaagctattgatattattatatatactttgtacaatatatacatataaaaatatataaaaatactttagtcctgtttatatttttttttagtcaactaatgagtgatggtaatagtcatacttgtggatttgtagtgtagtgaacgtgatcatccattttcatgttttcatttaatttattaatattactcagtttggtgaaatgggatcctatcgataaaatgacagttaggccggctaattttttttttccttatttaaaaaaaaatagtgttttttaaaattagtaaaataaatattttttaagctacgtgcattatgagtaaatt

SEQ ID NO: 18371 - DNA, 3313 bp, Cannabis sativa
taatatggaaccctgtatttttctccatgtttcccttatctaactttatgttgggtgtttgtcaaaaaaaaaaaaaacttttgttgggtgaactatgacgatttccctttgaataattaaataatgaaatagttttataattaaaattagttattttaggtatataaatgctatcatgctaggtatagcgtgtttaggagtgatttatcaaagtctaccaacttcttaacaaattatcgtttgattaattaaactaataagtactcccttagtcactgagccacctacctcaatactaattcatattaataatggttaattatacagcttgatgattatttagagtacatcaatgcaaacaatatatattattcgatcgatgaacttaatactaaaagaaataatggtcatcgtatagggacctcccttaaacacaagaacagggggaccttaattaaaccaaagcttttaaatgagagagactcccttttcaaaacggcgtagtacgttgacaattcttatgaacaaaattaattcaaacgacacagcaccaaagtattgatagagagattactacttaataacaagtaaaacgacactctcgcacccaaaccaaaaccagggaatttatgaatctttaatatgccatttaattcaagggtcattgttaatgtatatattgtataatatgtaatccttggaaataactaaatttaaaacataaattatttacccctaaagcatatttcgtaaaagaaaaaaaaatacaccacagatttattaatattttgtttggactcatctaaaatttttttctactttatagtaaaattaattatcttgtttacttgatgtggaaaatgttcatataatatattgtcacaaagcaaagggacaaaggattaaaggacaaatttaagtccagagagagtacagtccccgcctgcaaaagcgcgtggagctgtaacaaggacgtcttagaaaaagtccaagaaaagaggacatttgtccaaatattttccacattcccttttaatttattaattttttaaaactaaaacccaaataatgattttttttttcatttcttttactcatattaatttagtttacataaaatctgattcagtctctatcttacgtactcaccacctccatatcctacccgccaaaacctcaccctctcccttgtacaactttgggaaatttctcgtattagttttgtgactctgaagccatttatttttctgggttcttcttcttttaattcatgaaagacagagaaaaaaaaaatcaccaccaactttgcataaatgaagagtgagtaaggattttggatatatatatatatcttcttttttcggttggtatagaaaagtgatcatatatgggatcgttaacaaaagttgggaatggaaatttcgattactcgtttaagatacttttgattggtgattctggtgtgggaaagagtagtattttgctcagtttcatctccaactgtgttcatcatgacctttcacctactattggtaggctcttctctctttccacacttttacatatatttatatatatagtgtgtatatatgtcttccagttaattaattagtactgtttctgtatttgttgctgaagaagactgcatgattgtattaattgcctagtatatttatattttgttagtcttcaagtgtaaatgggcttgaactaagaaaatttgcaaaaatatgtattttttttagtggcctattattgaattgagttcagcttaattatctgggcaagctgctcggttttcatgtcaagaaaaatattaattatccagaaatatatagtagtaccagcaaggtcgtctaacaatgctgtaatttgttaacaattcattgtacctttttgaagttgtgttaacggaaaatggatatgaagtgaatgaaagaagatgaaagttttatcctgaaaagatgagactgtagtggttttactgatcacgttctttaaaaatatgcttttaatgcttttgtcttttttccttgatatctgatatggattttgtgaataggacaaagtgctattgtctgtcgttttgcttattggaagtagtaacttttcatagttgtatatagtattgaagtaaaggatttggcgttagaaataagaataagaaacccaattttaatttcccttgcaattaagatcatcgtgggggtgatacagttttcactttgaatttgaacgtgtaccaaattgtataatatagcataaattagtatagcatgttctgttaagtgtgaactacaacataatgtttttaactaattaagattgtagtggtaactggtaacaaccatcgtaatttatcttgccttttgagccaagactttttattgtgacaaggaaaataaaattggagcatgttcccccaaattctcattgacttcccctaaattttttatgcaaaactttcttttaaagaaagtagtgcatttatgaagtttagttttcatgagttgaacatacttaatttacttatcttaaactctaagactaagaaggcaacacttgttgcttttttttttttttttttttatatatatatattaatcataattccttggcaatcatttgtttagagctaaggtttaatgatattcaggtgttgatttcaagatcaaattattatcagtcggtgggaaaagattgaagcttacaatttgggacacaggttggtaatagtaacatataattgaggaactacttcacaaaagagttctctgatctttccatacacatatatttatatattttcttcatttttaacttgaattttgtatatgtagcgggacaagagaggtttggcacagtaataagctcttattacagaggtgcgcatggaataattcttggtatgcaattgcaagtatgcaacttcatttacactgatccaatatttttatactgctcatgaattctagaccaaattgttctgcaataatggcaggatacatcgatattggagattgttgtgagctaagtttaaaatggaaacgctttactgtattatcaataaattatttccaactttattgtggtggtgatcttatcattgttttgtaatctgcttcatatgcatatattgtttctaatattaatcgtgaacttaagaaaataaacatggttttaatatttggcttgcagtttatgatgtcacaaggcgagaaaccttcacaaacttatcgaatacatgggcaaaggaggtagagctctactccactaatccgaattgcatcaaaatactagttgggaacaaagt

SEQ ID NO: 18372 - DNA, 4628 bp, Cannabis sativa
gtcacattttatgttttttactttctttaaatatgcatagtctgaattttacttgaaagctagataaaccacgtgacacttagaatgatgcaacaaatacacattcttaatactacatgtagaaaagaacaattctattatgtatactataactaactatactacgagttacgatacactatatatattattatgaaattgagcatatatggaaacaatatattgctttacttttcttgcagattaccaagttaaaacttaaaagagtatgtattgagcgctttctcttacttcatgagtatttgtaagataatctaaaattttacgcttatactcaaacaattaaatgcatatttttcaagtgaaaaagcaaaagtttttcttggaacttcattacccttttgttactttattcctgggaatcattatcttcttgtgttggccaagtgaaaattaaaggaataagcctctaaattttcaatcatatataaataattcaaaaatatactacatacccaccttagtttcatacccttcaggtagctgccttatgaaattatgagcattggcagccatggctgcagctgtaacttcttccatggtagcatcaagcttcccaaacatgatattttcctttattgatgtcccaaacaaagcatggtcttgactaacaagtcccattttccctcttatccatttcaactgaagtgttcttacatccacaccgtcaattctcacaaccccattatctgcatcgtagaatcgttggactaatccaatggccgttgacttgccactcccactggctccaacaagagcaacagtttgccctgcttcaatttttagattaaaatctttgagcacaacagagtcaggcctagaagggtaggtgaatttgacatgttcgaattctagttggcctttgattttctctagtacaagacctttgttcccttctccatcgatttgtggaacccggtcaatcctatggaaaattctttgagcagcaactgaggcttctgtgaagtatttcaggtctggaagtgccattccaagagatctgcattaataataatcatacaaattatggccttgttaattatttttggtgaagtaattaattatgcacgttttttgtgtatagtgactcaaaggttaattattaactagttaggtaagatcaatgatgtttattctgtatattttaattgattcctagtataatcattcctctccttttcctagccttttgctttactaattaattaattatgtattattccaaactaattttacttattataatgtaaattaaagttccatgttgattattaaagtttagacatgattgtattttggttaactataagcaggccatttgctaccgacaattcagtttctactttctgtgatttattcttacttgtctctagcttataacaaaactataatgtaagttgttataataatttgttagtaataaaatgacatattaataactagtgattccatcaaaaaaagacataaactagcgtaaggatggagtcaataattatatatattaggcaactttatgagcagtaatttaccaccaaaataacctatatgtcatgatgataatagattaattgtttgactacaatactaattagacattaaaccagtgcatgtatgcttatttgattgaataagcatgaacttaattaattgattaataatataagttatgttatcctaacaaattatttgacagggtaccaaatgtatatatagaaaaaaaaaatcagcatattgtatatgttaaagtgtcaaacattgtattcacatagcgcgttatgatttgattaataattttttatattatttattatatgtgtgacttaatattaaattgcaccaataattatatattattttttgtacttcttgataccctttaagatttctcaattttcgatatatgtacatctctcttttattattattattattttttgagaataatcttatgacctaaaattattaaaacacaacttttgtgtacaaaaagtaacaaaataaaaaagaagaaattcgctttgaaataaaatgagattctatactactagtccttaggaaacatcatatatagtactatattagctatactagtataatattgtaagacttaattttccttacgcgcatttacttttttaataaacatgattcatattcatacataaaagctggttgattaattatatattttgtttttaagggaaaatggggaattcatgcatatacttgcatatatataattaaagacacatgacttgactacatacattataaagaatgcattcatatgtatatatatttataaaatgatggagagaagagtagaatatacatacagtccactcaatacgaatgagacgccagcagcatagatccttccaccactttcacctttatacataaccaaacgactcccataccaagcaagaaaagcccatatcataaaagccagccctgtgctccccacagccaaaccttttgcaatgccttgtttgattcccaacgacgtcgttttgtccaatatgattgagtacctctcaacaattctcttctctgcagtgaacgagtaaatcgttctaattgagctcaaagcttgttccactattgcgtttgccttactatattccttgtgtgactttctagacaagtagactaggtacttgccgtaaatcattcccggtatgattaaaaccagtaatgttgggaatgctactaaggataatctccatgagaagaaagttgagaaagctagcccagatatgaacactgaagagtgcatcagaaatattggtacctgtagattaaaccaaccaagttaataaaaaacataacactatgtatgtgatgttatgttatgtatgtatatatataccttttcacttagaagttcttgtatgagagaagtgtctttggagatactgttgatgacttctgacgtggttgcttcttgtgaatcgaaaaaaccaacttcttgtcttagaacagcttctaagtacttgtaacgcatccttaaaacttgtctttcgcttgttttactccaacaataaccttctgtaataatcattaattacttgatgttaattaagtaataatcttaattagttactttattcttatacattaataataaatataagataattttgctataattgtacttattatacaccaaaaggcatatattgagtgtgtaattaattattcatcacttttttcttttttacccaaacattagggtttcacttgaattaatttttcaactactactggtactgacgataatgtctcctttcaatacgaccgaggaaactagacacatatatatgactagcttgttgtattttgagattaatttacatacttaaaaaagcaaaagcaaaaaagaaaaacagtatacgcatataaattaagtggtttgaacttataattacccataaaagccaccaccattactgctaaacccaagtatacgaagttcaaactacactgttgaaaaagaaaagaaaagtaaagacaagaaaaatgtgagaaagacaagaaaacacaaataatcaaagattatatatacacgttttgtaaatatatgggttgaaataataatttgttgaccatatatatgtaatagtgttacaaaacaaaccttttgaacctcgtccatgaaattagtcccagcatgattgttttgagtctggccatatcccaaactattcatgagacggctagcgaagactaacaagcagtttgttgacattccatctccaatagctccaactgtacccaaaatcatcagcaaaatatccacccaatctgcatatctaaaaattatcatcaaatttgaactactgttatcactattattactcctcgtcattattcttctctcatctccacttttctccaactttatttccttcttggcagaacccatttcttctcttcccttcctttttagttcttacttatttatttggaacctcatgagtcttctatgtttatatatatataaatatttgcgtgtgtgtacacatacagagagagagattattaattaattgttggaaattaattaagaatataatatataatagttaattatattaattttaataatagtgaccaactagtgaatttccatattgaatcaattttattgatggtgatagctaggctttatgtcttttttttctaaatttatatattatataattatataaaaatgtggtaataatggtggttactttcaaaacccacctgatctagaatcggtgaaatgaccatttatatgcagagagagagagagagagagagtactgttcaacaaaagatgactatgacccactatgcaattggccagttttattttgttttttttgctttcctttttttttttttttatcaataaagcttttaattttttttaagtttaagttggagtgatctgctaggctacttttaaattcatgtcgtttttggttgatccactttttcgttcaatccatttatgtcattgttgtaaataactatatatgcatttttgtgtcactaaatagtttccattttggctttat

SEQ ID NO: 18373 - DNA, 3188 bp, Cannabis sativa
aaccagagaccgaaaccctccccaactccaaaccctagttctattccattactattcaccccttcactgcaaaactattcacaatcttctctgatctctcaattcccattacgctttctctccggttattcaattcctcctttctttttatttattttatttttttatttatttttctaccggaaaatctatcaacccaagaattttgcgttgttccgttccggaatttcgcaattcgcaaggtcaatcgttttttcggtagcccatttgagttgggatgttaaattaatagctcgttgagttgggagttttgagacccttttggcgtgtggaagagtgagagagaggaagacgaagccgtagactggaatttactattcatttcttgtgatctgaaacagttgaggaagtagaattcaggatccatgtcagaggtatgtgcttaactctccctttttatttatttcttgatttttcgttcgagtttattttactttgattgttcatgtcgcaaatgagtgaataaaaacgagagtttgcttcattttttttaaatcttcaacggtttagaatcgaaccttattttttgtgcaataaaatgaaattggaaactttgttttaatggctaaagtccgagtcttttcttgtgggtgtttttggaagtcctttagatcttttaatccaatcttttaccgggtttcatgtaatttctaatgtttgggttgaaaagaaattttgtgaaggttatgtttttagctgaaaataagatttggtggataggtgaacaagtttagatagttctaaggattgaaagaaattaaggattattaaattaggatctccaacacacatctacaagtcttgtcaaggcaaaaatattagcagtgtaaccaaaacgtgctagttgtatatattgggaatgtaaatgagcttaaaatgaattgcatgacaggtaaataggtcgtgtttgagaaagtacattttgggatcagcctattgctaacaatatttaaaaagaaatattgcctcttatgatgcatgctgcataaatatattggctaccactaagatgccccttactgatttcgacaccgtgttggacataatgtactgttatgatgtaaaagccttaggtgattaggaactggttgaagtttttccccattttggacctcttcttggggatatgcttttctttctttaagtgtaatctagctgagaagaaattgcggacagattttgtacaatgtgcttgatgtaattgtgaaatttcaaatctgttgatgcttgatgttttttcattgttcccgtgtcttggaactgcagttgataaaatctccctgtttcatgagatagaccaatggactctgagtacaagaagtttggaagaggtataatatttattgtatttgcatttcgtttaagttatcttgatattgcttgttggattcgtgctttttcgtagctattggtaaaacttctaagttaagttatgggctaaatatctttacgtaccattctgattaagtgatactatttatcaaaacatcttgctgtgaactttaacttatttattgaaaaacaaacaagcatttgctctgtaagataagtgtggttttgccaaaaattgacaatcaattctattgcagaaatttttatttggttgggtgtgtgattatgtgtgggatgggggaagggctcaaatccctattgttttcaaaaaaaaaaaaaggttatgcttatatatttcggttgcattttagattttaatcttgaattaaatccttattcttggactgggatttggttgaagctgttaacaacatggaaagatatttgtgtttttggttgttgtagaaagatgtaacaatatttttattgaagagtgcatagatttttttaaaatgtgttcaagttgtgttctgttatagtattattttacatcatattgttgctttttgtgggatcttgtattttcttgttaggcttattatgattatgcaaatctgtatgagcttgatggttgattttacgatattgtcctaattttatgtttcaatatttaggaccgagggagcttactggagctgtagatcttataagtcacttcaagttgcaggcccaacacgattttttttgcaagaagccacttcctttatcaattgcagatactcactatcttcataatgtggtgggggacacagaaatcaggaaaggagacggaatgcaattggatcaacttattcagagtacatcgtactcaagagacactaatgcacgtatacaaccttttgacttagatgttctccaagaggccttccagctcagggaaactggtcttgttgaattgccacctgtaagatatatatgtcaccttgactttacattaacttcattaataattttacattctggatgagagatcttgttgtgttctctttgccgaagtaattcctcaaaagtcttaaatttgcttttttttttcagtcagagaaagggactccgactattgcagggaagtcaaagagcgagtcgaaggataaggagaggaaacataaaaagcacaaggacagggataaagagcataagaagcacaagcatcgtcataaggatcgaagtaaagacaaggataagaagaaggataaaagtggacatcatgaatctggtgctgaccactcaaagaaacaccatgaaaaggttgggaaatactctgctgtttctttatttctcaagtaatttataaactttaacaaaaagaagatttttttctgtttttttttttttggatttttatgaaaatctctttaatttgtaacgttgacaatactacgaaattatgttcctgtgcttgaaaatatcatgtttgctgaattttaagcgatgattttgtcaatgaattggaagaagccattggaccaataaatgaattaattacgcttctgctagtcacagatgaatatatttctatgttttataattgcagaaaaggaagcatgatggagatgaagatgttaatgatattcacagacacaaaaaaagtaaggtaatgaaatatcttatctttctttcgatcttattcggtgttccatttaagtttaggtcttttcttttctatgtgatcttttacgactttgagtacaagtactctaccgtttcaattcctttcctaactagtctctgttgactct

SEQ ID NO: 18374 - DNA, 4954 bp, Cannabis sativa
  modified_base (4920)..(4929): a, c, t, g, unknown or other
aacacttggttgataaattcactaagtctacatgcagttactatgtcctaatcaccaacaaaagaaaagaataaagtttgcagatcgcttaagattttaggcatgaattgactcacaactaaataaagttcacaaaccaaaccatattgacatattaatttaagtactaataaagacccgacctttatctgactcgtcatatatatataaccctagttgatcccaaacaaaacgttatggaaaataaatgttcaaccaaatgcagtaaaagttcaaaaaaaaaaacccttcaaacgcaaaaccaagaaccagaaaagcagaagatccaaatcagggataaagccagaaaacaaacatcagccataaaagactttaccaggaccactttcccttcttcaacaacattaccatatgatctcaacaccgtgtataaggactctcaaaacagcaaatagagcaaaacccacttagattctacaccaataaatgaaccccacgaaaaatccagaagcagaaaaagtattttcttaattttttttaagaaaaaaaaaaatacccaaggaatgggaaaggtggaaactagtgggaagtgtacgggattagaaaaataatcccaaaaaaatagaaaagagagagacacctttggaatctgatacgctatgaagaagcaagctacagaggtgttgggatgaacttggacatgtttcctcctcttcctcctcctttctctctctcaatctctctcactagtttactctctttctacttcttcctcctcttcttcttgggtttgctgtaactaataaatacaaaaacactcgttaattcaattcttctctccaataaaaacacccactacccaccaccatctctctctctcaatctactttctctctccactactctactactatatgtagtatttaccactactatagtaccaactttgcttgttctttccgatataatgtctttctttctcttattttttttcattttatgatggccccactgccacacagccaaacaaggccttataacacttttggcttcattcggtctttctctgttgtcagccgcccttcactgtacctccactttctttttccacacgcgctcctccacgcgcttggattacaaccgtttcctatgcccaatcattttcggcccaaagtcctaggccttcgtatttctttaacgttaatcgattttgttttttcattggctgtgatccccactctccattcatgggacctcgatctctcccgaattcttttcgtttatttacggaaatacccttccctttttccttgaacgacatcgaaatacataaaacgacgtataatattaatatttgaccgtactagtagctggccagattataaaaccaaaaatataaaataatatgataacaaaattgtttttcctgccaaacatagtgacgatatggaaaaaaaaaaacaaaaaaagaagattcaagaataaaatgtttaggattctaccattttaatttataattatttgatgtaactctttttctttctttcttctttctttttctttaatgtcgaattagaattgaaagtaagtggttataacctaaattaaatcgaatagtttacttttgtgagatgctgaaatgataaatttattacctaacaattaaacaaataaaataatgaacacatttttaaccttttttttgctgggagtaaaataatgaatacttgaaaaaataaaaaagagagccaagatggtgatatgaaatgattagctcttgtttttaatggctggatgagaaaggaacattattttatacatatatatgcaattaactaccttccttaatgctttacagttttgaatttttattggattcttcatggtatcacctcaatatttagatttagtctcagaaaaagataaggctatgagtgccaagtaactttttttttttttatgaacatcaaacttcattaaaagacccaaaccaggccacagcacaaacaagttttagttggaaacaagaagtgtcaactccttaacattgaaaaaaccaaacaagaaagacggtgagccatctcatttctagaccgagggatccaagtgatcgccaactctgggagatgatccaaccccgtcaacatatgtccgaacacggcagcggtcgtccaatcaggaaccttatgagatttgattccaagcaccgaaatttgacagtccgaaacaaaattgacattagaccagtcatgaattctacagtggtggaagagagcccaagactcagcttctaggggaaacttagcctcgaaacgcaccgagaaaacttccacaaccatgccctccgaattggtgatcacaattcctgcagtagagcacaagcctttgttggccgcatcaataaacaccacatggtcgccctatagcagaaaatcattaagggcatcaagaccatgaccaacgtctaactgagcagcccacatcaagtttaggttagcggccatggacctaatttgatcaagaaccaccacaaaaaacggtcgaatctgatcatgataggcctggtttcttatagactagagaataaaacagagacaataccaaatcgcctaaaaaatagaaagttcaaactattatatatctttcatggtggttgaaaattaactaaaatataacaattgaatatgaaaaaaattattagtgttcggtttaggcgggttaactcgaccaaaccgatcaattcattggggaattgaaattttattttttcttaattaggcggctgcacttagatttttggtatctgatctttatgctaggttgaataaaatgtaacgtaaaatgaccaaactgactgacgtacgctcctagctcatacaataaaaatattagcaaaacaaatggatgatcaaattagaattaaaaattaataaaattgatattgataactttcagtctctggtaacggcgccaaaaacttgttcggtaaaattagtacgctaatatatgcaatcaaatcaagtaatataatgataaatagagtatcattcccttgattattaattatcaatcaattaattctttagttctatatgagtaataatttttctttagagaaaagtagataatcaaagtaataattacaattatagaaataacaataattaaagataaggattattatgatcccaaactgatctaattttttttttattcaattgacaagttgagttaagtagtttataattcggttaagacttataaatccaatctatgtaaaaatactttatattcctaaattaatttttaagagagagagatgttataaggtacacggtgtttagcaccttcttatatgtcaatattgctattggtgtaattaagtatgagtctcatataattttatctaataatttttagagggtatccttagagcatctccataggagacaatctagttgtaaacatacacacattattttaaaatatatttttttattttttttctcatccacataaaatttaacatattttctttcaaaaattactcatagtaattctaaaaattatccatggtttcacataccactttttaattgaattttataattatataccttctctttaaaaattagtagtgataaaatattttttataaaaaaatattaaataatgttatatgatcatttctgattttgaacaataatatccataaaattaatttaaaatgttaagcaaaatacaagtgtgacaaatacaactccgtgagcaaccttagatatgctctttatcaattgcaagatgaggtgccgataacaaagctaaaaaaattgtatgatgcaaggtggcctgctttgcaaagagatccccacgaaaatgcaaaggaacacgcggcatgaaattagacaaggaaaaggtagtttgtcgttatccccgccctgttgtcggtaggaagggtttcaccctttaataataataataataataataataattaatattagggtttttttcatttttacatttcaaaatcgtctttttttttatatatttttacgaaattctacgtagaaatttctattgcaactagcactgctacctaaattgcaacaaaaaatcatatagaaatcattattgcaactagcgttgcaaccactttagaaactcaaaccgtaaattttaaaaaaaaaaattaaaaaaaaatatgtagactaattaccattaatattattaattaattaattataataataataataaattagagatactatatatttccctattatttaaaaatataatattttattttattttttttatattatttttgacacatttatttttaaaaacactttgtaaaataatataattataatctcaaatctttttctttatcaaactattatttatattttacttttaattttttatttaaaaaacatagcattaatgtcattaggtgtcatcaatgcaaatttcaagattagtattcttttatctctaatgatataacatccttttattttttttacctaagttttctacatcatcaaacattcttcacaatgctatcattagagcatctccaatgttagcatcctttaagaatgctaaaaatattcatatcatttaaaaatataatattttattttatttctctttaatttttagcactcttacttttaaaattactctaatggtatagtactctttaaaaatactataattatgatctcacatattatttttaattttttagcaataacaattttttaattttaattttttattaaaaaaataataatagcatcaatactactgtatagcatttacacatttttaaaatagtatttttttctctaatagtatagtatctcaacattttaccattttatctagggtaaataccattttggnnnnnnnnnnttgcaaaagttacagattggaccct

SEQ ID NO: 18375 - DNA, 8153 bp, Cannabis sativa
actctccagtaattttgaactaaagaagttcaaaacgttaagcaacttaagattttggcaaaggactagatgcaatcctttttattatgtactagtttttgtcacataattttcatacacattcatgtcttttcaaatgaacaagctccttccaaaagggtatcacaatggtaagagtttagctcttactagttatggtatcaaaacaactgaaccagttgttctgcgatcttcaaggtcggcatgtgcccggggtgcttcagacagagggtatgtgtgatttactcgaactcgcagaacaccggaggaaatgttagcgaatacctcgcctgcagctgccaataactcatctcgagtcacattgtaatgcatcaaagttggtcttgtcaagaacaaagattttgccgcaattgctgataatggtaatggatctggtgtccctgatgactgtccaaaactcaccatacatcctcgaagttttaggcatgccaatgagccctgtaagattataattttttcacaatttttttctcagcatcatgatctgaaaataaaattcatgaaatttttttcctagggaactcatatttcaaaacatattatttgcaaaataaacacattggtcacagcagctactctaaatttacactgtgcaaccttaaaacgactttgacattgtaccatcctaaatttacactatgcgatcacactttcatgagtttaatttgacaaatttctctgatctacaaactttgctaagcagaacttgtgataattgaatctggcataatgaattttattattttaatatgcatctatacaacaacatacataaaagagaacaacaataaaaacttttccggctcttgaacgataaagtgaatgaaaattacctcaaacgtatccttccccacagagtcatacacaacatggaccccattgcctgatgtaatctcattcacacgagcaacaaaatcctcttccttgtacaatatgacatggtgagctccatcttccttggcttgagcagctttttccttggttgatacagttccaatgacagtagcaccaagagcattaccccactggcataatagagatccaactccaccagctgcagcatgaacaagaatggtttgtccaggctcaacctgtaaacaaacaattaagaaaaatcaagtaacaattgttattaatcttgctatctattcacagtgatacacatgtaaagataactcccatagttcttcttctcttccctaatttactttgaatgtaccttgaaacaacggcggagtagaaactgagctgtcatacccttaagcatgacagacgctgcaatgacgggatcaatagattcgggaacaggaacaactttgtctgcaggaagaatctgctcttcagaataagagcccattggaactccagcataagctacaagatcacctacttgtctgccggttagtccaggcccaactgctgtcacaacaccacatgcctccattcctgtacagaacagaaaaaccaatttacaaaacgttatttgaatgttaaaatggtaaccacaatagtagaaaccaaatgtgttttgaaggcttaaagaagtgaaacaaaacctggagtgaagggcaatgtagcagccttataaacccctttgcgaaagtatacatcaatgaaattcagcccaatggccttgtttttcacacgaatttccccctcttttggctctcctatttccacatcttcccattttaagacctataatcaatatgggtaagaagaataaaatgaaaaattagagaataaagggaaacagccctcaagaatgggaattcagaaatgttaaaaactcccccaacaatttgtactttgatattcaaatgtcatcacttacgccaattttgtttatacaaaccaacgtaaaattcaaaccccactaatgatcaaaattggatctcaagtatgagtgataaaagttgaaatctttaagaaactcatttcatatagaatataaaacagggaaagagaaacagaaagagacctcaggtccaccaagttcatgaacccttatagctttgcccatttccactggtgatggtggttgagtggcgattactgctctcactgcaaatttttgggtaccaagtgttgatgaagtagaggtaattttgtagcagtttgtggggtagttgggaaaaagttttgaactttgattgagatgggatgaaagtgaaaccaagtgggaatggttaggcagtagaagattctggttcggctgaataatatcaagttttagcttcaggaaacccataaataataaataatacccgactaataattttgtctaataatcaaagactcaaagttaaatcagcacgtgtgatggtccaaaatataaaatggcctcctcacggtggaagtaggagtgggcataatctatcaaaaaactgcaccaaactctcaaaatacaattcatttagttgtctacattttgaaatattaggtagagccgtagaggtagaggtacgttgtatatgttataattcacagtaatataacatgtgtttctttatataatttataagatttttttttcttgttttaatattttaaatttataataactttttttccttataccttaacaaacaaagacactgaaaataaacttttgtactaaataaataaatcactaaatttttgtaatcgatttatgagcataaattatatttactaatagatccactatttattatacatcacctacgactgatgtattggtttacctaactcggcttgtattggtttcaggactatgcattatgcgtcacttatttaaataagtaggaagatgagctggttgataatactatttacaattaaacagcatctgatggggatactctgaagtaaaaaccaacttttcttctcactatagggaatcatggctttagtaaacagtggacttgaaattgtacattgataactttccgatcttatgctagagcagcatttaaattacatataaaaataacaaataacaaagaacaccagagtggatgaggtagcctccaataccatttagtattatggtagtcttccacaacttagctctgcccaaaggctatggcttaaagagcaaacccagtttaatttaactcagctttgctctgctcttcaagaaaaaattaagggctattaccaatttgtgcttactgtcatctgtgtcttttccgggtattatagttagttagttgagagcattttggcccatgaactatatcattagctgaccaagaaattgaaaaggcaagcatggcaattggaacaccatctcaaactcagaagagcaacagcgcagtcatcctagaaattttcaaacagctgcaatatttttcactcaacttccacctaaaggataaaattgtattcaagctccatctctttcggaagatcgccatattcttctcctaacacacacatgctcaatacttccaatgcttctattgctgtgctgtaaaaaccacagtcctggcatccggagagcattgtagttacaggtacatgaatcgggttggattttttctaggtgcatttgctcaacaacaaactcaatcacatatatcatccaagtccaagcaaggcattagcaatacataagaagcaacaaccatctccaaataaatggacttagaatacaaaattataatatttgtattagttctaaaagtttggctttatcatgttaagagctacatcgtaaaatgcaattttcctatcttcccatttgacagcaattccaaagattaactttttgtcatattttccttctcaacataatatagtttatatgcttggtatccgacctgtataatcgtttatcaataaataaattttaaatcagctggttaatttccaagttaaaaactcttaaaagccttttatagctaaaaagaaaaagcaatatcaattcagtaacttttcacatgctttcttaagaatggtattaaacaacaaaacatcaacttgaattccttctgagatggcttgttccaaaagatctaaatctttactccaatagaatctggaacaaagtagagcaacacacgaaaatcagcaccaacgataagcgtgaagagcaccagtgctaatgtaacttatgtatccttaagcgaccaagagggcagtgtatagacaataagatttccataacagcacaaatggttggaaacaactgataaaaagaggaattcagcagaaaaaaattattatgaacagtcacagttatcaggagaaaaatttgaatcagctgatgcacctacaagagtataaaacaatttaattctaaaagcaaatacaaatagatccaaacatgacaagttcagaattgaggtaacctagtcaaatcaatattagaacttttcaaacaaatcacacactgggcaagacaccgcaagacttgatatgtttgaaaagttcaattgccatgtcactttgaatgtcaaggaagaaagcttgtagctaactactggataaaattatttgacttcataatgaggaaaatggaagagaaaatatggtttaaagtacctacttccttagcttcgataaagataatccaagataaattttgcttaggcatgaaagtaatggaaagttctttcatcatcttctctgctccaagtgatgatgccttcaataagctcaagaaattaacgaataaaaatacactagataacgttaaaagtttgatttaaaaataatgacagcagcaaccacaaaggatattcaactataaataggtactgattttcagcatttatttaaacatggaatctagaattatcaatttcttcattaataaatgactatgctggtcacccatttttgccatatctatttctatggcatttattcttttagcaacatctaaatgtgacaacatatttcacttttcatatggggcattgatattgcaaaataaagaaacagaagctcatacttcctaatatccgaaactctgaataaagttaaaccgaaaaaaaaatcagagaagagaatttgattgtatcatcacactttgtgagacttatgactgaataaagtattattattcttgcattttcatgttgtacgaaattaaagaatgttgtacaagctcaaaacaaaagaattctatacctgtgctaataatggttctacaagcccatcattgagagagtaaatgttgagaccagtttttgaaacactccttccatatctcttggactgctgacaagttcttttgtgacactgccaactgaaattaaaatgcaatggttgtaacctgataagacatcacgacattacctgaagaatatgaaaacaagataattttgctcaccttaagcattgattagcatcatagcatgacctatactatgtgtttcagcaaaagcacccaaaaatctattataaatacatagaagtgggtaaatgccaagactttctgtgagagaatttatcaaatttaatgcctgaacatgcaaagcaggaagacacaacatcaactccttcattgcacttaaatttgaaaaaaaaaattgaagagcaaccttaagtttcattccacggaccattataccattatagcatgaccattataggttttgtgcttgagcctgctccataccacggaccattatagcatatgagtttaaggaagttgtaggaaatcctaaaaatgctcagactaaaaatgcaggctaataagaggaagattagaaaacttatactgagacaataatacaagaagatctgttcttgtaaataggcatacactctaatagtaacaatactactaaaatcataaagtgaaaacaacaataggatattttttagtacaatggagattctaacccctcccccctctcccacatgcatactcgctcaaccaattgaactagccaacaatagtattgttacacattaccttttgaagttgtaaaacttcgagacaacattgcttcctttgctgcaatccctgccaggacattcatcattttaatatgaacaattatccattcatcttacatgatttgatttctccataacatgcaaaactaactaaatttaaaattttcaaacatacatttataaatacaatcatacgtacgttcttgtgttattaatttatgcaatggttcaacaaatgaccagaaacgattttgtaacgccctaagtcacagggacgtcacgtgtgtaattttcacaaaattacttttccatttaactatataattatatataaagtgtggataattaaaatttagtaattgaaacaaacacataattttttttacgggtaccaaaatatttgcatttagaatcaaaagtgcttttacaaagtacgtttatacctcaaaatgcaattaaaatgggacatcctgaccaccgagtcgtggcaccgcgactgatatgtacattgctgctacgacctcaaactcatagctgctcaaccttacccattcgtttacctgcaccatttagtaccccgcgagtatagagacttcagcaagaaaagtgaataaatgcataataatataaaattcatttagtcacattatagcaagatgtacataaattacaacacttcaagtattagcatgccaaattcatttcacacaacctcagtatttcataaagcacccttaccactcgttaaccacgagctacgtatgtcactatcgttgcccaatacagcaaacgataagtaagaaacttatatgcggtttcaggagtaattactcatgacggtaatgaccgtttctaaccctcggtcataaccgaggctcaacaaacacataaccaggatctcgatcataaccgagactataacaaacataatcgctaatcacttaaccctaagtgatacgtaacacttttcttaccccggtctagaaatcaggtgtgtgggccgacctgagtggaaacaaagttgggcgatcccggtcctatgttacgacaaccaaaactcaataaatgtcttaaaccaaaactccgaaaaaaaatcctaaatctgaaatcggacataacctaacttccaacaatcccaaaataagctacacaacacattaataacctaaaaaaggcactgggcactaccccgagccaaaacagaactcgaagaaaacccaagaattctccctgtagggcaaccagtcgaccagttctggtgcaccgaaaccaaccagtcaatcagttctggcagaccaagaaaacttgggttttcttccccaaatcctcaccaaacctgtccaaacctctctaaaacagtatattaatcataaaattaaatattcaacccatccattaacaataattcaacaattttcacaaattgacatgttagaacccaaattttcttgactccacataacacagccacatatctaagctaattaaaacttaactaaccttaaaatcaacatcaaaacaaaccctaaacttagttaggggtgagcataaaatccaaaaaattgaaaaaaccgttcaaaccgacctaccgaacaccgttggaactgaaactgacgaaaccgaaaaaaccgctaacggttaaaaccgcctaaatccacaccactcaaatgattattttacctctcctaaatccttaaattaaaatcaaaccctaggggtattttggtaattctagctaattcgccaaactgacaacctaacacactaaactagcccaatataatttccaattcaatccatactttattatcgtgacatttctgaccactccgtccagtttctacagtcgccgggcccaaaaatattttatttgaaatatggtatccacgatactcacatattccaataaaatctccgtaattaataaattacgctttaattaaccatttattaaattcaaactaattaacctaagtaagatcataatcttactttattaccaaaataattttaataaaatatgtccaatcaattaccgtattattttctgggatattacaactaccccctccttatagaaattttgtcctcaaaatttacctgaatagctcaggatactgctcccgcatctgtaactctaactcccaagtcgcctcttcaatcttattgttccgccacaacacttttactagcagaat

SEQ ID NO: 18376 - DNA, 4421 bp, Cannabis sativa
actcagaaattctcattcactttctctttctctcttcatcttcttctcctttcttctcatctactttatattattttatattatttcataacagaaatgtatatttaaaatttagttaaaggtgttgttagaattgttttttaacaatttggctagtatattatttttttagacaattttttaagcaataacatcaagtaatattttatgtaattaaaagaataaaaattataaatataatcaagaagtagtatctttaattttaattaatttatatagattataaatttattgtgataataattatttatagtttgtggataaataaaaatgtttgcatatataatagtaagttaaatttcttggcttagctaataaaaagatgaactaataaagatatttaactattttttaatttgtaaaatttgttggtgattaataatattttttcttaataaatgatgaattatatatatatatagtgtgtgagatttccaaggtcttgtgattttgacatggtagtttgttgaaaagtcttctagtgttacgtttgtgtttttgattgttttgatcacgattattatttcattcctagtatggctcacagacagaatcagactgaaatcgtgggaagaaatttttttggttttttgatagatgacgatgatgaggagggattgttatttaataatgtatcagacagtttatcggagattgatgataggtggctgttggtggggcgtgtcttaacaaatcgaccaatagattatcaggcgatgcagaataaaatggccacgctttagcagccaggccggggactatatgtcaaggaattagaaccaaacctgtttttatttcaattctatcatgaggtagatatagaaagggtgattgagggtagtccatggacgtttgacagagctccattagtgtttgaacgagtgaaagcgggtgaaaattcaaggcaggtggcattgatgaggctagaattatgggttcaactacataatatgacaacagggttcatatcagaaagaataatccaaggtattgggaattatataagcacttttgttagatccaattctaataatttcatgggagtttggcgagactacttacggattcgggttaagttgcgagtgaatgcgcctctaaaaaagaaaaagaagttagagattcaaggaggaccggtctgtcatgttatttttaaatatgtggatttgcctactttttattttatttgtggagtcattggccacacagagaggttttgtgagagattgtttgacacccctaaagagcttattgttaagaattatgatgcagagatgcgtgcggtttcagacgacatcgatacgcggatgactcaaaatggttgaagtcggggttggctacaagaactgcttctatgcagaccatggcttcgtccagcaacaatggtggcggtggagattctccggtgatagctggggaagtgggtcaacagattgcttttcctaataatcagggatctcatttattgcctaataatcaagggaacaatggggttgacttgaatagggagttaagggaccagggaagagatgatggcttgattaatgggaaatcccttgacacaaagggagtaaatgggaaggagctgatggtggcacctagtggggagaattcaaatcatgggctgactttccttgagaataaaagaagaagaatgggcttgggggatggtattgggcttacagaggagaatgaaaatgaagaagaatatagagcccatgataatatactctatgttgatatggaaattgtaaaagatggtgggaaagctttgctgggcaatttgagcagcccagaaaacttaagtggggcgggtcttggtttccaagcccaccaagcattatgaatgtgttaagttggaattgtcgggggcttaggaaccaacggagcattcaattctttcgagatattgtttctcaaaagatacccaatttcatttttctgtgtgaaataaaatatcaaaagtcaaaagtggatggcttagtactctgctgggttttgagggggcctttactattgtttcggtaggcatggcaggaggaattgctcttttgtggaagaataatgatgattgtactgttttgggcttctcaaaacaccacattgacttagttattaattccatacagtttagtaattggagacttactgggttgtacggagagccaaatcggagtaaaagacatgaaacatggagtttactccaactttgtcgggacaattggggttaccttggtgcgttattggtgatattaataacattgctagacaagaggataaacgagggggtcgtctttatccgcaaagcttgctcacaggtttaaaatgtgctctgcagcaatgtgatttaacggatttagagcttcaagggcatccgttcacttgggagaaagggagagggtcgaacaattgggttgaggttcgtttggacagagcgcttgtgtcttcctcttggcaccaggtttttcctaatgcttctctatctaatttagagtttactacatctgaccattcccctatttttcttgagcctattgtccgaaacaactttcctcctacccgtcatttttcattttgaaaatacatggttgaaagaacctctttgtgtggaaattgtgaaagactgctgggaaagtggcgaggctagtagctttggtgagagattgagtttgtgtgctgaaaaacttaatagctggggaaaggagataactgggactttaaaccaccacattaagagctacaaaactcagttaaagcagttgcatgataaataggatggtgcctcggtacaacagtataaagaagtaaaggataagctttttaaagccatagatcagcgtgaatgttattggaagcaatgatccaaacagttctggtttcgagagggtgatcaaaatagcacttacttccataaagcaactattaacaagaaacggaacaatcaaatcagtgctttgaaagatgattatggtaattgggtgacttgggagatcagcttatctcaagtggtgtctcattatttccatggcttgttcacttcggcaaatacttgttgcaatgagataattgactgtgtttcgaatgtggttccggactaggtgaatgtggaattaggccatccaataatggaggaagaagttaaaaaagctttataccagatgcatccagacaagagcccgggtccggatgggatgacccatgcattttatcaaaggtgctggcctattgtaaaaggggatgtggttcattatgttcgtcaattttaggaaaatggtgttctagaagatggatgtagtaaagctaatgttgtccttattccgaagaagaagaacccagagtccatagttgatttgcatcctatagccctgtgtaatgtaacgtacaagattattactaaggttatggtgaataggatgaagccttttatggattctttaatctcaaaaaatcaaagtgcctttattccgggacggttaatttcagataatgttctggtctcctttgaaattttacattatctaaaaaggaagagaaaaggtaaagatggatacatggctcttaaacttgacatgagcaaggcatatgattgagtcgaatgggtttttcttgaagctatgctccgcaagatgggtttccaggagaattgggctcaacttgtgttgcgttgtgtcacttcggcaagatacaaagtcatccatggtaatcatgaggttggtccaatcattctaacaagaggaatttaacaagggaatcctttttcaccttatctttttattctttgtgtggaggggttatcgacaatacttagaaagtatgagcaaaaaggttggattcatgggtgtaaagttgcaaatggagcgccaaggatctcacatatgttgtttgccgatgatagctacttgtattgtaaagcatctgaaaatgaagcctctcgaatcaaggaaatcttcaaaagtttgaagccgcctcaggtcaaaaagtcaattttactaaatcgtccatattttttagctctaatactgaggagagagtgagacaactgcttagcaataatttggctatgggtattcctcctgagggaagtttctatttggggctgccgagttcaatgagatgtaataagcatgcggctttgggatatctgaaggaaaaggttcgaaaacgacttcaagggtggggaacaaagttcatctctcgtggcgaaaatgaagtattgataaaagttgtcgctcagtcactcccaagctatgatatgaatattttcctactcccacttgaaactactagggaaatggaaagtttgatggcaagatattggtggaaatctattggaaatattttaccaggatctagatctactacca

SEQ ID NO: 18377 - DNA, 5858 bp, Cannabis sativa
  modified_base (26)..(41): a, c, t, g, unknown or other
aggatgttaataaaacatacttggtnnnnnnnnnnnnnnnnggtaaaataatttccaacatctttctccttatgtaacaaaccgtttaaatccctttcaagacttcgagcccgatctaattgagcgttagtgggacgagggatagattgaacaagtttgagttgagattgaatttctcgaatttgagtagcaagaggaggtctcaaagattgcttccaatgattaagacgtgaagaacaattacgcaatttttcagtgaggccaaccaaaggattagaatgatgagtttgattagtaagcgtgcaagcgtcacgaaggcaatcctcaaaactaggcttagacatccaaagcttatcaaagataaatcgaggggcaatcttggtgcgttcagcaggattatgcaaggtaagaattaaaggtcgatgatcagagccaagaaaatctctgtgacaaagacgagaagtaggaaaaattgcatcccaatcactgttggaaaggcaccattcaagtctctcttgggtgtgagacggttgtttttgccggttagtccaagtgaagggacatcccaaaggataaagagggtgaagctcatgagtatcaacaaaagattgaaaatgagtagacggattacgagacgtgtcacccccaattttgtcagaaagcgaaagataatcattaaagtcacccataatgagtcaaggttgtaactgagaggcggagccaagacgattaattaattgccatgagtgaagtttattctgagagtttggtgcaccataaaaagcaataaaagtaaaatcagtaaaattaggaaaagcgatataacagtgaaagtgacttatattataagaaagtaaggttacatccacatcatgtgtccagagcaacaaaagaccaccactaagcccgacacgtggaacttcgagatcattaggaaatttaagacacgaagaaaatttatttaaagctccaacagggagtttagactccattatatacaaaagcgttgggcgatattgcttcactaaaagggagagataacggaatgctcgtttacaccctaatccacgagcattccaactgataatactcatggctctaggcggatacgctgagcgtcacccgcctcttcaactgtcttttcatcaagggacttggctaagttgcgtgtgcgtttgagcattcttctgaattcagcagcattgaggcaatccggcctcttgggtctgagcttgcggatgccaaaagcagtgggagctaggtaagaagttgctccaagagcaaactggagcggatgagatgagttgaggtcagccaaaatggtggagaaagcttgggacacaggaaccacatgttgaggtgcaccatttgtggccataatggtctcggccgaagttggtatggccgtgggaaggggtatagtaagttgctcaaccgtggttatggatggagaagggaaggaagtagtgggaatggtattgctttgagtgagaaatttggatgcaccttgggtattagcatgttgtgttgcggtagcagtagcttgagtataaagccatgtggaagtggaaagagggggctggttaaggttaggggtatgggaagtgagcacattggaggaggagtgagccatatagaaccccagaggagtagtttgcagctgactcaagtgttgaaccccataagcataagtaggctcattaaagaggccttccgagataattggaagctgatgaggacgatactgagaagcgggggccagagatgttgggtgagctatgtgtggccgcagccgagatcttgagcaagcaatataaaagggatttgaagtgattctaattttggcgcctaaagattgatcataacgaagcaaaggtggcgccgaagaggaatcacatttggcaagaaattcatggcaatgattcacaatgtggctaagacgtctacagtaatgacagaaatctgggagattttcgaaacgaaattcaaaccaaactggggcagccattccatggaaatggaaacccgtaccatgaggaagtggctgagatacatcgatctcaatgcaaacccggagataaggaccccaagtctcctttagagaagcagtatctacttcaataaaacgccctaagacttcgcctagcctttgagcaagagcatggtgaggaaaggaatcccagaaacttggacccagaaaggtgtgaaggtaagtgtatcaacagtcacaactgagcccgcttctagtggtgtcattacaattaatttataatcaaagtgccacggctgaccgataaggacacggtgacgatcaccaaaataaccaaactcgacagtatagaaattggggtctttttcaagaacattgattgaaaaacgttcaggccacatttgcttgagtcgtttcttgaaagcctcagagttgtagtgacggttggttaaaagcttgacagcaagaaacgcagagggttcatcacgttcatcatcttcaggatggtcaggggtttcagagaaggaatgaatttgagtttccaaagcagtaagattgagggtggcattgaaagtattggataagtcatccattttcaaataacagcagggtaattgagaagaagacaaagaaaggaaaacgtgtgcagaacagatataaaaaaggaaagttgactgagaattactgggtgtagggagatatagaggataatcagatatataatggtctgggcaaagaacaagcatctctagggattgtatggtagcaagtgagaacttctccatgtcaggtaatcgaatgattattcctgcaacattgacagtggctcctaagggaattctagcgttctctacaaatgtagagttaatcattaaccagggcggtgcagggggttgagagctatttaatagagaagcaggaaaggggtttttcttatggttaagtttaaagaggataaagaatcgatataatggagaattaaacacagatgggacatcaacccagaagttattacagattagaagtttacctgtgaggaagaagacaagatgctttaatagtggattccgtctgttagcatcaaacgacttcatatgtggggagatcgaaccgtcactcgatgggaaaacccacggacggacaggaacgccgatagacggcgacgacaacagcaacattgacggcacaggaagaatcgcaaaccctagggcactctctttcttcaagaagagctgtccagaagcttctaatgaattttctctttctattttatacatcatatgagttactctaaaattttattttgttttattattttttttaagagttgtgaatatattaatagttggattcttaggtttcgaaccaattatcaagatgtttaacattgatattttgcatatatttaattttaattttttttatcatgaaaaaatataagataacagtaccttaggcacaaaaaacaatgaattatttttttatatataaaattacttttttttttaagattatttaaattcattagtttaacttgagtcataattattatttttatatattcaatttttttaatatttatcacataaaacaaagttcttctaaatttaaagttaattcttagagaactaatttctcaagtgaataatgggagatttctacagtaggtagtagcggagggacatgggtcatgtgggggaacatgatcccactcaactttttaaaatttattttttgtatgtatttttttatatatatatttatatttttaccccataaatttaatttttgtttttattttgccatcatatattataattttgcccatataaatttgtattttttttttatttttatcttcacatatttttaactttattctcataaatctactctagtctctataaaatttatatttttctttataataaaaataatattatttttataagtgtaatttttattccaaaaaaaaaatatttaccctcctaatatttgtggctggctccgccactagcagtaggacttgtagtttttccctcatgctataggaaaacaaattcaaccaactataattaaaagaaaagaagtgtacatagtaggagtattcataaaccaattcagtccgcacgattcaatctgcaaagtgcgaatatccgcacttgtgcggattggattggattggattgaaaaattcaaaatctacactcgtgcgtattggatgtggaaaattcaattcaagcaatttattataagtgtacttgctattatatatttgtaaaataaactgtttgaacaatgttctcagtattgtaaattatttaaaaaatttaaaaatttacttaatatttttaacatctataattgacacattacatagtcataataactgagtgagatagtagctatgttaaaaacataagtgtatcaataaattattttaagagggtgtacactccaaaaaaaaaaaacaaccacaaatgctcacaatatcatatgataaataacattttttaaaataaaaaataatcaataaaaataaaaataaaaaacacaattgtttactaaattggacgagtttaaaaatactcaaaattgtttacttattatgctttttaagggagagggagtggaattttttttaattataaactatttttattttttaaaaaaattaataaacacgacagtattaatccataccggtaataaataaacatatttttatctgttgtgtattttgattagttattgtatatagttttttctggtaaaacttttataacagggatcctcggaacaaataattttagtattataatgtctattactagtattttattttagtaaaaattttaatattatcagagattgtaataattaatcaatctattattactaaacgggtttataaaatcacacacatgatgtctctatatattaaagtattacacatggtatggtagtgtgtatgtacacttgtgatttttttgttggtaaaaaaaagcatatgctatataaaaaaatgtaaaaaaaatagaaggaaagaaatatatgtgatgtgtatgtataaatgaatggacttttttattggctttaagttaatgagttttgttattttaattttttttttgttatggaaaaaaaataaatatgtttaaaaaaacacataatttttaaaattgaattaaaaatatattaggatgtgtcataaaaattatagtatgttttcataagaatgtgttaggaggtgcaatttataacatttggctcaaccaaaatttgtgtataaataaaaaaaaattgtatgacttgtatagatagtagtattaaagacaagagtggacttattcttgtacaagaaaggaaagctgtctagcataaataaaattgaattataagtttctcttttgaagggaatccccttgtggatgtaattgacttggtttttttttgttttttttgaaacattaattgacttgtctggttaatagaaattatctttcttgataaaaaaattaataaagtaaattaattgaaaagataattacgataaaattatgtatctaaacaaattggtagcgaaagtacttaagtaatcaattttgttataattaactattagtataaaaaaaaaattgatagtaaaattcgtaagtgaaattattttttaaaaataaatacctatataaaaaataattcaaattagctttttttttagaaaaataataataatttaaattaaaaattaataaattttttaattattaatattaatttatttttttaaaaaaataaattcataatcaaatattattataattgttgggtttatgccctaaataaaactctttacaatctgattagt

SEQ ID NO: 18378 - DNA, 7796 bp, Cannabis sativa
tcctggtaaaatatttctaacaaccacgtcccctcatcttatcactcaaatgatttttgaggtcacccccatgtggccttgccttctcactcttgaatctctcttactttgcatctaatcgtcgctgcaagtctacaatggaccaactatcgcgcggagtgacctgcggggattctctcgtcctagttaacagaatcactaggaggatctcctcatcttctaggcttgggtgcctttgtagttcggcctctcagcacggtttttccttgagggttagaagggcatccaaacttaaaagcatcggtggccttctccatccttgagggctggctggccgacgtgtctttgcgtggaggcttgggagcagatttttgtgggagctcattcaccttgcctttacccttgttcttgcgtgggtttgaaatttcagcttcagtttgtttatgagctcgcctttcggccacgacttccaccgagggttcctcatttgtttcagccaagtcatcaaacttgctctgaagttgttccatcattttcttcatctttgcggtaagttctctttactctgctaactccgcctaagtagcttctgactcttatgttactcataacagattagggtcatggtcgtagtagtaaccatctttggaatacccatcttttaagtattcctcatcatctccttcttcttctccacctcaagggttttggttatcaccaagatcatcgacaacattctcattatcccctcctcggttctcagcagaggttgcaccttctccatcatttcgtgtctggaagtcggcggcatgggagtcggcttcctccataactgtgtccagtggagctttcttgccagggtttttcgtgtacacaccatggttgaagcgtgatgatagttactagactttccttagttctaaatgaaagtaccaaaatatttattgagatttttggaaaaccaattaataagaactcaaggaaataaaagatagtaaacggtagataaacagattttttacgtagttcgggcgtaatgattcttagtccacgagtcaatagtattagcctcctagggcgaatatttgagtattacaagtgtttgcaataaataatctctgtattccatttgtttctctttaagaagaaagctctctaggaattttagtagagtttttgtaagtaaaaattattcaccctctacttataaaaaatgagggtatttataggcattcatgtgggcaagggcataccttttacccacctagggcttcgtactctactcactacaagggcctatcctaccgtaggacgatctgaccattggttgataagaaccttcttcatcgtatggcgtacagctacaatgagggatttcgtgcaagccaggacacgtgtcgtgcaaaggtctctcctttgcaaaatactctctaactaggccgttgggaaaaaggcatgtccagagatgcgtatgcgcactaccacgacctagcatgggggacaagatctgatcttgtgtcagaaaaaggtgtagccacctatagagccattttcatatgatgttgatgtggcaattgatcatgagactactaccatgttctgggaccatcacctaagggatttctatccaggagccatctaccttgattacccttcgggttcgggatatgtcaattgtccgcaaatagcctgtttcatcgagtgtctagtgcatgtttctaggattgtcaagatgtccccttcgggagaccttacgagttatttcgattaatcctttcagctaatgcaccttgtcccttaatcatgccacgtgtctcatgtgccaaaatatgaataacaattgtgatatgaataattctttcatggtaaacgacatgttaatgaaatgtgttattaacatgtcctttactataaaagaattattcatatcacaatacatttactacatgtctattcacatatgtaatctgaatcaaaatcatatacattatagtgcaggggtggacccacatagaggcgaggtgggacagtcaccccctaaaaaaattggaaaaaaatgtatatgcattttagctagttacaacatatttttctaaataaaagtgatatcaataaacataatacaagttatggtataatggtaaagttatttcatgcacataatagaagtcatgagttctaatcccaataaaatcatatttattttagtatttgaattttactttttgaacttctattaaaaagagttatatatttagtttcttaattattaaactcgatatttttattgttattttattttttttactttatactacatttagtactataatacaaatttgcatcaattttttaacatgttatataatatagaaaaaaaaaaagatgcccccctcacttacgaaaaaaaatgtcggcctttcaacttaaatcatgggattgcaactagttttatgttaaagatcttttactttaatatactaccgactagttttattcatattacataatcttaagtctcttgtacgaccttacaagattatacattttccatctgaataaataatttttaaatatttattaattatacttatataattaatatattcatttatattgtatttcatatattctataatatattattcatttagtacttacttttagtcataaatcgcaacagtttggttatatacaaatccacacgtcatctatctcaaatcgcgataacaaaattttatttaaataaatatatttatttattagtttgaaccaaaaatatcataattaataaattaatgaaattaatcaagttaactttgtgaattctaacttataataaaattaaactatgttttaatttttttttttcatccattttagagtttattttcattcttttctttttcttcctaaaaccctaaaaaaaacccattttgtagctttaagttgtaatcgttaaagggacttcgtgaaagggagtgagtgagtgaagaagactagtaaggaagaaaggaaaccaaaggagatgtcgactcttcagctccgaaatctcaacgagcttttctcaacgtcctcgtctccaatttccactcagtttcaccaccggaagccattctctctttctcaagctccccaacgaacatgcatttctcagagcaacagacgaagaactaccctcaaacgacaccgttttggtgttgtaagttgttcctttgctccaatggagactgccaagattaaggtggttggtgttggtgggggtggcaacaatgcggtaaatcgtatgattggtagcggtttacaggtttgtttttcattacgttttgtgggttcttgctcatattttgaaattctctctttccatcacatatttggaccatttctttgaaaccagtgtgtgaattgttatgagttttagaatgtactttgaaatttttgtttttattttgtagtataattgaagcgtcagaaatcgttttctttcttttttttcattcttatttagcaaccacgttcattttgctccttttgtattgaattttagagataatttagaaagttgagcgagttttcttagtgtttactaattaatttggaggaggggttcttgaatagcttaactgaattatctataataacttaggaaagcgacataacaattaattttttttttttttggtatgattttgaataaattggcagatcatcttgtttatttacatttagtggatttatgatttttccttttatcgagaatagggtgtcgacttctatgccataaacacagattctcaagctctgttgcagtctgctgctgagcatccgcttcaaattggagagcttctgactcgtggactaggtcaggaattctggtgtagcattttagttcccaaacagtttttttttttttttttctatatgaattcatgctgaatatacccaaatgagtatacataatgagtatattagtgtattctatgagtacaaaatatgtttttataaaagggtgctgtattcagtgagttctttatactgtcccttgattgtaaggaaatgattgagttgcaggtactggggggaatccacttttgggagaacaagctgctgaagaatcgaaagaggccattgcaaatgcccttaagggttcggatcttgtgtttataacagctggtatgggtggaggtacgggatccggtgctgccccagttgttgctcaaatatcgaaagaggctggttatttgactgttggtgtggttacctaccctttcagctttgaagggcgtaaaagatccatgcaggcaggtgtcaatttgttttttatttataatgtctcgaaagttgcatcatgcgtgcaagatagtttaatgtagagcaaactcgaagcttaggttaatgcacacaagtttttttatgctggtctgtgctttcctatgctcaagaaggatgtttaagtatcatttcttcttttcttcaggcactggaagctattgagaagttgcagaaaaatgtggacactcttatagtgattcccaatgaccgcctacttgctatttcagatgagcagacgcctcttcaggatgctttccttcttgctgatgatgttctacgtcaaggtgttcaaggaatttcagatataatcacagtgagtgcttttcctttgacatttcatgttgggtgtttgaatttatttgggacaaacctgatttcaccattgggcatttatatcccaattaagcatacctttcaacagaaatcttgaatcagtttgaagtatgaacatatatgccctaactattccgtattaacactgaattagttagtatatttcttccgttcaagctacgtttgtattatcactgccccttggttatcagttaagctttgcccgctagatgttttcttacgttttttccatacctacaaatgtatgcttccgtatctgaggaagtgttagttttcctgctctttttttggcagattccaggactagtaaatgtggattttgcagatgttaaggcagttatgaaagactcaggaactgcaatgctgggggttggagtttcctccagtaaaaaccgtgcagaagaagctgccgaacaagctacattggctccactcattggatcatcaattcagtcagctactggtgtagtgtacaatataacaggcggaagagacataaccctgcaagaagtgaacagagtatcccaggtactttaagaattaattagatctcaccatgatttaagttgaagttcatgtacttcttgttagagccaattaatatgttctcttgctctctaacgatatgtaatgatacttcctagtttttttctccaatggtgggcttttcttgtgtttctgtgtagcaggcttttcttttgtagtttctcgatttcccatctgattataaatgcttatgcatcttcaggttgtgacaagcttggcagatccttctgcgaacataatatttggagctgttgtagatgaccgatatcatggtgaaattcatgtgactattatcgccacaggcttctcgcagtcgtttcagaagaccctattaacagaccccaaggcagctaaactagttaacaaattagcaggaggtcaagagagcaagggagttccccttcccctcaatgcattaacagctcctactgttccatcaagatcatctccacgaaagcttttcttttagttcctttttatgatcctgtgctcttcttttccctgtgctttcctaatgatattaaaatttgagttttcttataatatttttctggatggaagtgccattgtttggcttctccaaagtttgtaattaaggtgactgaaacgagcagatgtagatcatttgatgtaagaaatgaaaactgcaacgaaaccagtggatctgaaatagaagtaaaattgttttcttctttcttaaaattggttgttttagagctcaaaggtcagcaagtgatttgtttttttattatgctgctgcaaggttacaataagttattataatttatgcctttgaacatccctttggtaaattatagtttctcaagtacattagtttacatattcacatttataacctattacaatcctcatacaagagattaaaattcaatgacctattccagttaaacttatgattcacataaccttgacagtagattcgactgatcaggaatcaatcacaagaagagggctaactcaggtttgggagtaaaggagaacacactttcaccaaaaatttcaaacaatgacgccagtaaatgacctgcatccatatcctctttccaagcctgagcaagaacagaagatttctttgtcatttgacctcccaactctcttgctggcaagctttcatttgttaacgaccgagacattgatgatataacaccctgggaagccacaatgccagttgaaaatccaccttgcatgtcagtttgcaattgcatggagttaatcgccatgccccccatgcttccatctgtggctattttcttgaatggcggttgctgcatcgaattgtctgcacttgctttgcgtttatcttcattaagaaaaagaagatgagcacgaggatgtgaagataagaaagtatagatcttacagtaaagaaacagataaaagtagtagtcatatacttgtctttactgttgcaatcttcccattgctcttcaaagtggcacgagaaggaggcaaaaaaatgctacggaattttttcagcttatcgtgcatgcactgaccagatgcacactagaaagtaaacaactttgttatttcctgagacacttcaaaatcaaagcaaatattgaatattatatatgtgaaattggaatttaccagcaaggctccatatacacgccaagcttcatgcctcttcatcttgtccttttgcttctcgagtagcatttctggttcaagaagctgcatgtatggctcgagatttggtagaacaagcagtcgaacctgtgcagtgcaatgttggaaagcattagaaattgcacagactacactctaaagcatgtcaaaatataagacagaaggatgaaacacagctgctgatgtttcaaaatataagtggccacatataaaaaggatttcagtaaaccaataaagattttacaataatgcatattttaatgtgttcgtcaaaaaacaataccacacttggaccaagagctgctagaccttggatagctccatattgctgaggtaatgcttttgttgggtccaggaaagcatgaagcagagttctagtcacgcgcgactgcagattgtgataaacgtgcccaaatctgtttgaagaacaaaagaaatactatttcacatagttaaaggaaacaaaagctgacggttatgatataatctgaaccaaatattcaaataacaataataaaaaaaaaaatacttctactatatacttcttgaagttgaaaatttcatacatccgaaaatataattattgcagatttatttattaaacataaacataataagaattatgttttatagtaaattcagaagttataaacttgtaatccagtcactattcaccaaaacccaaaagaaaggtttgaccttttgcaaattgaagcaatcaggtttgcagcaaagtttctcagctcccaatgattatcagaaaccctattcccaagtcttttagcaacaaggcatgtgactacagatggcattaactggtgaagctgaaaataaagtcaagtggtctttttttagagtacgcaacaatagctcatcattgatggtcaatgatttgtaatctaggcatccta

SEQ ID NO: 18379 - DNA, 3551 bp, Cannabis sativa
aaaaaaaaaaaaaaaacacacatttttttctttttaaaatcatgtcgtggcgccattgaggcacaattaccgttgcagcgccaatgttgggcaccgtggcgcctgacacacgagagtagttagaatcaattcctttgattcgattccacaccctatttctgataattgaccaatttgtacattctaaatgtcgaaacttaaaccaaagaaaacaaacgtaattttgttctaaaaactaacatttaagaagaaaataaagactaaacaataggctaaaaatatcctaacaaactcccccaaattaactccttactcgccctcgagtaagacaacactaaatacaaactaaaaactaacacacaaacaattaagcctctattttattcacaaactattgtcaccacctgcaaaacttgaataaaattttcaaccagaattttaatttaattactctaacaattaaactagatgcatccattggaaagtagtgtatacatacaaattacaattcaacaattgaacaataacataaaaaatttcctctttctaacttttcacaaaccagtattcaatatgcttgcatgtctttcctctctcctctaatgtcaacaatacttgcttggaatcaacaggactttcaaagttataatcaaatggcttaggtaaagggtagttgaaaatcatttaggcttatattatactataagcacaatctgaaccactcaagcactcagatacaaaacacactatcccataatttaccaagtttctaatgattgagagcttactaataatatttccaacatcactttatttattcaacactttttttctttttcttttctttctcattttttaattttaacaaggaagataaataaaattagtgatgttgaaaaatatttttataattcacacattaatctcaattacccacttataataataatttaacccacatacaattcatctccccaaaacttatttctaaacttatggtataattcaaggaacaaaggaaaaaatgtaagtggattcaaagttatcttcataaagtggttaaaaataaatgaacaggataaagctcaaacagaaaaactagggataatatagataaaggtcatcttgaaaaggcccaaacgatcaataaaaaattgcctaaattatattccaaacaagcattctcgagattttcgtctcaataattaattcatgtaagttttatcttattcaatcaatcttaccacaaaccaaagtaaaacttgtatgatgcaattcaaatattgaaaatttacaatgatacaactatttctaagaggcatccaaaataatccaaagagtagtcaagtcaagcacacagtttaatttaattcatcctacaagtaacaatagtaattatccgtccatatcatcgacttaattcaaacacacaaaaaaacaaacaactaaaataaaataaacacaagctaaaaataaaagaaataattccctcccccaaaataaattcacattgtccccaatgtgaaaaacgaaaacccatgagagagagagagagagagagagagagagagagagacttacctaagaacccttgtcaaaaggggtttggtggtggcggttggtcataagagtggaaccacagaggatcatccacccctatagaccaagtctagatcaaagtattcaactgcctcacttgcttctcaacgtaagcattacgcttaaccatgtagttttccatgtgattattttgttgaatgatgtagttcagttggtcatgagtgtatttcatggcagggtcaaggggacccgctagaacaactagctgtccaacattgtcatttggttgaggttgacagcgacctctttgcgaaggcgcttcaggaggagcaccatacatatatgatgccttaaggcagagaactattgcatgagttattttcctttgcggtgcaactctagtatcattatagtagtgaggcacatcataagttgcacacaaattagtaatagcccctgttagacccaaaccaccaatagtagtatcttcgagcatgttgccaatgctattctaaaagtaggtcccaacattcaaattaaaacccttcataatcacataaacaaccttcaaccgatcaagaaaaatgtaaaaatggttgttaggaatcagtcttgcacttacaaaatacaatcatgctttagccacctgattgagctcataacagtacatgaaatatggattcacatcatttttacggagcatagctccatgataccccaatgtttcacccatatccacaaaatccaaagtaccacttaaagttgtagatcttcctcaaagaaagtaagaaggtcatacagtttatgaatcatgtgtgcagaaataggaacatacttacccctcacccttaccatttggctcctcctctttggccaattagcaaagaattcataggccatagtgttattgattttctccaaaacattaacaaattgtccccattgcctctagtgcccaggttgacaatcaacctggtgcgctggttttgatcactcaaatacaaatttttctttaaacattctctctaaaatggtcaaaaatgagttaggtggtatcgtcctcaagttcaagaaccttgaaagtgtcaaaacaacatctcgaaagctccaaaataagccctcaatgcccaggttgacatatggcctggtgcgctgggttctacttatctaattttgatttcatctcgaccgtttgtctagtttttcatagtgactgagatctatgaagtcaaaaaatcaaattcacaacttcatatttccacttttccaacaaagtgacttgttcgaaaattggggagttttgagtctctcgtttttgtaaagtagcaacatcttcaagaactggtaaccaactttactataacataaaaaatggctaagtgatgttgaaatatcactcaggcatcaaaaaatacatcccggacactttttcttactcacccagcttccaggttgatgtcacatatatcaacatgggctctggatgtcaaccgggcacagggatgtcaacctggacattgggcccaaaacaaccttcacgaaaatggctataattcactaaatatcgatatgattgatgcgattaaactttctttttgaagccatatcaatgctctatcaagtcatgtctcttactccaatcgccattctaaaattattaactccaaattttgtcctcaagagggttacaaatttaaactacaacttacccgaagtgggtcccacagacgcgactcaagttccaaaaattaacgaccaaccacgaagtcagtttctattagatcattatcaacggtcaaaaatatcataaatttatttttccatattttttgaaatattttattattatattaataggacctccttccctataaaaggagagctcatccggctcattttttacattcagaaaagtacccataaggtcagaacatctctctctaaaaattaaagctttcacacttagctaattttcttgtaattctcgtgag

SEQ ID NO: 18380 - DNA, 8018 bp, Cannabis sativa
tggaattgggattaaggtttctagaaaagaaaatgtaagtggaaaagaaaacgttatatttctatcatattagtttggccaaagataacaaaagagaatagataataaagggaggaaagctcacttaaataattgaatattaaaaagtaatcaattcaaaataatcgatttaatttggtgtgaatttgatttgagttattatacagattacattatatttaaaatataacattttgtacttaagtagtaaaatagggcaaatcatatctaacataaatattttataaaaatataaatgatagtaattaatattaatgaaattatttaaaatataggtgacatggcatgacatacgtatgtgtgcaaaatggaggtgtcactaccattaatattattttattttataaaaaatataaaaaaaatttacaacgcaccctctcaaaaagaatgtattgatgtatccctatttattttggtattcaaaataatcttctaatcaaatttttacttatagttatataagttatatttatttaaaacatcttacaaaattttaataaattcaaaaaaaattacaaaattttaataaattcaaaaaaaattaacacaccgaaaacaaaattcaaatattttgtgtattttattgcacacatgactattttttttaaatacgtgtaaaataaattatttgaatactgcaatctatattttaaattattttaaatttctcaaaaaaaaattaagatatcttaaattatgggtcttcacaaatttatttggtctgaatttttaattttttcaaattaaaccactattacgatttttaaaaattcaaaaccaaccaatgagattatcaaaccaaacaaaccgaaccactcaaaaacgaattgatttgattcgaaccatattttgtattttgtagttctaattttttttacaataattattcattttttccaacattttttctacttttaataaattcataatacatgagtaacaatacaaaattattatcgtaacaatataaactcaatatcaatattatacttaaaattgttcccaaatatcaatattttgtcccaaaaagaatatattaagtatatatatatataataataataataatacgaattagtttagtttgaactgctctgaaatttttaaaaccgtgacctaaccaaagaatttaaaacaacccgaattgattaaattatttacaccaggttcatttagtccaatctcaaatagtttagtctaaattaattagagtttaaaatcacaaattacagattatatgaacactcctatcttaaataactaccatactacaaaataaactgatagagtacatcaattcattttttttttaaaagatgtgcattgtaaaagcactcaaaaatatatataaatataacattactttttttttccttttaaaagaatataaaagattacttaatcttatcatatcaacaaataccataaaccgcagtcgttagcaacacagcataaaatgtacgagtctcaaattagctagagaagaccatttgcatttacaagtgatgaatatgagctttttcttgaaaaaaaaaagtacaactagaatgaaggacagagtcaactgtaaacaaaactgaactgttccattaacttaaataaaacccctaagtacaaataaaaacagaacatattttacaggattaggaaaacgagtcacaatacttttatgttttcgattaacccaccgaaaacatgattcattgtgaaaacacacaatcgtgttgcatggcaaaacttcccctctaacataaattgcaacagaaagaaaaagcaaagcaaaatgttactgttcaaaagagcaagaaaatatataacgacgatgtagaagaaaacatgcaaggatttacaaaaacgttgacctcaaaagccaccaacatgttgtttggggaatcctcctccgtatcttccagaaacactgcttccataagatggaggaggctctctggaccccggacagtctctagcccaatgcccagtttgatggcatttaaaacattcacctgagacattacccacttggccagaagatggtctattagaatagccccctccaaggggctgtcctggaccatttactatactcgggcagttcatagaactatgaccagtagccccacaactattacagctcaagtatgaaccagaagatgtaggcgcagaaagcctagaaccaccactatattgattaccgtactgccccacttgatttgctgacgcaacaaattctcgaccagcactcccgatattacctaagtcaactggtgtggttaatccagggttagaagtgaatgtttctaccttcggagcagagccaaaatcctctcttttcaacttctccaacatatccagaagaactctggcctcagaagaataacacaccttttctgctttcatcacagttgatttaacacgttgttcgtcactgtatgtttcctctttgattttcaatttaaaagtaaacttggtaaataaaacctttcgaattatttcagcaaatttgtcctcatcttgatcttcaaatttcaagaaatataaatctttagcagagacacccattatttcatcaccaccctcctgaaacgcagtagcccatgtcaagccagtatgatcttgtatttgtaactggagtatgtaccggtagtcacatgcttcgatacactggtcacatctctgacaccgccatttcccgtctccattatttgtgacttttttgttgcattggcgatcaccaatcataagaggacatgccgtatagcagaaattatcaacctttatgaaagaaacagtggcactaacagttatccaatccggcttctcagaagtccctaacttctcatcttttatctgagatatagtttttcggacatctgttctacctgaacctactaagtctctggaaatagagacagatggggcattcttcccttccttgtcaaaccattccttcagactgtgggcctccggaaaatcaggctctataaatagctgacttgaagaaattgtccccacaactttgccattgaaatcactgattctaccagatttcacagccagaacggggaaaactccagagtcacacatattctgcagtctttgtccttctgcattgcaaaaacctccccacaatgttaattcaacacttcggccagacatgtctttcaaatgaagtgccctcttttgagtctctgtaccattttttctcattaatgtggtggcaggactaatagaggacacaacaccaattaaatccactatattgttgttctccatgccctctacatcacttatagaacaaaaatgaaattgctgttgtggaattttattatcatcctcaaaacatggctggattgttgatgtgctctccagaaaaatctcttgatcattgcggagatggttgaaattcttctgtgcaggttttaaactacccttggatatcatatatattctaccaacttcaatctggttgtaaaactgatcagccacagcattaaagcaggttgcccgtatttctccaccctctgaatccaaaagatcaaaagaaaataccttcccatcaccacgagcattgttgtagtgcctgagctctccctttgctgtcactctagccttaattgtccatcttccttggtaaggattgagtgcagaaatcggtattatccttgcaggtgcttcatttttggctactggtcctctattactatacattgcaggtggcgattgataagctggctgtgcagtgcgcccataagaatttggtggtggctgttgatatgaagctggcggtgtacgaccataagaatttagaggaggccgtgaaacctcaggtctaggactgcggaaaccgaggttctgattaccatatgacccacttattggtgctggctccccaactcctgtgttctgataactatatggcctatcaccaagctctgacttagcatacatggaaggcatattattcgtcccataccttccagaatcaaaattactagaataaggagtgccaaatgattgattcatcctagtgttatccatagacatcccgaccacagtttcattcactgccccagcagaaaaactactaacaccggtcgattgagcatttctagtaaccaatcccgaggttggtgaaattccaggtcttgttaccagttcaggttcaccaattagatcacatgtttcaagtaccagctccagatcaactatgatgatgatcctgtcagcagtaaatgagttataaaacccgaataaataatgataatagaaccatcatcatcataattgacaatttgaatagcataagaatttccttttaagcagagcaatggtaaatagagatcaatcaaaacagctaaaatttgaaagacagacaactatgacaacataataaagaaacgaaaacatatacatgcaaaagctatattcactggagagctatccaggaaaataacaaaactaacaaaattgtccaataacccattacttaactagcaatagttttcacatctttgcatttctttaaagccgatttcctcaattcattaggttgactactttatcacaagaagatgagaaaagagaaaaattaagatgtgatactaaagaattcgagaaatagacccaacgaataccccaaaaaagtacaaattcatcagctccttatcagtatacacaaaagttctacaatgaaacttagctaagcgaagcatcttcctaaaaaacaatatcgtttgttatgcaattcaaagcaatgactttaagatttcatacagaacattgagcaaatgattgacacaaaccataacagagcaataaaatattgtcaaaaacaaagaaattagagaacaagatttaataaacaatttccaaggcgaacataaaagcatgaatgcccttaaaactaacaaatcaaacataaaaatgataatatgtatataaagactcaatatttcatccgcgtcaatcaattaaaccctaaaatcccaaaatccaagaattactgttgaaaagtaaataaaaacacaaatataagaaacaaataattgcaaaatgccctctgcgtagttcactcaatttaacccaaacccgcaatgtaaccacgaaaagttataaccatatctcaacacactgaaaaacaatgtaaaccaatgaaactacatatacgaacacgtgcaaatttatagagacaaaatagagaagagtatttgtgcttacaatcggccttggaccggagtgcagacaaattcatttaatcgaataagagagcccttctgcaacctcccttgtctgacaagatcattgacctgtgtccctaacatcccttgttgaaaatgcgaaccatcagagagtcgaactctgaacctttccttctcgggaggcacaggttgacctccttgcgtgttaaccatcctcaagtccaggatttgaaccaccggcttccagttatcttccttgcggaattcctcagtacaaatcctcgtaatcgcaccttccgtcagcgtgaccgccattgccgctctcgcgcgtaaccagagatggatgaaagtatggcctttgaagtacgaacgaagaagaaattagagtagaaaccctaggaaagaataatagtgggaatgtaaagaagcgccagaactgtatttttttttgagtgaagagagaaaaccgggaaaatggaaatgttttgatattcctattatgtccctatttctttactcattttatagtgccctctggcttgctctgcttccgaggtaagcaatccctttttattacacgtgtgagatctagtggaaagtggaaaacataataagctaaaaaatgctaaacgtatctagtgttggaaatacgagtcgagcttttgacatgatatgaaagttgcacgagcttagaaggcacaaacatgactaggcacacaaaaaatatttgggcatgacacggtacgatgttacaaattagtataatacaatacgaaaaatatattcttaagcacgacacggcacgaaaggcacaatacgtaagcactaggggtgctcatcaaatcgctcaaactgttcgcaccgcaccgcaccacatcgcaaaaaaatgcagtttgaaattctttgttgtgcggtgcggtttgcggttttgaattagttcaaattgcaccgcatattataaaatatcaatttttatatttatttaggtccaatatgtgaatgtctagcccaaagcctactaataattatattgttgaagcttaaaatttgatttcatatttattttcaagtcttatgatatttttgacaagtgttgctcacgctttgttgtgtttgtgatagtttaattatttgatgatagtccaaaccgcaaaaactgtaccgcaccattttttgcggtacggtttctgtattttttagtttcgcggtgcgggtacagtttggaaaattagaataaccgcatgtgcgggttggtttgaaaaaatagtaaaaactgcaccacccgcaccgcaaacacccctagtaagcacaaatagactagatcaaaaagcacgacacatgaaaagtccaaaaaacacgacaagacatattaaaaatatttataatttattaataataataataaaatatgaatttatcaattataaataagttaaaataatattaaaatttaaatataatactaaatattataattttataattaaaattattaaaacatgaaaaattaagattatatattaatttatttatagggtgtgatattaaaatttgagtatttataagtaaatattcaaattctaacaatgttgataatttttttgtatgattatctgtagaatattgttcaaaagttatataaatataactaaagttttaaaatatacatataatatagtaattataaaaaacatatataaaaaagtaaagcagtaatttaagtccagatatgaaaatggactggtctgtttaagaaatacgggccagcacgagcgaaccacggcacgaatccgagcacgacacgaaaatattgggcttacgggtcgtgtcagaccttctctttaaaaagtaggcacgacatgctccatatttttttgtggcacggcacggcacggctcgttttttgaaaaccacgaataaatacgggtcgggccaacattacatgcacgaacttaccgcactagtatcaatggtgtctagcatttttttacgtgttgatattgttattggtataattaagtatcaaatctcatataatttaatgtaataacttctacagagaatcgttaaccaattataaggtgacacattgtaatgatcgtgtagttaaatcatgagaattagcacaaatttgaggatttaattattaatttatggttatgtacttcttagtaggaaatagggcttattgtcagaaataggccatatgaaaataatttctcaattacggacatatatttgaatgctcattgcattatatatgttatatgtgaatttttatgaattgcatgttttatgtctgataatagttgaatgtgacgatttggccattagagtcatttagataaacatttgaaatatcgagattgtttaaaattatagttttagaccatttcacccctagactatttaggttgctttatggttaagtaaggacaaaattgtcattttgccctaagatttcaattattgtttttaatggaattctagtaattccttagttagttcatgctggatatatttagagaataagacaaaagagatttagattgtatttttttattcaagagataaatcaaaaagaagaaaacccttaccctatccctttctctctctgggcctctctagaaaaccaagcaagactggaccatttcactcctgttcttgatgattacagcaagatttgaaagaattttcttgggtgaattcaaaagtaagagccctagtttctccattcctttgttttctaggttttgagct

SEQ ID NO: 18381 - DNA, 2405 bp, Cannabis sativa
ttaaagtgagttgtatctattcttttccgaattgcctatccaccaaaatctcgcaaaaatcctgtccagttcattacagagagtggtgggcagtaaagaagtggacataaagtagtttgggatcgtctgtaataccgaactaatcagcacagacctccccgcttgtgccaattgtctcgctttccaaccttcaagtcgattcgtaattttctccttgaggacatgataatcactccttttacttgcagaaaaaggaagggtttcctaaatacttctcgctagatttcaaacaaccaatacccaccctttgcttgacttcatcacgacatcttctcgtagtgttaggagaaaatatcaaaccgcttttttgcttgttaactctctggccagaccattcttcgtagatgcgaatgcatttcaacaagttctttgaatttgtaatcgtagcattacaaaaaaagattgaatcctccgcatacaacagatgtgtaattggggcagtctttctagcaatacgcagacccgcaaactgtcccaatctttcggctttagaaataagcttggataggacctcgctacacaaaataaaaataaacagagagagcggatcgccttggcgaatgccccttttaggattgaagggagctaagggcgccccattaagtaaaattgagaaactgacagtagtgatacattgcattatcaaattacacacctttgtactgaaaccgtttgccaccagaacatgacgaatgaaatcccactcaagtcgatcatacgccttgctcatgtctgtcttgatcgccatggcccctacttttccattcttattcttaatcgaatgaagcacttcttgagcaagaatagaggcttcagcaatccaccgccccggcataaaagccgactggcaaggcgagatcagtcgatgaatgaccactttcaaccaatccgttagaatatgagatataaccttataactgaagttgcacaagctaatgggacgaaaatgatcaaattgcgatgcctgcgccatcttgggaatgagacaaataaaggaatggttaatctttttatcgagaaccccagtagcaaagaaatctcggaccatttcgcatagttgggggccaactgtgtgccagtattttctataaaaaattccaggaaaaccatctggaccaggcgccttcaacgggtgcattttaaacaccacctcctttatctcttcaacatccggctgtctccccatgaaatcattatcagcttctgcaattctttccacaaacaacggggcaaactcatcatcaatagagctacccgaagactcaaataagcttgtgaaatggtaattgaaatagtctccaatagcatccctctcactcaaccaaaccccaggggattcttctatgctgttgatggaattccgtctgcgattgataatagtagaggaatgacagaattttgaattggcatcgccaaaccgaatccaattttcatgggacttttgtctccaaatcctatccatcctaccctccatttccaagatttccaattgcacatcggcttccctctgtatattatcctgggtaatagcagctatttggatatcaaccaattggcgtttcaagctcaccaatcttctatcacaaaacccaaaaacttcctggttccatttcttcaaatcccatttagtgttcaccagtttccccaccaaaaactcaccccgattccacgcacctttgacgacaacctcacagtctgtctcctgtagtttgcaaacagattggggcatggtccgaacccaaaatggggaactttaccacctttgctttttgaaattcaatacaccactccgctttcgctaccaccctgtccaacctctttcgtattcgaccactagaatttcttgagttttgccaggttgcacaaccaccttcacaccccaaatcaactcctccagtgtcaaataagaagtcacgtatcagctccccttccttatcataaaaacgtttgcctccctccttctccgaggcattcataatcacattaagatctccaaatactgcccaatttgagatgcatcccttgacctttgtagtcagccactcccagtactcatacttcagtgacggatagggcgtgccatatacacaatacaaaaaccatggttcaaaacatccaagagaaagaattctaacacagaaccccgcctcaaaaatttgagtaatcgtgcaccctctccccgatttccaagccacacaaaaacctcctgctaaaccaatcgccgggatacaacaggaattatcgaaacccaacctattcatcacctgcaccattgaagtctcgtccaccttagtctctgatagaaaaatcaaatcagcatcactctccctcaccaaaccccgaag

SEQ ID NO: 18382 - DNA, 3901 bp, Cannabis sativa
gtatttgtgtaataaaaccaactttgtaagtaaaaatgtagacataggcgtgtagaggtatttaggtaataaattgtgcaaaatggatttttcatgtaaaaatttctaatattttagctcgtcgactagttagaagtgttagaatttctaatcaaggtgtttgtgtaatccttttaccaatctttttctctcaatttcaattaacttattgttctataaaaataaaaaagaaagaaaaaatgaaatctcatgctagcaactaaaaaatagttgtgcattttttattacttcgagtgattgagaaatgatcatgagattttataaatttttttttttatctaagattttataaagttttaagtatatattttctctatttatttttgggataattagataatatttcttgtatttttttttatatttttatgtttaaagatttttttttacatttttatagtatttcataaaaacaacaaaaaaaaaaaactataaagaatagcaaaaaaataataacaaaaaataacatacaaataataaaaaaaattaacaagattacaacataaaaatatatcaaaagacagtatcttctgtaaataaaatcgtaaaaatatttaaatatttaaaattctatttttgtattttttttttattcttatgcatttgtgaaataatttttttatttttctcagtgtgattttgtaaaacagctttcttcttataattaattttgttttgataactttttacaaaatggcatcaattccaaacaccttgattagaatccaatttgagaccatttaaaatatatttattacgaagtgacattatacacttaacatttttgtaaaattaattttattaaaacagaaaaaaatgataaatattttaaaattcataccaaaaaagggttagtatatttatattattttttctttgaaaatacacctttcattgaacaacacattttggtatctaacagagtctttatcttggggacaaggcaaaacatcataaggaaacttgagtggtctttctaaccatcttttccttcaacaacaaaaatttatgtatataaacatattaacaagcaatgaatatatgctttgctcatatagacacaccattattatcctaaaacccttctaactccattatattgatttgtttgtatctacagaacctaatttccacctctcttatagttcattttttttttctcttgtgtctcatatttgatcaatggagttagaattaggactcaaaatcaccaaaagtacagatgatattacttccaccaccaccaacctaaggatagcaaaagactcctcaggccctgtttttatctctagggaaactgatactaagttcatcctcactgcccatctaaaaggtcagctgaaatttattttatacatataacatttctataaaaatatctaacccattcacaaattcatgcacttttttttaacatgtaatatctcatatagtctaattaataaatgcagtgatcctttattttgatttacatttcaggcttgcattgcattgttgtgtatgcacacaaatgcattgcattatagggtatccaatatgccttagtagggttagaaaaatataaagaaaaattattggactttttattagaaaaatatgtagtatttttaaacattattaaaagacatgtatattttttttaaaaaaaaaaataggaattgtcctatactattttttaactgttttttttttaatttacagtttggattgttcttgtggtttttatgttggttactatgtaaattttagctgcgattttagttgttctgttgcttactatatgggttgttatacgaatttctgtaaaaaagtaaaaaaaaaaaaaaaactgttttgaagtgtaaaaaaaaaaattcttaaaaaaattagatcctaagttatagttcttaggcacaggcttagcccaccttaactcaaactcgattctcttgttatattgcacaatctaaagtgcgatcccaagaactcacacacactttcccataactccatagccacttgtactcattgtcattcctacttattttattttaataaatagaacacaatacaaaaaaattagcatttgaagtctaaaattatcatttaactattattttatcaacatttttatgttttggttctatcatttatgttaacgatatttcataatagttattaaattaaaatttataacaccgaatacttaattatacgaatagtgttttatcttattttatttttcaaaaacaaatgcaggttttgtaagagaacaaattgggatcaatatcaatgaagaaggaacagaaatctctattagtggggagaggccagttaaggagttggtaatgtctggatggatgatgcagaagaaggaagtggagttgaaaggattcatcaaagtttttcgcataccggatggcgtaattttggatcgaatcaaagcgaaattcaacaaccaagaatctgttttaacaatagtaattccaaaatcaagtaaaggaattagaggtgttgggattgaagaagtgaaagaagaagaggttgttaataaagatgagactgatcatgccactactagtgaagaacaaactcataagatcatgccaagaactgaagaattgaaagttgaagaaaaaatagagggagcacatgatgtgtttgatgaaatgtctaaaagaaatgagacaagaattgaacctgagattataacaaatgaagaaacatttcaagaaattaagccaacacaaccattaccaagtgaagaagaagcaaagagaaaagagttacctgaaataaaagaggagacttgtgaagagggtttggaacctgttcatgtaatagaagaaaacaaagatgaagataaggaatgtagtagtagttgtggtggtgatgatgatgagtctgccatggtggaaaaacaggaagcaattgaagaaaagggtaaggataaagcaagtggtggaagttcaagaaggattaagttgtgtgttccttgtgtcatagcaggttctaccattattgtctccattgttgtgtttgcagttcattggatcagaaccaagaaaagagaggttcactaaacttagaattttaacttctttttttttcatctatttgagttgtgttaatttgaagcacatagttcttcatttgcaagtgatgaaatcaaattctcttatcaaaacttttggtacacaaataaatgtcaaggctaaaatatgaagaagggttgtacaccaaaactataatccaaggtttttttgccaggaaaagataatataataagttactaatttagtgtatagtttgtaactagttaccctttatatgttcttgttaataattatataattaattattataacatatacaatataatctctacataagaagaataccttattcaaaaataatttttaattttttataaaaaaataggtgtcaaattagttataaataagaataacctccaaattctaattagttatataatttttaagtttcgtattaaaataatatacatctatataaaaataataaaatattcataatatatatatataatatataaatttatttatgtaaaattaataattttattttaaattgtaatagatgtataaaaattatatttactcaaaaataattttattataatataatattaagaattatttattgtgatgttgttccattaatatattttggtattttaatttttttttaatgtaattctattttatttaattataatctattttacttagtctcaagtttatttttatataaaaaaatttctgtactatctaattttgtctcaattcacacatttatgtttgggaaatttcaatttttggcc

SEQ ID NO: 18383 - DNA, 4066 bp, Cannabis sativa
ttatgaacaagggaagtttatgttttatgttgactatataatattatatcctctttctaggattgtctcatgggaatgctcagagaaaagactgtactttttgttactcaccaagttgagtttcttccagcagctgaccatattttggtaagacttgctgtaagttctgtttttggaattcttattctagaattacatgtttacaatacaatgaataagcttgaagcttatatcaatttattcatattttatactttttgtattgaaactaacttaagttaaaataggtaatgcaaaatgggaaaataacacaagctggaacatttgaaaaactcatgaatgaaagtattggatttgaaattttagttggtgctcatagcaaggctcttgaatcgatgctaacttttgagaatactagtaaagaacagaaaataccggagattgaatccacagcagcaagttccacaactaattctgaagttttacccacacggcatgaatcagaccataatatctctcttgacatagcaacagagaagaaaggggcaaagctggtacaggatgaagaacgagagaaaggaagcattggaaaagaagtttattggaactatttgacaactgtaaatggtggattgcttgttccctttataattttggcacaatcatcatttcaagtactacaaatagctagtaactattggatggcatggtcttgtcctcctactactggaactcaacccaaaatggaaataaacttcatcttattagtttatgtattgcttgctgttggaggttcactttgtgtgttgttgcgagccatgttagtaggaattgcaggactttggacagcccaaaagcttttcattaacatgctacgtagtgtgttccgagcaccaatgtcttttttcgattcaacaccaacaggcagaacattgagccgggtaacattattattaatttataaatgtattccaaatatgttatcatggttgaaaaatataatatgataaggtaatagttatctatggtttcattattctattttgtaggcatctactgatcaaagtgtgttggatttggaaatgccacaaagattaggttggtgtgccttttcaataatacaactactaggaaccattgccgtaatgtcacaagtggcatgggaggtgtttgtaatctttattcctgtaactgcagtttgcatatggtatcaagtaagtgtttttgttattaaaaaacattattgttttcaattcacataaacttatgcatcctagttgatacattagaatccaaaatactgagtaatacaaaaaattaaaatggttaacatgttattagagaaagagaaagttttcaataagaaacatgtggtttctcacataacgagagatgttatgagaaagaacaccatgaagtcattttgattgcactattgggttcttttcacaaaaattagctagatatgtaatgagacaatgatcattactttcagcgatactacataccaacagctagagaattggcaaggttggaaggaatacaaaggactccaatccttcatcactttgctgaatcactatcaggctctgcaacaattcgtgcttttcaacaagaagatcgctttattcaactgaatctttgtcttattgacaatcactcaacaccgtggtttcacaatgtggcagcgatggaatggctctctttcagactaaatatgctatcaaactttgtttttgccttctcgttggttttattagtcacactaccagaaggagttatcaatccaagtatgtttcaatcatgttatcactaattaaaattcagtaaaataggaggtaaaacacttttaaaatgataccaccattctttggttgccccactttcttttttttttttttgaacaacacttattcttctccttaattacttgactttctacataatatgtatttctaaatgatttttagtatataattcacaagcttggatattagtgagattgatttttttttttttgcaggcatagcaggattggctgtgacatatggaataaatttgaatgttttgcaagcttctgttatttggaacatatgcaatgcagaaaataaaatgatttcagttgaaaggattattcaatattcaaacattcaaagtgaagcacctttattaattgaagattgcaagctaccaaacaattggccacaagatggaacaatttgctttagaaatttggaggtatactttctgtgcctacaataatttcaagagtaaaagatgattgaaaactactagctttcttattttacaattctactatactaacaatgatactaactaatagataaaatcttttcgagaaaattaaataaaaaaatccattggttactatcatcatattttgatggatatttaatgttcatgcaattaatttattgcattgtagattcgttatgctgaacatctcccctctgtcctaaacaacattaattgcacatttcctgggaagatgaagattggagttgtaggaagaacaggaagtgggaaatcgactcttatacaagccatattcagaattgttgaaccaagagaaggaagcatcataattgatgatgtcgatatatgcaagataggtcttcatcacttaagatctaggcttagcatcattccacaagatccgacaatgtttcaaggaactgttaggggaaatcttgacccacttgggcaatacactgactctgaagcatgggaggtattacaataaatttcctatggttgggctcttatatcttttaaatgactcgtgataaataattatgtaactagatgaagaattacttagctaagaataaaaagatggagaattacttacctaatgtatacacttgaataaattaatgtgattcttaatcgtatgaataagtttatttgaccatcatctttaaattttcaggctctagaaaagtgccaactagcttcaatagtgcgggaaaaagagaagaagttggatgccataggtaaggttaattaacttgctttattgctactaagaactatactcaaattatatcctatcgcttaattaacttattgaatagaaaaaaaaaaaaacttatggctttattacactcaaattatatcttctccactaagaactgctctaacaaatgatgcaaattggcatctatgatagtggtcgaaaatggagaaaattggagcatggggcaaagacaattgttttgtcttggaagagcattgctcaagaaaagtaccattctcgtactagatgaagcaacagcatctgtggattctgcaactgatggaataatacaaagaatcatcagtaaagaatttaaagatcgaacagtagtcacaatagctcacagaatccacacagtcgtagaaagtgatctcgttttggttctcagtgatggtaagttcaaaatatatacttctactaactgcccctaatcatagggcactacacgagaacaacgtacatcattcacatatgcttcatatgtacacaaaattaatttaaaccatgctttttcttattaatagttaatacatattctctagttcattgtgataaattgaaactaatgtttgactatggaacaggaagagttgcagaatatgacacaccagcaagattacttgagagagatgattcctttttctctaaactcgtgaaggaatactctatgaggtccaagagtttcaacaacttaacaaactataactaatatcacttcaaatattatgcattgtttagttagaccaacaagttcttaataattatagacttcaagttctctagatcaacataacatttatttaattagacaagactacaaatgattagaagcccaaatgatatgagatcatgcatgaattgcttgtttgttgaaaaactctgaggttatctccatttctgatgttgatgctattattttgatagatttttcttagttagaatttactatctatgatattactcttgagtttgaatctagtaagtttgactttattgaatttagtagcagaattacaaaggtttgga

SEQ ID NO: 18384 - DNA, 2711 bp, Cannabis sativa
ggtagaagctaaaagataagaagaaacaaatgagtgctgtaattattaatcattttcaggtcctaaaaaattatatggaagaatgctcacagatccaagaagaggcagtggaagttggaggtgggggagggagatacctctctgtctataatatctaacaatagaagagggggagtacctcctctaataatgaatagtttatataatgagctagaattttagggggctaaaccaccaaaccaaacaagatgttgtaaaacatctcattcattcaaaaaaggtgggtttagtgggcctcctatagactaaataaagtgaagtcttcaaagttggaagatgtgtatgtaaggatttttttttgttggtgttttttctcgaataatattccgcatcaaggtgggaggattttgataagatggaacccgaccaaagttggaagatgtgtatgtaaggatattttttggttagtattttttctcgaataatacttgacatcaaggtgggaggattttgattagctagaatttgagtatgttttcggtaaatattcagtattgcactagaccgatgcataagataaaaaagaagagtacatattttttgtcggtttttaaatgaagataattattttgtgccatttcaaaaacaaacgctaataaaaaattattagcgattatggtatatatgtcggtttttgttaaaccggcgtaaattcttttactgacacttaattataaatcgacaagaattatactttttgtagtagtgattggattggttaggtaatccaaatcttagatgtgatccaatcaaagttctccttttgaaaacaaagtaaaaaaaatgatattactatttactaccatgagtggtgttaatattacccacgtaacatgaggtatcataagtgtgcgagtaatgatatggaccatttatacaccaaaatattctgttaggtcctttttttcatattccatacccgtataggtggtaataattgtttttaatttagtgggagtgggagtgggactgcgagactacatcgatcgcacggcctacttacaaatttataaagcttaatacatgtactatattaattaaagcaaagaggaaaacaggcctttattatttcttttatgcatttcatgctgctacaacgaagtacaacaacaagagttaccactactatacgtacctatacgtatagctaatgctatataaccaaaaccaagatctgtaagaaaaaacagatcgcaaccagaaccccaatataagcatggtatccgtatatatatatatcttacttgagatattctcactcacattaccatgccatcaaccatttccaaaggaaaattacgagaagaacctctagggcaaaacacaaccctgtagtttgttccacctgggcaagtgaaagtactggtgggatcatcttgaggataactataagcatcgggacacctcgtcttgaagaacctcgaaaagtttgtaggcccacatgacccacgcccattgttgcaacaatattcattggtcttaaaaaccgtacaagggttattgcaaccacctgcggttctcagctcacgagggcactgtccattgatgtcagctgtgcaccgtattcccctgcacgcgccactagtggggctaaactccatgggaatgttgaacccatcgatcacagaaatgtcaatgaaatccatgttaccgaactggttgagagcgtattcggccaaggtgttgggaggaacaccccatcctttacactctaagctcccacagtctccggtttcgcaccggcctcggccgctgccatcaaaatggcaattggtacgaccccaaatacgtgccatggctgtccctggtgccacccataggttccagccctgcccgggatctaggcggcgaccaccgccggggctggcagcggcccagacggtgtagggacagtcattgcggatatcgaaagtggcagcgtggatgttgatagaaaaatggaccaagaggatgaagaggaaggagagggaaaagctggctgagtgtaacattttgttcatttttcttagtatggtactgtgattacttatgctagaatacgtggatttaggtgggtttatataggtgtagaggggtcccttattttgatgcatttatttgtgtttttttctttaagaagataaaagcactgattttgatcatagttcgttagagtagcattatcttttaataataaagtagtggcggcttttgtattaattaaataattttgggaagtgtggtgccgggagggggcggctgtcgatatctaatatatatttggataaacaagaaaaaaagagcaatgccttttaattatagcgtggtcgatggatcgagctataatattggtgaccttgacttaattaatataatgtatagaaggcttgtgaaaactttcatttacattttttagttaaggtgccacaattaattacttcatttatatatatactagtgcatgcatgtggatgcgtgtatattattatataaattaaaatcaaatgaagaatatataaaaattaatttgagaaattttcttaaaaaaaataaatgaacaaataaataaagaaatttttacaccaaaaatacaaaatgaaatttttattacataaatacttatacacggttacctcaacatttttacattttttctttattttattacatat

SEQ ID NO: 18385 - DNA, 3269 bp, Cannabis sativa
tagctcaagtggccataggtaggtatgtgagtgttggagatcctgagttcgagtcccatataaaacatgttgtaatatattaacgcttaaatcaaaaaaaaaattacagtgtacacacaaactggtgacagtgtaaaaacaaaaataaattatgaaaaaatgtcattattgaaaaataaaaagagtacaccatatcagactttgaagtgtgtgtaccgtcccatcaatcttactagttactgtcataaaaaaagcaagctttttattttttaaagcttttacaaaaaccaaaaaaaattcttctagctgaagaacgagtgggtgactcagtgagttgtgttgtattaagaatcggaagagtgaccaaaaaaaaatgtcagtttctgagccaaatatcatggcttccccttcatttactactactcaaccacctactccaattaagagtgataaccctagaagatttcctcaagctcaagctcatgaggatgatttcaacactgtcggtgccactctcagctgcccttacggccatggaagctgtccactcaaggtttctcgctcacaagccaaccctggaagaccttactactcttgctctactcaattttgtagattcttcaaatgggcttcttctgaaaataataataataacaatcacgccaatgatgttgttgttggtggggttaaacgccaccggattcttcctcatgattatcctgattgtcgttgtggtgccggaaaatgtaagcttttgtttgacaaaaatggcgcccaaaattactttgtttgccctattgaaaaggtaacccctttttttcagtttttttatttttctcactctcattgatctgggtttttgtttttttgactaaagattgagtctttgtaatagggacatggagcttgtagttttaaagttcaggccatggctaatagttctactacacctggaattgtgagctctgtgttgaatgaggataatcaagttagctttgagaatcaaaagagaactaaatttgactcaaatgtagttgtgatggtggaaaataataataacaataagaataacaataatagtcctcctgatcaacctgatcaaccatctacacctgtacaaatggggattggaaatgaagagaaagagaaagagtcagagcaagagcaagagttggaatatgtaaacgtagagaaaacactccaagtttcttgtttaaaatcagatacaattcaatttggccaaactgagtttctgaaccagatttctgcagattcaggtattggctttttgtgttcttcagattatctcattgaataattaattggattttatttatatgttattgattaccaactcatttatgcataatttttgtttttgggggagtggaaaaagatcctgctaaacaaatactaggtaggcttgttttgggttggttggggaggcttgcattcccaccttccggaacccttactatgcctcaacaagcaaggcctttcttatgctgtgagtatgttatgttatgttataatggattgtgtcacatttgtttgataattgataatatttgagttgtatatttgcagcataactactcaaagttttgaagttttgagtttgtaaacagcataaatctaataattttttttaatagtataagtatcaaattttagttagtaaaaaactgtcattttcatcaagttatgacttcgttagtgtctcaaatttgtaaagactttgaatttgttgaaagaaaatttggaaataacttataccaccgggttctacgtgtgtgttctgtttaagacattaatagagtttgtgtagatgaaaaatgatgaaaattacagttatactaatattaggtactcttatgttgctaaataaatcattaagtttatgctagttacaaactcaaaactttgggtaattatagtggtatgttgtgttgctgcaatgaacttgtatgtacaattcttatatcttttctttacaggtgtttttccatcattggatccaatctatgtccccaaggccactggtgtgggtgcagttaattcgagagtcttaaatgaatcttctcatggtgtttcagatacatctagacaaattgtgagtcgggattctgaatgcggcggcattttaatggagctctcgagcattaagaatgttggtggtggtgtaggagaaagagtactagatgaattcatgggaccaatctcagaagcgcttggggaagcaggattgcttgtgcaaaatcagctgctgagtattctcgagtccacgaatccagtgaaccacaattcgatgagagaagcagcgaacaagacattttcagtcttgaaacttctctcaattgatcatagggcgttttctgagcgtgtgaggaagttcatttcgtgtgcagcagagtttgctaagatagaagatgagtggaagaaaaagggtgaagtagtaatgtggcttccgggaaagattgaggatttgtatgagaatgagaaggctaagtttgatgagatagcggaaattgaaagggagacgatggctgcaatcgctgcttctgataagggagtggagtgtattgcagaagaggtaatgcaagtgagggaaaagcttgttgggatggagaaagagttgaggcataggaagatagaaaatgaggaactgaaatgtcgagcgggaatgataaaagaggatatggaagaggcgaaaaagaagatggagaaagcaagagcagcaaagacggtgcatgaagagcgagctgctgcaattgaagcattggaaatggccaggcttcaccttagacacaatcactaaacttcaagggggtttggcctagtggtaaagggtcttactcggggatgtctagttaggcgcacggtcacaggttcgatccccactagcgtcaatatttgaggccgctgtggcattcttcgcttggtatgaggtagagggtcgttggattagtcgaggtgggagcaaactagcttggaaatcccaagtttaaaaaacaaaatgtatatgctaatatgacgatatgttaggtatagaatataagataagataggtaatatgactaagtattgtaagttgtaccaggatcctaactaagtaatgttattctgtaaattgacatttcttgatcagtattgtaagttgtatctatttccttttttaagttttcaaaattatggtttcacctagtttagttgacttgaagaattttgtttcaacatactgttttttgaggagggaaaaaaaggtacaa

SEQ ID NO: 18386 - DNA, 3084 bp, Cannabis sativa
agagaacaagataaattacaacatatggctccccattcatgttactaccagtaccaattactctagctagaattggtcgaagaaaagtatacctgtcagtggatcatgcatgatctctgaacaatctagttcatggatgatgtttgatgacataaaacgtgatataaatatgttataatgtatatatattatatatatatgataataataatttaaagaaggtaatagggcaggggtttaattggctttatttgaagaagatgcgtttttgtggaaatgggtagagaaaacatggcagagaagccacgttaacgttgaagtccagctctttttctcaaatgggaaaaggtggcttccatttccaatgcagatccatatttctgccccaatgtcttattatattgtcactttccccaacagcttaattacacgaatctctctcctcctcttctttcactctctcattaattaaaccaatatcaaagtaaaaaataaaaacccaattatttctactatatactacgcacccatcaaatttataacgaaaaatttatattccatagaagaaaattaattcaaatatcaagaaaaatacatacatgataacatgaatgatcgtgatcttaacacattgatacaatttaaattagtctttttatttttacactttaaattagtttttttttatggaaatctacaaaataactaatgaaacaatttaaattgtaattaaaatagcaacttaaataaaaataatatatgaattaattcttttgtgtaacaaagttaaatagaaaaaaagctctctcgttctcatttgaaaaatcctacttacaaattacaactaactaatattttctcatgatactgatcatatatattcaaaaaaatacaaaaagaaacaaactaaaaccaccaaaaaagaaaaaagaaaagaaaaagcgaaatgagatcaacccaccaggactaagataagatgatatatataatatcaagaatcattcccatgtttgtgccagcaaacgagcatagcaacacaccgtctcattatgtaaaatctggccttttgctcctttgcaaggctactacacttgcgccctattgaagatgaagatgaagatgatgaagtagaactactaccgctactactactactattgttactgtttggcttctgagaataacttcgagaaagtgagctcttttgtgaaaaacttcgaagaagaggtgactttgaagaagtgcttcttgtggagctacttctaccaaacccaattgaagaactcccttctcttttagatggcttccatttctcatccatttatatttttttatatattatttgtttctcctttgtaggaagtaatggctaattaagatagatagtactacttctctggacctctgtgtgtaatttctgcctctccaatgtgtttaatttaagagtgaaagagatagaacggagtaatgaggtatagtgctagaggaaagatatgattgagaatgggacattagtaagaggtggggtattgctatatatattaatatataatcctggtagaataatagtgcttgctatttagagagagtactgtgtggccaaatcttctatatataacactttttttttttacctcacctttttttctttcctatttattttattttttaaactttgagtgaagagatttgaacaatgcagtaatcttttaagtttaaaagagaattgggagatatgatatgcttacatcatcattgatattaatcatgatggtaatgatgtgtggaaaaaatgataaattccaaatgcatcaaaataataaaaacaaagtaaggaaattatactgtattttacttttaatttcaatttgcttatattctctatttcaatctctccacttaaatttgaataaactttttgctttttctatcactttctcagactcacttctccttcagagactcacttctccttcacaactaactctctttcccaaacacacacacctctctcttacacatatttataaagaaaaaataaacttaagctccaagacactttaaatttggtcactaagactcattttttaaacaattaataattactaaaatgaaaaaaatacaacttcataaaatataaaacaaatttcatttgagtcaaactctaacaatctccactttgactcaaattctctaaactcacaactccaactacctataaaaatttatttatatatatatatatcaagttcatacgctcattgaatttcacttgagcatttgttttcacatattcctcaatctctcactcattccttctttcttcgaacaacctctaactaaaattgaagtcctctccaccttattgtattctttcattctaactaaatgccttctgtgacttaactctacctaaaatagtcttccccactaatttatacaaattatactttttttgacccttcacaactaccaagccatctttcttgatagttatttcacaatttttcgcagaatagtcataacaacaagtatccaaagctcccaaagagattaagctcatccttaatgatgtaacatgtctcacatcagtatactcacaaaaccatcaattatcttcacgttaatagtacatattctaacaaatttagagctacaatcatttcccatcaaaacaatactaccatcatatgccttgtaagtatcaaaacactctatatttggatacatgtggaacgaacaaccaaaatccaaaatccaagagtcaaaaaattttcaccaactatgacaaatagaatattagagttactatcaaagctttcactaacaacagtggtggaatatgatatgtctttgcattcttgattcctcattagttcaagatgcttggtcacctcttcacaatttcccctaacatgtcttttttttgtgacagtagtcgcatttcacttctctctaagaacgtgaatgagcgcgattgtcttttttgtcatcatgccttcttttcgatgtactcctaccacgacttgattctgatcttgtcacaagagcttgatcagtatgagacatactacttggttgctt

SEQ ID NO: 18387 - DNA, 1241 bp, Cannabis sativa
aaaaaaagttaatataaaaatatatccatgcttcaggttaaatacataatgacataaggtaatacaagtgaaaattttaaaaatctaaaaagattatctattacaagtcctctataaacgataaactcaagttcctaagtttgtacgaaaatgatcttccacttctacttagtctcctctcactccgctggtgggtagcctaactaaaattaaaagtctcatgaaagggagaaaataaacaatgagctaaaattaagctcagttggagtccaacctttttattttgaataaacttttaaacatgcataatttcgataataaaaactaatatttctcaatgtgcatttgtaatattactttatcaatatttttttttttttttttgcatgaactcatcataaaactaagataacaaactcacacaatagaaaatccaaactttgaacccatcagatagtcataactctatgtccaaataataagaccacgaataagtagacattgttattacaaggggaaaatagggaagagaaactccattttattatatatatcttgaatgtgttttacaaagagaattacaacatatatataggctcaacttaatatgtacaaccgaatttaagtataatagaaataactgaacctaactgaattaactaatcctaacagccccttcaagttggagtgtagaaatcttttacacctaacttggatacaatttcattaaaaacagtaaaaaaaggttggtttagtgaatatgtcagccaggttcatcttggagggtgcatggttgagcttgagtatgtcgtgggtgagcttttcccgaacaatgtgataatcgattttcacgtgcttcgagccctaagtatcttcaatgttacatcatttcaccgaattcgtacagaatcttcacatcatttcactgtaattatgcaccaaattagtgcgcaccaaattctacaccattaatgatgtcgaattttaatactaacactaataaaataaaaacaacataacactaagttataaaaataaaaagaataacattaagtaaaataataatttaatagtcaaattaatcacttgtggatcttagtcttgaagaatatcaaaatattggctatatggagtttaagtattttaagaatattgacattcttaaaatgcttaatattattggtgagctctttttagcataatcttttttttttttttttgctcattttgaaaatgatcgc

SEQ ID NO: 18388 - DNA, 4341 bp, Cannabis sativa
  modified_base (4038)..(4040): a, c, t, g, unknown or other
  modified_base (4145)..(4149): a, c, t, g, unknown or other
aatgggcttggacagtaaaaatgtaaagtttaccgtgtcccagtatttttgaaaataattggtaaaaaaacagtatttttgtaagttttcctttctttaatttctgaatgaaaatgggttaagaagagccccaaattctggttttctaattgaggtgtatacctcacaaaattttacgcctcacaaaatctcatattgcctcagccatttgaggtgtctgcctctctctttcattctgaagcgcacacaatagagcgttttctttccgtctcaatatattgcgtgcaatgaagtgcgcctcaaaaacacaattttaaacattgtaaagaagaaataaccctaaactagtaataaaaagtaaataaaaaattaaccataaaaattagtgagtgtaagtatatatatagttactagattgatgttatgcgtaatagcttaattttatattaagttttatatttttgatttttaaaagacttatctaaattgaaaatgatgtttaatataaagtgctaattagtaaataaattttattgaaataattgtataaagtttaatgaattataaattaagtgcaagaagttagtataaaatatattgaatgcaataacaataaaattatgatattgaaatgtaaagcaatgtgtaaagatttgatgattgttaaatgtaaggtaaaatttcaataattaaaagatgattgtttaaagctttgaaagttaagatgaaaagattgtattttttttaatcttttatttagttaaattctctttttcttaattttaataaagtaaggaaacaaagagaatgactacgttacgattctcattacttattagtagacatgagttcaaataaaaaaaacactgattaaaaattaaaagagtttttagtaatgcaagtattttctttctttgaacttaatgaaatacaatgatacaaattcaaaaactcttgcacaatattatgaatcaaacgtggaaagaatcaaaaaatattatgaatcaaacgtgaaaagaatcaaacatgaaaaaatataggccaaaattaaattttattattttcaatcaaatcccactaaatagaaaagacattgaaccccacttgctgacaatgattagagggaaaaagaacatccaacaggttaccttccttgctagaaagcatgtaattttcagtaagacatttcagagtttagcaaacattcaagatcaggtataagagaagtaaggagaaagaattttaccctataaaaaattgattctagctcatattgagttgataagaaaacgttcaagtgacaacaaatgaaaggtggaaaggaatcttaataataagtttttaaaaaatgaaatttggcttttacttttgttatttttaataggccaaaagagtacacacttttacatggagagaaaactaacttcatgtaacaaaagatttaagaaatccaatgaaaactacatgtataaatccatcatacctcataacataaaggatcagctttgatagccttcgtaccttcacaatacaaaaaatggaaattttgtcatgatcattacaatgtttagaatgaacatcacagattttgagatagctagtagtcacattggttactaaaatatattatggagaacttatcaaccaatgagataaaagtatatgtgattttaactatatatcccactcccccttgtaattcttttctcatcactaagcaaagttcatagcatcagtttgtctcatcataaaaattcataatcaactttttcaaacttattcaaaagttcacatttaatcatgccaaacagagatccgattaactaatgatcactattgtacaacgtacaaattgaaataattagtctactaattcaaaaaaaaaaagtagttttgaaaaaaaaattgttaaactgtattagaaatgtttcacaatatcagtaaacgaaaaaggaattgtaagcaaactttggtttatgttaacgcaaattttcgttagtcaaatatgagcctaagagtgataattccacatagaaaaaataaaaacagtcaaggaaaaagtttgaacacacagaattttttatgtggttttgcagttaaaattctgcgtagtccacgagtcaatcttattagatttctggtagtttttcagggccttttctcttatgatttttttcgtcccttttttaatctaacttgcctttatttataatcatatagtaggcagttaattacagagtacagagttgactgtaatctttacaatgtttatcccctgaaatcatggggtttgattacatatcacatagtataaatgtggtttatattcgaaaatcacacagctgtggttaatctgcttttactgggtcaaaatgattgtgtatttaaactcgttttagatcatagcattctaggatgtctcgacaggaactcagtaccaatgaccttgatatagtggagttcctatctttccgaggtcgacgatgtacgcctcgttgcttctttgtttgaaggcttaacgcttcattttaacaatcccagttcttattaacagagagtactttagtagtttgaatgttagcttatgacttgtcaagactattagtctcactgaaaaatgtcagaaattgattggtgatagtaacaggagtgcgccttcctatagcgagataggcgccttgcttattaggtattgagtccacccaacttttatacttaatttgtatattatacgctaagtattttcacagtcaatatgcatcgctttcgtctttaaagttgatgtctcgccttatgcatccaataccgtatggtttctcgttaatacatggggcgacagtttgtatatctttatctcgcatgaacttatagtcagcgagttgcaagtatactctgttacttccgcatttaatgagttattccattaaaagtgattaccgttacacgcatcgatccatattccccttaacttgacacgtgtcctccactgaaatggtagccgaattttgggtataacaattgctccttaacaagttagttcttttttaataaaaaaagtaagtgcgctttttaataattacaaagggtatttttgtcataatcccttttggaaaaacacgtcctttgatttcggtagttgtacagttttgagggtaattattagtataaatgaattgtcttttcatcttctgtctcactccgaacagttagatttctcaacctttggcctttcaaattactttgttttgagtataaaatggtggcttagccttgccatattccataaactcctggtttttggtgagtttcatacagaaattggattgtcattctcttgccaagatgtcccatccaagttcagaaacttattcctcaaaactcgaaacaccagaatataccaaccgcttttcctctccgtacgttcccaaaaacttcaaacgtcacagtttaaattggaaacgaaggattcgaagactgaggatcttccaatcaatctgaaccaaggagacgcagttgatcattacgggcgatcctcacaagagattttcgagggtaagtatcattcctcgcaaatgatggtatgatctggattattatatatatattttttttgctccgttgatcttttatctttgtctctacaggaatggacatggattttgagagcaagttcagaggtcctcctcaggctgacaaggaatccaagaagaaggtaatcccagttgacgtggtcatggattcttctaaagaacccagctggcccaagacccaagcttgcacaaaaagacctttggaccagccaacctctggtgttgaaaaatttcctgaggctgggaatgaggtctcggctgcaagaaatgggatcttctgatgcaaagaatgaggtctatgcagaggtcgagatcttttacgcgtagacggtctttctcaagctacgtgtagatggtctttctcgagttcatcaaccccccattaataaccttgtattctttgttcaggaaaattacttaattgtttgcccctagtggcatttttgtnnnagacaagtttgtaaacgaacttgggttttctcttatcttaaatgccttgtacttttgtcgttcgaactgaatataattgcgtttgcttgcgtttttattcacaannnnnacaactatattttgatcaaatgtaaagtacttttgagtttttccattgctcataattttcctgtttaagtagttagttatctactaaccttttgattttcgcgcagttgtcaattctgccttgcaatgacagttataatctgccttaagcaaacttgaatatacttttaatgatttatcactttgtatattt

SEQ ID NO: 18389 - DNA, 4453 bp, Cannabis sativa
attgtgactacacgtcgcaaatatcattgctctaatttcaatggtctgagttgtgttttttgtgtcgttcgggttgtaatttgggcaagttagacaaaaaaagcttgaatatcttcactagccagccacaacaacaaaagtaactgagattttagaattggtgttgttttgtaggactgtattttacggacagtacaaatgtatggggccaggtgctgagtatggtggtcgtgtatcatggtcaagggagctaactccacaagaagcacaaccattcattacacttgattttatcaatggctatgaatggcttccaaatttgtaatagttgagtttgagaatcacacttcatttctataacaaaaatcatttatcatatcatcaaggaagagggacaaaataaagttttttataatttttattaaattaaaaaacatattcacaatgtaaaatacataattacaatatccataaaatcaaacaacaaactatacacgtcaacacataaactgtacatttgtcatactttccccaccaccatgtttttaagtttctacaagtagatttttgctgctttgatacaatctgcaagtttttaccaaatgattcttttatgtcacagcagagcagcaataacatgatacaaaaaaaatattatgaaaaagaaaagaagataatgacaccagacagatgatgcaatgtaccagacaatacggtcatgatgattgaaaaagtgtcacggttgcgatataaccattcttcatcacctaataatgttaacaaattaattgttaaaccaatcataatgcaaaagcaaagttctaaacttcactcttttgtttttctgcctttcttaatgagagggaattactcagcgacaaaatggatcaagcattcatgagaaactcacctcaaatgcgacattttgataaccatatacaaaagtggatccaaaaggattgcttgtagagccttgtgtttggatagcagcccggccacagtccccaaggatttcctatagtttagtatttatcgtcattagcacaaaacaataaagcaaattaacagcaatctggtaataatggttcgataaataaatgtgatactctggcaaaacctcaaatgaaaaaagaaaacagtcataaaaaataaatataaagaatggccaaaaaaaacaaaaaagaaaaatagaacaatgagaagcaactaagcaccttcacttgttcccactttgtgcttggatttatcctgtgtttagtatcctgatatgaactcccaactgttaaaagaaaaaaccaggttatgttatctcaaattttcaaggtcaaaaattataaaagagaaggggaaaaggaacttacgattgttaccaaaaataacaaaattgcattttatgtaagaattaaaatcagcatgaccaggatagtttgtatgcaaaacaaacttcttgattttatgagtctgtgaatacaagaaaataatcagagagctgctatccaaagcaagatatttgaagaaataacaagcacaagaggaatacctgcccatcgaataagatgtcaagtcctctggtgaaataattgtagaaataatcaccacaaagagttgtacgtggacgaggatctgaggcagagtgaatgaccatttgatcaacctataaaccaaaagcatgcctgttaattctagagaaactacataacgctatcagaatgatgtaaatacaaatatagcaaaacctgcttttgatgaattccacaaggacgacctaattcggtccatacatcctgcaaggaaaggaaaaagactgagaaagtaagccatgacacgggaccaatctccaacaaacaaaaaagtgatttcaggtaaaaacaattattgttccatcaagaagcatcaaccagcaatcttggagaaaaaaaaaagtaaggataaagtaaatttgactcaaacttgcctgaggtgatgcaccgaaaggaatatgctggccaccaacagtgaagtacaattcttccccaagctggcacaccataaaataaattaaatgaaggaaatatatccaactgaaacagaaaaccaacagcatataaaagtaacctaactggtcagcattaaaataacttgcaaaataaatgtcaactgatcactcttcctaacaattgttaaaccccacaataataacataaactactataaacaattatttctaataataataataaaagatctctaccaacagtcactgcatgataagaaatggaaatccaatagaaagaagctaaccttgatttgcacctcttccatgtaaaggctacccactggtagcggaggagcagatgccttattcattaaagatccaaccccaacttttttgtctgtagaactatcatatacagagacgcgacatgtaacaggtgttgtgccatctggaaactctaatggtagttcagctgtccaacaaaaagtacctgtgttaatcgattacagcttgaattatctacaccaacacaattattcaagtaccttccccatcatggcagcagtcagtatactggtttggaattggaaaagcaaacgatagaccctgaaatgtaaagacatacccaaaatcccagtaagatacaagagttacgcatgcacacacaaaacaaaacatataattatgtctcaagtgtacgtactggatagaatagaaggtaaactcctctatctttgtcataaattccaggaaacgtaggcccaaaaagtgcatatacagctacaaaagtagctagagtcgacggtcccctagaaacaaaaatatgggtcagaaatataccaactgcatgctcagttagaacacataggattaggtgcccacccaattagagaagtggcatagcgcatttgaagacgctttacatcaaatatttcaataaggcgtaacctctgcataacatgttcacattagaataaaccaaaaaaataaagcaccataatagatgcatcatccatccaatctaaaatgcaaacaacacatagaaagaaaagcaacatgatattggtagataaacattccaataaatttatgctatgaaatatacagaaaaaaatacctgtgaccaagaatcaaaacgaagatgaaaaccatgatcgggaaagctaataacaatatccaatttcagtggatcctgcaaccaacaaggtacagtaatgtaaaactgttatgcacaaacctgttttctcaaattttccaaaaagaaaaatactcccagttaagaagtccagttgaactgagatgatataagcatttttaatcataaaaaaaaaaatcacataaatcatttggtaattgagattttgaaccccacctcatcaaaatgcttaacgtggacaacatcataaatgttaggctgctgttcaatttgagcaaaagcctcacaaattggcatacctgagcaacattcgattagttttcaatcttcacatacaatcactaaaataaggtaaatgtacttctacgatttcaaacttagaaactaaaacagcaaccaaactacccatcaagagctctttacaacaacaacccaattgaatgaatctaagttccaacactcaaaactacatcaaaaacaataatcaaggtcgctgatttataacaatcccatatcggtatcaaagctactagagtctggaaagagtaaaaccaattaaattcaaaatgaattcaactttaaacgatgtaataatcacaaaaaaaccaccgaaaacgaaaataaaaggtgaaaatagaaattaccaagggtgaaaggtccaattccgaggccaggtcggagatcaagaacgatggcgcccatggccgtaccttcgcaacggcgcctgggtctctgctgctgctgcaaattactcattattatttttttttggaaaatgataatcgaatcgatatttttggttttgaaaatttgttagaaacgatctccgtgagtttcggcaatggaaaacttaaattaaatccgtgaaaatattaatgaaaaataatataaaaagaacaaattatcaacggaaatcgtaacgtacgttgcctcccctaacacggaacccatctgggctgagacctatcttattgggcctacactgaattttaaggcccattttcatttttatggtttttaagggataaaccgaagatattttatggaaatttgttagagaagagttaaaaaaattatagagttttagtatgaggtttagacttaataagaatgagaatgttaaattttggtgaatcaaattttaatgcttaatggatttgtattttcaagtaggtcttactttttacattaaaatagtgatattaatcccctctaacatttgagttttatattcttcaaatctacttattctaattcaaactcacataataaaaattaggctaattagcaatttttcccttcgaattttgacatataccaaa

SEQ ID NO: 18390 - DNA, 4403 bp, Cannabis sativa
  modified_base (3726)..(3736): a, c, t, g, unknown or other
ttgaagtgaggacccctcacaccacaggtgtcagaaattgatgtgacaagctccattgctccatcatatcagctgaaactatagttcaagcttgcaaatttaaccatacaaaacataaactaaaacactatttgggttttggtatagctacaactgaatttgatggaaacattgctgataaacgcttgaaggaactggccaaaatgatcattaatttaagtgaaaatgatatgtcactaaagatgccactgcgtgaactgcagccacacacggaagaactgtacgaggcacagccagaagcaattaataatccaataaacaaagccatgtggaagttcctctgcaactaccgcccattcttgctccttttgcttccctttgatttgttccctctcttttcggacttcgacttggtcttcggtttgtgtcttacaactctcttcattggtttcttcggtgccacaggcaccttgagcttttgattagctgcaattggctgcacaaatggtctttctctcctttcacggggaacaatatcgtcgtcctcacgagtgatttcgcttgttgtcactgaaacttgaagatcaccattgtcatagattgttgtcccttcaaaaaaataaaatccaaaatcagtattcataaaagcaaaaaacaaaacgtgtgccttaaaacataaataaaattccaaacagatacatttgcaactagaccgaaaaaagtatgaacagttcttgatgcacttagtactgcaagattcgacttgtttccatatccatagtttggtcacgtgaatacatgatatgatccttaaagacaaactgccaacattttctttcaaacgaatggtgcttgtttcaatcttagtgaaactgttttcagaaaatgtgatgtcaagaaacagtttcggtccctgaagcattttactgatagtataagacattagtcttttgtatcatctgatttcaattggaattcaaaatgtctcataagccctcagagacaaattcagagaccccattaaccacaaagttgggtgggcaaccaaaggtacctgatcagaaccagccagcatatccacatgatatactggcactgtaacgaaacaacatagacttgtaccaaacatttaaaatatgatttgaagtaggatgggtacataattataccagagacagaaggaacaggctcgctatcctcctcctcttcctcctcttcattgagttcactgcaaccatcaggaactgaatctgtgactggtggagctccaccagatgaaacaaaatctctttctagcttcctctgcaacaaaacatataagaatatgaatattctttttacactaaatataagtaaacaatagcacattatggatacaattacacaatgcagtatacataatgaaaccattacaaataaaaaagatgtgtattttttttttgttggaagggaagatgtgaggtattgaaaaggataaacattcagatttatcattcataaacttcctgtgccccagctctactttcttggatcttctaaatctactctttaacatttgcagatttatctgcataaacttcctgatattattttttctagtaccagctaaaaccttcatgcataattggcagacaacattatcagttttattgctggctgcctgatatagaggaaatgtcataactgactacttagagcttttgctcaaattccttccttcatgattaaacaaatggaaaataaaagtgaacaagtattatatcaatatatatataaataaagaaacatgtatatattatataatatacatatattaaaggaaataaaagtgaatatattaatatgtattatataggctaattaagatttttcctcaaattttgacacgtatcaaattatttggtacatgtcaaaaggacaaaaatcctaattagcctattatataaatatatatatatgtattaaagaaagaaacaaaaacagaaaattgaaaacacattgctatcaattcaaactaaaacttaacgaatctatgttcttatatttttattgatctaatttctaaaataattcttatttaacttaaaagtccaacatgttattaaaaaaatcaaaatcaaaacaaactcttatgaattcacctttttcaaatttcaattgacgaaataaataagtttcgcaattgtactataaaactatgagaaaccaacctacatatccttcaactattaagcttttaacagttcaacatgtaaatgaaatcatgttcaatgaaacaattcagggaaccagtaatttttctctcttttccaccatccaaagcttgtagtcaagctttaattaaagagctagaaaaatatcgaagtcatggtgatttcaaaaatgatgctactgttgcagctctctagatgaaattggttgcaactcttttttctatccttacctcttttctatccttacctcttaatttttctttttttttttttttttttgagaaaagtccttacctcttaattaaccaaagaaaatctttggaaaacataaaacactaaaataataggtgttccccataagttattgaacctgaaacctcatgggagtgaaccatcaacataattattcagctctcccttgtgcatagcttgcttgcaactaaaatcagacagctattcttgcagaacaagcaagattttgtttgaaacattaataaatgcagagaacaaccatgaaaaatgaaaatttgagtcaagtaaataaatggtttatcacacaggcaactaactgtcagtgctaagttttgtattcgatcagggataatgaaaatcgaggattggtttgaaagatgacatttttaagctttccctataaactaaatattaagcttcagaatacaatgaaatttaaacgttcggaaaataaaaataaacggagaaggtagtacaaatgaaatggtattgttcaattactagtactacattacactacgtccaactaataaccaaatttgcagaaccaaaatatctatatgcatatgatatgtgtgtaaggaaaaagagaaccaaaaaaggagcgaatgtgattgtataaaatctgaaccttcttacgggcttcaatacgctttcgccttagtgcctcaccttgctgttgtaaggcaacctttcttctcttcttcttcctcttctgaaaccctgtcacgtagttccttcacagaccaaaacaccgattaaagtaaaagtccccaaacacccacacatggagatacccaattcataaaagtagggttccagtttcatcgaattcgctgtaatagagttaacgctttttcatggttatagaaaaaaaggggattgtacgggttgtacctgagatccttctcgtcgaagctaatggcaagagctttattcttgagaaccctcttctttatgtggaggtttcgggacgaaacggccggaatctgttgccgttcgacctcttttcccattgttgcttgtgtgtgccgagaaaaaagagtgcttggggttttgtcagcgtaacagactgcttcgggtttttcttagatgggctttttcagtagtgatctctcccattgtctagtaatcctctgattcaagacctaagcccataatgtagtaatttgtggcccaaacataaacaacagtattgggctttcacatactgagtttgaagagaggttttcaattcttccatcttttttttttttttttnnnnnnnnnnnctaacatttaattcttcaatttattatttttttttttttgctaacataataattgcgtatttcagttgttaaaaaaaattgcttctttcaggagaataataatataaatataattgttattactgtagaataagtgatgaatatgtttaattttatttaaatggaaaatgataaaattgaataaagattcaatgattgaattttagtacttacaaaaaaaaaaattgaagattttgtttttattattattttcctttaaatactcaattgatttaatacaactttttttttttttttgctgaataattgaatacaactttacgtgtcttgtttggtgacgggtctgatttggttgctaaagttaaagaaacatatcctttcaaaaaaaaaaagtcaagacatattttcacacacatgtagtcatgtacacacataaaataaaaaagttatgaaaaatgttagggttactgtttaacttactaaattatgttaagcaccaatatctaccatttattatttagttaaaattttaaaaaggaaaattaaacatagttatggttaattttattcaatattatcaaaatatctagtatatttaagagaaaaaaaattagtcataattttttaaaaaatgaaacattaatattttgttacttcataagttttt

SEQ ID NO: 18391 - DNA, 8294 bp, Cannabis sativa
agaatagaatagattaatattatttaagtagaagacaaggaaaaaggcaagtaattaggttggggccctcccctttgtttcccgcgtaatccagatccgaatccacagggacgtctcgtactaatttgactattattcccttttccatttccaattaacattttattatttcaaacaaaagactcagtccaatttcaatttcattattctaattctatttaatttggacgagtatctaacactaccgacatcttttccattttaatattttacttataccaaattcaatggaataataaatataaatacttttacatcaaattcacatgtatattcctttcctttcctttcctttacattcaattcaatcctcataaagctaatcctatattaatattattataaaatataacattacttaaaaaaaagaaaagacagataggatagccgctgcccgcgaccatcatataattaactaatagttaattattaatagattaattaattaattaattaattaatgaagattggaaaatgaagaaagagaaagagtattgttaataataataataataataaattgagaagaaagaaagaagaaaggagaaagagaggtgtagctgttttaaaggagagtattggttggttggttgtttttgtttttggacaaaattagttccaaaatccaatcccacaatcggcatcgagagctctctcttctcttctcaagctctcgatccgaatcaacccaaattccaactccattgttttgttctcatgtgattctttccaattaatcaaactcacaacaaaaaacattactacaattatatggaaaacatagctgcccaattgaagcggggtatctctcgccaattctccgccggcgccggatccctccgtcgctccttcagcagacaattcacccgccaatcatccctcgacccgcgcaagaccaacctccgcttcagtttcggcaggcagtcctccctagaccccattcgccggagtccatccgatgacgataacaagctctccgtcccggagaacctcgattccaccatgcagctactcttcctcgcctgccgtggggacaccaagggcgtcgaggacttgctagacgaaggcactgatgtcaacagcatcgatttggatggccgcaccgctctccacatcgctgcctgcgaaggccaccctgacgtcgtcaagctcttgctcagccgcagagccaatatcgacgctcgagatcgatggggcagcaccgtgcgtttgtttccttttctctctacattactattgcctatgttatattccgtttcatatctcatatccggattggacaggcagctgcagatgccaaatattatgggaatcaagaaatttacaatattttgagagctcgtggagccaaagttccggtacctatcatcatttcaattctcaattctcatgatgcctattattatctatctattcagccttacattttcctttttgtttttgtctctgttttcttttttttttttttttttttccattagaaaacaaggaagacacccatggctgttgcaaatcctcgggaagttcctgaatacgagcttaatccgttagagctccaggttcggaagagtgatggaattacaaaggtactgttcatttgtcaaattgtttcaaaaaaattgaacattattgtttctttctgcggatcacgagcattgtcgatagagagagttctatttttcttttggtttcttcaacattatactttactatggaacaaatgagtaaattttatttaaaatgataatcataataatttggagaaacatctactggtaatattggtggtacaagtacatttattttattggagttgtaacataaatggattactatcttatctacatcgtttcagggaacatatcaagtggctaaatggaatggtacaaaggttgctgtgaagatacttgacaaggatacctcgtcagaccctgaaaacatgtaagtctaaatccatccaacttaccatattacatttcgcaggtgtagcaatgtaactactaaaatggcgtaacaagcagtagacatagatgccattgtacatctgatttttcgttttttattctgacagaactgccttcaaacatgagctaaccttgttagaaaaggtccgacatcctaatgttgtacaatttgttggcgctgtgacccagaatatgcccatgatgattgttttagaatatcatccaaaagtaagcacacacccaactcttttttctctccccacatctgcatacccacacatgcacactaatgcaaatattcttttcttataagaacattgatagtaatctaatgaactcaatgaaatgataaagagatggaaagaggaaaaggtgtgaataattttctctgtatataagaacaggaaaaaaaagacaatgtaacttgacaaggacttcaatttttaccatagtaatgtttgacctcattttcatcatgaagtatctccggagtttggattctctgtattgtaggtatgtatagaattagcccaagaataaaaacaggggcatgcagcttgaaaggaaaaaataaatccacttttctaataacacatgcatatcaaatgtgtaactcttttcaaatgactttcagaggcgtgtagcccttactagggaaaacctcacaaagtcaccatatgaatcatgatgctgaccttttttctatttatttttatttgtaatcttctagggtaacttgggaagctatcttcagaggaaaggaaggctctccccatccaaagccttacgctttgctcttgatatagctaggcaagtgcattgctgcagttttatttaagattcaagcaatagatatttgaatgtactgatatatcgttgaatgaatgttttgttttttgataaagagtggtataaaattgtgactgccttaagcttttggttgtttttattcgttcctaccataattgcttgttccatttcctgtcatcaggggaatgaattatcttcatgaatgtaaaccagacccaattattcactgtgatctaaagccaaagtaagacaactaaatgcaaaagtttatagcaaacacaaatatattattattttgtccttgttgcaatgtactcttctttaatattttaagttttcgtaaggtgccagaaatattttgctggataatggaggtcagttgaaggtatctggatttggtttggtaaaattgtcgacaatctcacctgataaggcaaaactggcacaagctgggtgtaaaattgatccatcaagtaagttcttgcataataaactcaacctactactgtccctttcttctctttctagaaataatatgaacctcctagcaataaattaattttttttgaaaaggttagcaataaattaattttgcattgtgtgtaggtttatatgtggcaccagaggtttacaaagatgaaatatttgacagaagtgttgatgcatattctttcggtcttattttatatgaggtgtggtgtggtgtatgcttttttttgtgtgtgtgtttttggcttctgttatataatgcacgtgttatatatttatatatatatattgataagtagaagttagtaatggttagtgtatctattttctgtttccatttttatatgctaaatttttaactgttccttgtgtgtggatgtgtgtagatgatagagggcatacagccattccatcccaagtcttcagaagaggcagcgaaaatgatgtgcttagaaagaaatagaccaccatttagaaacaaatcaaagaattatcctccagatctaaaagagtatgtttaatttcatgaatgtgatcaacccatcttctggaatcatgaatgtgctagtaatagtaatagtaatatgcaggttgattgaggaatgttgggatccagagcctgttgtaaggccaacattttcagagataattgtacgtttgcagaggatagttacaaattgctctaagcagggatggtggaaagacacatttaaacttccttggtacgtaaattggaatcattattagaataaataacaatatattctatggttttggtttgcaattgtgtaatgtgtttaataatctgcaggaaatgaaaaggggacacacacacacacacacacaacacactcacttgtgtcagagatgaagctgccactgctgccgcttcttacaagaataaataaataaataattattaatgaggggagaaagaggatgggttagtaagtccaagtcttttctttttttctttctttctttctttcttcaaaaatgtataattgtgttggaatagttttgttgtatactatgaatattatattcgatcaaaatcaattgtctgtgttttctatagaatcataattttattatatgatatataagttatacttacttcgttctcatttttcagcaaacaatcatataataaaataaaattacatgtcatattgtataatagtattattattatttttttttgcagggaatataatagtattattctgtattaattaatattatgcctaaaatatgtaaatataacatcggactcaacggacgatctctattagttataacattctacattaattaataagataagggtactatctatatataaggccaatattaactcaactataatctctaggcttattatccatctcaccagtatcttattagatccttaaatagtattccattaagtttttaaagagagaataatcacgtcgtcattccagagagagagaaggaaatcttacttaactttattaatttatcacccaaaaaacaaacaagagcgattattcaacaatcataataatatgatttcataagctagctagctagctaacttatttactgcaacacaaagtaggtaccgtcacacacacacacacaagcacacacatgtactaaaaatgaccactatgtaaagtgtaaacatacataaaaactattttgtaaaattattatttagtagttttgatacaaattgacgaatgttattgtgggagctgccaccttgagagattgcttgtatagccacattcctccacttgttagcattgtgtgtgaagtgtgaggttgtgtccccttccataacttgccttatgcaattctcaacctcattcctccccacaatcccattctcatcaaccttcactctcaccccaaccttccacacatcctcaatcagcttagcatcagtgggctgatcagtccactggggcattcccaccattggcactcccaagctcagtgcctcaacagttgagttccagccacagtgagtgaaaaaacaccccacagccccatgtgataggatctccatttggggtacccaattcagtatgagacctctctcacctatttcctcttccaagttaggaggaagctttgcccgttcctctgaggacctaagaacccacaagaagttgaagtgtgtggcattgagacccaatgccagctcctccatttgggtggcacttaagcttgccatgcttccaaaggccacgtatacaactgactttggtggcttagtgttgagccattgtatgatgggagcagaggagtctggctcaaacagatcgcatccatattcattgtcgtcttggaagctcttgtctaggtagaacagtggaactgttggccctattgttagcactggacaaacctttgacatacaatccaccacctgttcattcattacacacatgacacatatcattatttattaaacctacgtgtaagagaattacacttacagttactatactaataacattacatgtgtaattacagtacagaggtgacactttatgaattgtgagacctaaaccaataacacatatgatatacactgagcactactaaccttatgattacttgttaagtttggtatgttaaatttagaggaaaaaaaaagtgaatttcatttccacccaaataatttaaaagcacacccaattttaattttattattttatataaaatatatatatatgtatctttaatctacactaattttttttaaaaaaaaaaaatcttccttcacatattcctaaaaaatatatttataaaataaaaataattttttttaaatattaaaacaaaaattaaaataaaatattatatgaaattttattagaaaaaaattttaaaaatataaataattttttaaaaaatgtaaaagtaaaattaaaataactattgatatttaaaaaaaatatataatgtgaaaaagaattttgaaaaaatataaaaagagatttttaaaaaatagagtgtatataaataaagttttcctaaaaaacacaaaatatatataagtttactaaattaccaataattattgaaattaaaattatataaacaaacaaaataataattttgatataaggaaattttctgaaacttgtaattatttataggaaacaacataaatcgtttaattttttttgaatccctcctaatttgtttccatcttagtcttaccgtccttattgtaatgatgcaaaagaagattaattattttgttttgtacacatataagcgtgtaagccaaaccttcaatagtaattaatacactgtacacacactgacacaacatctatatctatctatttatatgatgacgatgatgatgatgatgatgatgatgatcaccaatattgttatcctcttgttttgatatattaattaacaaaagaataaaatggatttaattaattaaagaacctgttgttcaaactcgtaaacagagttgacgaggacaaagtgaggtttgtgtgtgttagagaattgattcagcaccatctgaaagtaagcgggataagaaccagggacacccacaaaggaaggcatctcatcaagtgaagacagaaactccaatccttcaactgacacaggaaatgagtcgattgggagtttgagtaacccatggtggagagaatagtagatgtagttagaagttgaggactgagtgaagaagggccctgcagccaatccaaacttgttggccacatcaagacaccaatccaagaatgagtcatacacaacgcaccctattgggttattggactgcctgtgcctctctatcagctggctcagtgtcttggagccagcagcttggagtcggctcaggtagtcatccacgccagaggattgggcgaagccgcctgcgtcgaagccgtctgatatggtgtcgaagtggatggagggagggagtttgttggggttgggagtgaatgttttggagatgaagagagttgtggcaaaggtgacagtgagtccattgtggtgtgaaacaagtctcttgcagaattgaagaagtgggttgatatggccttgacttggataaggaaccactaacacatgaccaccataacctgatcctgatcctgatcctgatcctgcttctgctgccattgccactgccattcacattcacatcactacttgtatactagtctaatatttatagtataatgtgctgtgccgtatcaattactactctttctttattatttatatattggactggttgttcgctaaatatatgtaccattactccgtccctttactatatagattgtcaaattccacctcaatttcttttctttttttaataaatatatagcatacattacaccatctctaatggatagtttataatttgagctaaaattaatttacaaattgagttaatattagtccaatttttatgaaaaatattaaaaagtacccgtatttgattttttttcaatattatatcgttattggtgcaattaagtattggatatcatataatttattataataattttttgaaaatatcgttaattaatcgcaaagattagggataaaattaatttttttttatataaaaaaatcaacaaaattattaaatattattaaaattctattaaatatataaataaaatataaaaaattattttttttgtagaaaaatataaaaaaaatattaattatgttaataaaaaataatatttattattattattttttgtgttgaatttggtataagctttaaaatgtgctaatttcaaccaattttatataacaccatttttttttttataaaaataaattaaaatacacatataggccatcaatacttatttgaattttcatgcttaataaactcataaattggttttttaaactaatactatgtataatttgtaaaatgggataactttttcctaaaccccaaaaaacccc

SEQ ID NO: 18392 - DNA, 4293 bp, Cannabis sativa
tctttctcatttctttaaattctgaaactttcttttcgattttctcgcgttgatatttcccaggaaagttttctttgcttttttgttttctttttccttctccattttcgattcgatctctctttgttctgtctttattccgtaacggatttcatattaaccggatctgcatgagttctgtttctttccgtgtttaaattcctggcctaatttaattttctcacctgccaaacagaagcttaaaaagaaaattcttctgagcgttcggtgtggggatttcggagactgagtggttgagagagagggtttactccggtttcatagattcttttactgcttcttttgaggggggtagccggggcctcggcctcggcgggttctaaaacccccagcttcacaaacatacagacacattgaatataaaaaccctaactttctttttcttcttctttattattcttctctaacagttctttcattcttttgatcgtcgcggtatcaagaagagatgccggccctggcgtgttgcgttgacgctgctgccacagctcctcccggctacgctttcgccggggatagctctcttcccgcgccggtcatattttccggcgttcctccggcgacaaccgctactgccaccgcttggtcgccttccttatcgtctgctctctacaaagtcgatgggtggggcgcaccttacttcgccgtcaactcttccggcaacgtcgccgttcgccctcacggcgctggaactttggcgcaccaggagattgatttgctgaaaattgtaaagaaggtttcggatccgaaatctaagggcgggttgggtttgccccttccgctcgttattcggcttcctgatgtgcttaagaaccgccttgagtctctccaggcggcgttcgatttcgcaatccagtcgcaggactatgaaaaccattaccagggtgtttaccctgtgaaatgtaaccaggatcgttatgttgtggaggacattgtcaaattcggatccccatttcgtttcggattggaagctgggtcaaagccagagcttctcctggcgatgagctgcttgtgcaaaggtagccctgattccttccttgtctgcaatggctttaaagatgttgagtacatttcgctagctttgattgcaaggaagcttgctctgaacacagtaattgttcttgaacaagaggaagagcttgatttggttattgagttgagcaggaagctatctattcgtcccgtgattggtcttcgtgccaagctcaggacgaagcattccggccattttgggtctacttctggtgaaaagggtaagtttgggctcaccacaacgcagattttgcgcgttgtgaggaagcttgagcaggtggatatgcttgattgccttcagttgctgcatttccatattgggtcgcagattcctactactacactgctcgccgatggtgtatccgaggcagcccagatctattgtgagcttgttcgtcttggtgctcatatgcaggttcttgacattggaggcggtttgggaatcgattacgatggatccaaatctactgactccgaaatctctgtcagctatgggctcgaagagtatgcatctgctgttgttcgggcaattcgccttgtttgtgaccgtaggtctgtgaaacaccccattgtgtgcagtgaaagtggtcgggcaatcgtttcccatcactcgattctgattttcgaggccgtctcagcttctgtttatgatactccgagcatgtccccacttgggcttcaattctttgttgagactctctcagaggaagctctagctgattacaagaacctttctgctgcggccattaagggtgagtctgatacttgtttgttctatgctgatcagttgaaacaacgttgtattgatcagttcaaggaaggttctcttggtatggaacaactagctgctgttgatgggttctgtgactttgtttataaagtgattggtgtttcggattcgactcgtacttatcatgtcaacttatcggttttcacttcaattcctgatttctggggcattggtcaactgttccctatcatcccaattcatcggcttgatcagaggccggctgttaagggaattctttcagatttgacctgcgacagcgatgggaagattgacaagttcattggtggggagtccaccttgcctttacatgaattggaaggtggcaacggcaacaatggtggttgcggatactatctgggaatgttcttgggaggggcttatgaggaggcactcggtggagtccataacctgtttggtggcccgagcgttgttcgggtttcgcagagtgacggtccccatagcttcgccgtgacgcgagctatgccaggtccttgctgcagtgacgtactccgagtgatgcagcacgagcccgagctcatgttcgagatgctcaagcacagagctgaagagtttggtcaggaagatgatggcatggctaacgctgccttggctggaggcctcgcccactacttccacagcatgccttatcttgtggggtcttcttgctccttaactgcaatgaataatggtggcttttattactgcaatgaggatgaatacatcgaagctgttgattctacatccactgaggatgaacagtggtcctattgctatgcttgagtttttagtctcttaccattgtcgcctagggacgtctgttttaagcttttatgtctatcaatttctcagttaaatgtttctttttttttttttttttgttaaaatgataagcaaaggatgtaagaaacatggtagaagaagaatcctttgcgttttgtagtaaagaaggcattgaaccgaatcaacccttttgaaaattcggtatcttgatgtaccttctttcaatgtttcttagtaaatttcagatttagtcttaatataataatacttatctaatagcttagttcttaactattgattgttttccttgttaatctacagctactatcttcaatgatgttggtttgtagttgtgatcctgtgtagggtcttttctagggtgggtttgattgaattgtccaaaaaagaaaaaatgagatagtgccaagcctcttttttgaaaaggttggatgaggagattctgatacaacaatcaatggtttgtggggtccctcattggctaacgtattgtttggatttaagctttgaacagtttttagcttgccaaaattacccaacttggtcaagaaactgaaatgaaaaaacaattttaccgttatctctatagtacaacttagattcccctttcaataaaaaaagatggagttttggctaaatgggtgggtgtttttttgtgttttgtctccttgtatatcttagaggccaaggtggatgcccccttttttattggaggaatttaaaacgtaaagttttttgtttaatgttgaccacaattttgtgaacttgtgtgtgtgtaagcctcaagtaatcttgtggtcaagattggtgtgtaaacgcttttaatataggataaacataaacataaatctctatatgtatacgtgtgaagaatggccgtttcgacttgtgtaaggtacacaaaattttgttatggggtcatgaagagatgacccttttggtctttttattctttttcttaaacaaggactttaattcagacttgatttgaaattgaaagaaagtaattctaaatctgaactggattttgtgctgttatcttgtgattatggcagaatccaatatgaattgtatgcactcatcatgccacatcttggggaacataacatgtattcaatttttgatttcatgtctagaaagatagtgttagatgcttgagttaatgaatagtttaaagtttttctttctatcagaaattttcagattttttttgggtattatatttattgtattggaatatgcagatacaactttagtggtataaagtgaagataccctcttgatgatattttagctacttacaatcacagaaaagaaaagcaccaaaaagggtaatctttatgtatttttgtattaggagaagacacatattgatgggtactgtagttttgacattttgcccttctttcctaggaataaagatctttaattttgaggctaaaaagaaaagaaattcattttagctttactaaaagagaatataaacaccgtaatttgagttaccttttgttgtggttcatgtaatttttctaattaattttcctttcaataaaataattaaagtaagaaaaaggttgaagttggaccttgtgtgtttcatctatgattttcat

SEQ ID NO: 18393 - DNA, 2601 bp, Cannabis sativa
aaatcaagttttcaagagtccatcgctgtaccattacctgagcattgcaggtggattgttttgatctaaaaataaattaaatatatataggagcatatcctttcttttctttgtaagttctgcagattttgaagtctgtaaagaaacgtggaaataactaaattttttctgtatagaagtgtttgaaattcataatctagtgtttttattttttttgtgattttttttcttgggtttaaggtttgaataggattttcaatgattaaaatataaaaataaaaggcagtctatgtctgaaaacaataaaaataaaaaaaagaaatgatatgcatccaaatattaatgatgtaatattattttttaaaagaatttaacgtcattaatgtttattgcatattttctctgtgcacatatcattaaaataaaaaatcatgggtgcttcaatagtgtttcattggaggtggtggcatcgttagtataaatcgaatttgtaagggtagctgagaaacaatgtatgtttagtgagaaagattggggagatcagagagggaaagaggtgattttgtctaaaattatatggaaatgcatattttgcttataatctttaaggttgatatattttataaatatgtaatgcagtcaaatttcccttttagtctcaaaagattactactactattcctcattctaaaatttaacaggtacacgctgacaatccagatgggctctttaggattctttcgtcttctttccaatgagagaaaacctgagtgagattctagcatataattatgtgccctgccaaaaataaatttcatgagaaatttttgtatagttaagtatatttatttttgtcttatacacgtgtattagtgtaattcaatatatgagatgtttaatcaaagttattagggttctcacaactgaaagaaaaatgtaggaggtcgttggaatcacacctctctggttgtattgtatctatgtaccttacttaatacatatattatgagatttattccaaaaaattaggcaacattttaagttataattactaattaatttaataattgacctcttcaaaggctctagttctatgtatgtcctttcctatggtttttatttctggactagccatgtgtatcctttaaaccatttaaagccaggctagttttgactcttccaacaagtgactttgattttatcttatgaaggaatgaagggttatttgtccttatggatggggcgtagaaatggaaaatatcaaaatattttgtggaagtttggagctctatttttaaagtcgtttatcctaggaaatataaacgagctgtaagtgacagttacaggttcacatgttacataaatgtatgcgattgagattgagattgatattgattgaccatattgcccgaaaatatctctcattactctctactgtacagtctttttgtgtggtttcttattggtcatgacagacacgtgcaccgacgttctttgttatactcatttcatctctctgtcctcttttcagtaagtctaatctttttcatgaattataagtctggacttttctgatctggatactattattttccttctctttaaatgataaataaagttaaatcacttgtaaacatatagattaattttagaaatagttcaataattaaaatgcatgttaacacaaatcaaaatcccagactcttctcttccatggagttaacttaattacctagaataaactacgtatattggctactacaattgtcatgacaaaaacggcgataatgtgaaatattcatttatttttctttcttttttaataccatgtatcttcatgtaactacgacagctggaggagccacggaaaactgcgattgtttcttaattggcgacggcggtggtgaaataggaggctgaaaagtgtcatcagaagagttattgaggggaactttggaccatttcataagcatgaagctggtctgtcgccaaggtcccatgtggatcttcttctccttcatcgacctcttggctgagtcacagatgattcgaaccactgcgtttaggcaatcgatcttgccaatgtagtactccggcagtagactcagaagcttcttatactcctcacatggcttcgcaatctcgaattggtcacggaattccacctcaactacgtatgaaatttgctttgattgactcgatattgtcttgtttccaatcacttcgatatattcgtggcaacctaaacattttattagaggagaattgtaaaaaataaaatggtaatttgcactaaactacatactatatagtcgatatatatagttatatatatataatgataatgtaccttggggatgtttcttggtgtgtctccattttgatgagcaaagagaggcattaatacccttttcacgaagatttttaatgactattcgtctcaagcagtggttgcagccatggccatgaacggttttagtcttggcacaatgacaatactctgtgtctttagccatatctgtagttcgaccaatctctcttctcaactttgatcctgttaagttatatctctccaaaacctcctgtttttgcaatttaatt

SEQ ID NO: 18394 - DNA, 3171 bp, Cannabis sativa
  modified_base (2935)..(2938): a, c, t, g, unknown or other
tatatatatataatatattgtatacgtgttatatataagaagatcatttttctgtgaattatgattattcttggtctaattagatggaggtcttttcttcttaattttgaaagagaaattattaaaagaaaataaggacataaaataaatgtacattgaatattattaagacaagaaaagtcgatctttgtgttgaacacacttacaatatatatttcattaattcttatccttattaattattcagtgttcaaataatatgtcttatgtatttaactaaaatttattagctagtaattaattattattaattaattaatgtttagagacaatcactcaataaaattgtgttgaactacagtttttttttcccttcttcttatcctaattatttcggtgaatatgtatgtaattttaactagaattattttatgatgagctgcaggtaataaattattaagtataaaaatgaatattctatcaatatatatcgataatatatataataacaaaaccctagctagcttagctataatcttcttcttattattctgataatacactgatccatatgtcttgttgtcgatcaagataacaaaataaataaatagtactatttaaagtcaatggtctggtctgagtacatatattaattaatttggttaattatttaattaattatgctcataaatattttgttttatatatataaaaatcaatttttgggttgatcgagttgctgaggtggttaagctctccctcaataaatgaaatgtaataatttaactaattagtttcaaaagtttttattggatttggaaatacagatagatatataattaaatcaatcaaatatataatataaaaaaatactatgataaaattaatcgaatcatagacaaataaaaataatgttaggttaggtaccctaatagtgatcatgactaaactttatgtaacacatcatatgttgattggttagactagaaaaatattttaattaagatagaaagtattaataatatataattatatagagacatattaatgttctagaaagtttcgttatttttatgtaatttaatattaaacattattattattattattttattgaggcaaagcaaacactaatatgaatcaattttgatttgtttgtctccctttttattaaattacttttaattattttttactattaattacaaaaaagtatggccaactcgagccagtacaataaataattaaaaaatattatttattattattattatttttgtggaacccacatttgagatggacacaaatttgattacgtggaggcacttattattatttgtttttatttatgtggaccatgtgtaaataaaatttggaaattaaatgttacattgtcgtttatatttttctcatcaagttggtgacttttatgttattttatttattattatttttattattgtagtgggggagtgttattttaaactttattctatttccattattataggtttctagaagctatgtgagaactttttatggacaactaagattcacatcaatccaaaaatgatattcacaaattacatactagttagttgatttcgatttggatacatagataataaatatgttttaaatatgtcctccaaatagtaggggtagcccatattgtaggttaattctatctcgatccatatatattttgtgtcaaaaaattttaatcttaactcaatccgtaggtaatataatgaataaattttttaatatcaagtataaattatgtatcttatattttttttttctaatatatatttttttatgaaaataaataataatttaattataaattaataattttaataatatattgaatataaacaagttaattcgtgtcgatttcgtatcatatgtgttaatcctaacctaacccaaataataatcgtgttatttggattcaacccaattttgaccagcgtctatttttatgaccttaacttgcaataatttgtatagaattcgtgtcgtattattgtgtcataacctgatcattactatccctattaaagagtagtggtaaataaagagtgtaaatttgtgtttggatggtcaattgtgttaattgtgtttgtgtcatatcaaaatttaagttacaaattaatgttaaatcaaaatttggcctgtttataagcgtcgtattattaacgatttattaattaacttaatatattttacatgtaatgaatataagtttaaataagtgtgacaatcagtagtactgtgatctgtaagaaaaaatattaggtaagttgtgcaatctcataccgtctaaaaaaggtcaaattggatgattctgagactgtgtaggtatgagactacaaagttgaagagggcttaaatggattgattaatactatctatatcaacaaggtgcatctcatttgtcggtagttcattacgaaagaacttcacagttaaacgtgcttaatctagggtaattttaggatgggtaactttctgtagggtcagtcgttattccatgaagcagtcagtgtgtcattttgagtgagacttgtctaaccgaaaatgacttgtttaattaataagttaattgtattaacttgaaaaaatgacacaattttttttttcaattctatttacatgtattattatttttgacctattttaacgtccctagatattagttttctaaaataatttttttttgggagttattttttcaaattggacactctggccatgacatggaatttgataaattataaatagatttgaggattctataaacttttagttattgtgtaatgacaaaggaaaatagaccatttacctagcttgtcttctagaacataataattataataagcttctggaaggaaaacaagtattacaatattaaataataataataatnnnnataataataattattattataatatatggtctgtttggtatattctttctataaagaatgagacaagagaagcccaattttatggactttagagaaaaagacaattccaccgatctaatgacgattggtaccaaaaatgaaattacatttgtcatatatattttattatttatgtataatattgattaatatttatatatttatatggaatgattggagctctattaatattt

SEQ ID NO: 18395 - DNA, 2569 bp, Cannabis sativa
tctgtttgtctactgggaaagcatgggaaagtgagcatagtaaagtgatcatgttctgttttattcaaattatgaatattgtgatcttgcaagtacaacatgtagaaaaataaaaagtttggaacctccacaaatccgcggctgtcaaggaatctcctgtagtaagataagattctggctcgggttttgaacacttgttgaatctctggattcaacatgaggtccaagtaacgttggcgatatcgagtttcctatcattgaaacaacttactgtgagatgaaaattagtgacaactacaaatgaaatatgttaagtataaagcaaaaaatttctacctggtctttcaaggcataagtatccggatttcgggcagatcctggcttccatgcttgagttgttttttcattcctctgtgaagactagtaagcctgagagatttagagcaaacttatactaagagcataactttgttgttttcttataccttggattcagcttcattgctgctgtgaactgaagcatgctttggtagcatgtgaagacatggagcaagtaccataagagattttccgaaaacacttagttctcctcttttgctctttcctataaaaaaattgctcggattaaactctgagagattagatgaaaaaacaaacacaaacacacaacaccgagattttacttggttcggtagacaaaagcgatgttcttaaaaatggctcaatattttatcataagtattgttatttttgtttggggagttttattttgctcgcttgcggctggctaactatttggttcgatagacaaaattgattcttatgggacaatattgtccaatatctccctactatttggttagtgtagatcaaaagtccgttaggaatatgactcttatactatgttaagaattatgggattctatctcaaaactaattggcaatgagtagagtagcctatgttcttatatatgactcaatatttttacatttgatccacgtgggtgggacaatattgtccaataacaactaccaattttcaacctataactgtgttatgatggttggtaccaaattatgtcaagacaacttcttgttactacttcaatagaggaaaagccaatctttctcaatacacaatctttctcactaaacataccacatgttttagagcaaccttatcttaatagagttctagaaactgaaatcactttgctatgctctctatgtagaatttgattcttttggttagtaatagattaaagaaatatagagttaactaaccgggaaaaccacagataccaacaatgtcacctcgcttaatttgggaatggagtctaccaaattcatcttcatccatattggaatgcctaaaaaaattcaagcttgctcaaaaaaatgcttacttctttttgaaacatattaatttgactcagcaaaaagaagcaataccttgcatcacttattacttgaactttagcactgtcatcataaagatcatagaagaaaagttttgaagatgatgctcgtttactcatgattctccctaagaaaatttataccatcataaaaaatttcttaatacaataaaccattttatagttacatgaatggtgagtacttaccagctaaagagacttcaattgtttcaacatgttctccagaatccaagctcccatatgctgcaatgagttcggggaccgaaatcgacactgtgaacttgtgagggtaaggattgatcccagctgccttggctaatgccaggcttgctagcctgttctgcaaatattgctgcaacaacaaaaagaaaaagaaaaagttcaatttcatattggtataaacaaattgaaataaaaattgcataattaagagtgaacctacagttgggtccatattatcatcttctccaacatgttttttctgatgctgtgactttgatgccatagaaatatctgcagatactaaaaaggtctaaacactcttaaaaagctaattcacatttgggacacaaaaaattactaatgatatcaaacataatttaaaaagcaaagtaaatgaagtattggagaagtactagaattttattgaagcttctcttgtgttgtgtctgatgccaaaaacaaaccagttttcttgtttagaaggattgaaaagaaagctgtgatttttttgtattgccttgttgaactaataatgaaaaaattttgatttttgtattgagcttttttttttttatattagtggagttgttcactaaagttttatattgattgtggtcaaagtcaacaatattattcttccaccccaagaaatcaatagtttcagtcgtcttttatagattatattattaacatagtggacaccattgtgtttccatagtcaattcatctatgaaaagaataatgttatgttttttttttttttttaaatatttcctactaatttatctaattttttttttaatgaaagttttaatgagttgccggtggtaggtcacaaactcacaataactaataagtaatgggttaattaataagtacaaagaaatgctaaaggacactactctaaa

SEQ ID NO: 18396 - DNA, 4803 bp, Cannabis sativa
cctttttctttttcaccatggggctaaatcaacattgaactttgttggccaaacaaattactgaactctaccatttttaacaggttgtgaaagatgctggtcactcagctaatgaaccgggaataacggcagaacttgtagctgccaacgaacgactgaaaaataaaattaaggctggaagatgaaaggatcaatgatgccataccatgtttgccgaggcaagttttggaggtttcttgtgaataagttgaagcaagtttcttgaaattgctgcttctccatctgactgtaatgccaatttcttcattgaaattgtcatttccttttctcccagtcattgaaatgaagtttctcactgtgaactcaacttgtagttttgttgatattttgaatatgttgtgtattcatgcacattatagagaattacaggattcatatataaattttttcattacaaataaataaaaaatgacgagtatagcacacaggctagtcaaaaaatacatgtgaaaaaaaaaaacgaggagcttttagtacaattaaaaaagaatcaatgatattattgaacaaaaaaaaattcaatgatatgattgaacagttacaacaagatacaacaagatatctatcatacagtgaggaacaatttaagccaccttcctcgtgcagctctttgatacatgaagactgaaaatctggctccttgggtatggtactcggccctctttttcttgacactgatcttgggtatgttacaacaagacatatctatcatacagcgaatgaggaacaatctaaaccaccttcctcgtgcagctctttggtacatgaagactatgaaaatttggctccttgggcatggtactcggccttcttcctcttgacactgatcttggggcaacaggacaagatgcctcggttgttgaagaaatgctatgtttagacggctttgcagcttccttgcgtctggggatagttgaagacttttcctttattacgccaagtcgaccagatgttttaactgttctgcttgatgcaatcctaaaaagagagtttgaagttatttttactttttatttttttcaccataaccaaaaactgaaattctatgaaggagcctcacccttgaggtcgaggcctcaatttggctctttctgagcttttttctggggttgttgaaactgctacaccgtgagcctcatgcttcgtagtagaattagtccgtgaagtcctagctcttccctgcacatatggtgacagtaagttttcagatacttctctatgatctagagaaaccttgtagagtaatgaaatccattttaaattataaatgaatcatatgtgaaggggacttacaagcacatgtattttatttattctctttccagagtctgcacgaggaacattttcactttcactttgttcatggtagatttcgtttttctagtcacaagaatgacttggtttagaataatgagttagaattaaaacgaaaaaagaagtggagatattaccaacctggaatggggtctgatgttttctcaataattttactcctaatggttttactgatgtgagttctttcagaggtgtgggttgtttcttctctaaatttgcttccttgagaatactcctttcctaaatgagcataacaagtaaaatatgtaagtcacaagattggatcgtttctgtaattgataagctggtgagaaaacatttcacatacatcagttctcagtctaaaaggcttgggatttgttggctttggtttcttatactttgtttcatgaacacctaaagcaggaacagaactcgtttttagcgtcttcttcgttgcttgattggtctgcatcattgtaaaagttggaagatgaataaactgagatccagttacaagtactaatttctagcatcatgttcaaatgggccttaataccttatttgtatcgtgattactaacagttttcccctctgactgattgttcatttctctgcagtagggtaacaaacaagtccggttaataaagttcagtccagttcaaaaaaaaacataaaacagttgaagggaaataaggaaaaaaaaaatcatacctgttaatattggaattttctttttcatcattctcagtgctttcacctccattttctgtgttatcagaaggcaaagcattttctttatcatcaatgtcagcatcctgagcctgagggctgctccttttgtcttcacttgactttccttttactgcatgctcacttgaatcagttaaatgtttaaccggtccagtatgatctatggaattttggtgatcactgtctcctgaagccctcccttcagaactacacaaggaggagatatttcctcttgatgtttctgatagaacttcaactggatgctcatcggaccatgcttctgatgtttccagtgtctttaaattctccacatgaccaattgtttcactgttcttagaagtgcctgattcagaatagccttccagagaaacatccgttggtctgtgatcaatctccatatccctcgaatcattttcaccatcttcatgagactgtagaccacaggactccttcaaatccttttcctttttctttctcttcaaatttttcaaaggttttacttcccggcccttttgagtgtgagattgcaacgagtcataaaccctgcttttaacctctcgtcccttaaataatttccttgaagttgtatctgtagtctgcttctttcccttcacaatatcaagcttcgacatggctgtacataatttcgccattggagttttaaactctactgaaatcttggtcctgcaaaccttctttggagactggaaaaccaaaccttttgcaatagctctagtctttggcaccacaatgttatttcccttgggattccgaacacttttaaatgtatctggatttgatattcgctttctattccttggagtagtcaaagcttttgttgctgcatttgttttcttcaaattggcttttggggttgcagtgatctttgagagtgatttgttcttatctttcaagtcaaatagcctgcgagaaatcgaaggaactaccggcattcttgttattttaggcttggatgattttgcaggagctgtaagtgggcacttgggactagaggaactgacaaaagcaaaagcaagagcattatatgagcaaaagatagatgatagaaattattttagcaaacttagtcattaaagctaggtacctcggaggtttcttgtatagtgctttccgaaaccgtatattaggactcctcgctgccataacctgtaaaactcaacaatttgaagcctaaatattagattagtttacacatgaaagcaactcaaatcaaaacggaaatttataactaacccgaagaataaaattcttttctattgcttcagggtcaagttcctcttcatgttttctatcacatcctattgaaaaagaaatagtaagagaagagattcgatgtcaaatgtatgcattcccagctaaggtaaacccaatttggaaagaaaactgtatacttagacaattttggaacgagaattctcaaccaaacatattaagaaaatagtaatgagctacaaagtataacagaaactcaactctttcaagttcaggtgatttgaagaaccatccaaaattacctaatatatataggtaaaaggtttcagtgagctgataaattttcataattcagtttctattctttttctccatttttcttggctaccaaacaaacaagcctacaatctcaaattaagtaataaaacaacataacaaactcaaatataatcagatcaagtaagaattgaaacattataaaagaaaaactagccagagcaaaaaaccaaaaatagaaactaagttcaaaaagtgatggcaagaaagaatttaatttcaacacgaaccgaagcgcaagcagaaccagtaacgatcgtcgggacagcactgttcgggtatagtgaagtcaacgaacttgggtgcttcaatcttctcataaaagtcatcccctcgtccgccatcttcatcgttgatctgctccgacaagtgaggctcctccattcgtagagaaaagctaggcaggcagagaaactggatttggaagtggaagatagtggagcgttgtctgggtttgttatgggacacggtgaatggtaatggtgagagtttttaaatttgggagtttgggaaagaggaaagagaaaaatcggctttgggttcttcactctgtaagtagccccgttgcaaaagagttttttttttttttatattttaatattttcggacaagaaggccaagaaaacggcataagcaggggcctttaggtcatttcatgtggttgtaacgggaagatctcggctcttctggtccctacttacctcttagttaattacttactagacgcacgtggaacacattaatgtcaagcccaagaccaaggccaagcccaatcctaggcccaaatttgacccatcaactaatactatcttcttcttctttttaaacaagaatagaaaactccattaaataagaatagcgaaatcaatcattactatattgttaatggcaaaagaaatattgctagtaaccgaaaatacaatatgagcaagacaataagtagagttgttagcatgcttcctgtttattgagtcgtatttcttctttattatttgagcaatagtgttgtaagttacttgcctataatcttccattatgacatccaatgagcaggtgtggttgttgacatattttctaattttaaatgtttgtgtttgtttcaacttt

SEQ ID NO: 18397 - DNA, 10354 bp, Cannabis sativa
  modified_base (7947)..(7949): a, c, t, g, unknown or other
gagagagagagagagagatggcaaaattatctatgaaatattgcacttgtcaagttttacccatacattttgttgcattgcaaaagtagatgggcaaaactagacaagggcaatagtttaggatgaaatttataatttgtccaataaaaaatggctagaagaaccaattacaaagaggagacagataggtatggtgtgatggagtattgtaatgggatacacaagggtggaatggaattgtttcttttcccacccaatctatgacaattccatctaaactgtaatgagttatccaattgggaaatcttttcccatatgactttatcaaccacaatagaaaggaatggcttttgttccattactttccgttcccttacctccaaccaaacattatctttagtgaaagccattcaagaaaattagacaaaactatcatttaaaggaaatgtaaaagagaattaataacactcacgagagcttcataaagtgtcaaccaaatcaattcatattaaagtacgtagatagagtgacgtgcagcaaaagtaatttgaaactaatatgaaataacttggttggcactctatctagtaagtactaactagctagcacctattagagctccaatcgattaactcatcaacattcaaaatttcaaatagagacatagcacttacataagcaacactgagtaattgacgacaaaagaggtggatcaagagaatgaaaccattggttgatagcaagaacacacatttgagtttcagacggaagccttacaaaggggccagagcaaatacttcctgcaagagaaaggtacaataaggtggttagcacttagcagtattttcctgacctgttttctgatcgcttgtaataaaaacaatatacttttctaaaaaaaaattaattgttaccatcatcaagacgagttatgtaaagttctcgcagcgagtattgtataaattcaaattcacatgccaaggaagggttctttccacaactcactgcaatatggcgtagaaggcgtactacagcctgcagaatttaatatgcaacttatgagtataagcaaaaataacttttgagatacagtacccaatataatccttcacaccactgcttaaatttgacacctttctgcctgatccaagaactgtttataatgtagtgtaaattattacctcaccgcaagattgattattctcacaaagcaatagcaactccgaaagttctcgcatccaagaaatttgatggtccaaaatgtcaggtactaaatacaccatggcttctgtctgtagatttgtataaaattcacatatgggacaaaatttttaaaatcagaactatgtgccatttaaaaaaaaataaataaaggagccaaaaagcaatcagaagcaaaagcaacactcactggacatatcatttgctcgattatcggaatgcaagccaatttaagtgaggattgtggcttgcattccgtaaaagctttggtaaatgcctgaaatcataaacaatagtttagcaaatacatgtaagttctcctggacttctttggcacaacagtatataagagtgaaagcaaaacacagaaaatagataagatggtaacaaaattattaaattaatatctcaaactgattattaaacaccttatgtaattaaatctatcaaaaaaagattattaaataccttaagaagacgggacttccagtcactagacaattgtgaaacgagttgtggaataaaaggaagtagcggaagcaaaattttctcctggactgatttagcagagcgagtgtcactctgtcaaacaccataagcaaaatggttaacatcaagtgaaacctccccactcgtattagataaaaaaaaaaacttcaaacgaaaatgaaagcatctcaaccttcaaggctattataacaaagaacatggtttaacgtattatgcagttataatgtattatataacagttttacgtattatgcagttataacaaagacagttataacgtaatataaaatggttttacgtattatgcagttataacaaagtttaaagaccatgtagtctgttatatagatgcaagaatatagtgctgcaaaattctaacctttccaagcagtgcactttcgataaattcaaagagatgctctaatgaaacagctggagagatccattcactcaagtatagaaatatttcggtgattgtggaattcaaggtataatacatttccgcaccctatcaatgcaaaaaacaaataaaatttataattacaagagcaaagaaaaactgtcaataaagaacttttaaagtcttgccttagattcacaaacatttaagaaaatttcatgcattgccaagaaacacataacaagagaacagaattagcggaaagacattaagctagcaaacgtgaatcgatattaatatacggatgctgaatcattttttaaaaaataaaaagtccagggagaaagatttattaggtttaaatgtgaatcaatctttaccttctctgaaactcgatggacaggattgaggggaaacacaactattaatttctttgatatgactgtggagatagttttagcccaaacatttgcatcaagtcctttgtacgaagaccatagtttcaaattgtctccatatgtaaaacaaagatagaacttgattgaaagatttatgctctgtagcaaacaaagcatacaatcgaatgactgcgcatcatataatggagcagctttaacagaaggaatatattcttcaaaataattcaataaaattggcacaagatctttcactattggaatgatggcagaacaccctacatagacaaacaatgaaaggggaagggaacaattagtgtataatattatcgtgatagttggatacatgagagtttgggaagaaccctataaatgtaggaacaaaatcactacgatgttataatcattccactaaagtactattgctgctcaaactgaaaataataaatgattctttaaaataaaacaagaataatatctcttaggattctctcttttttgttttaagacacaaccaatgcaattgcaagtcaacataactgtgattgaagagtggccaactgggcaagtaaaggctcgagaagtgcacacaaacaaatgtaggaccaaaatcaccatcccacaaaacaactactgctgccccaaaatgaaaagaataaagaattctttaaataagacacgaccaatgcaaggagcgtagatgtgattgaagtgcaggaatgtaaaggcttgagacgtgcacacattacaagttataagtaaaatccatataactctgaatatatagatgctgaaaccattccataaaaaaattgggcaatatgacaagccaatcggagaatcaaacaaaacacacaaacagcaatatcaacagcacggtccaggaacttgcacataccatcagattctgtagatgtatcaggctctaaagcatgcaacactcttcgttcaacaaccttctaaatcaacagaaagcaataagtagcagtttaaaagagagaataaaaaataaagtaacaaaacacaaacatagataaaagcaaattaataacataagaattagcagtaaacatttagcgaaaaaaaaatagtcaaaagaaatcaatccagctagactttgcctcaatttgctaaaaaattcatgtaatacaaaattgagaagtataacatgttaaacatatcatgcgcatttacttttgaaattgacttattttggcacatcccaaaagagaatagtaaagtgaacaaaccatataggcaaaatgaaaacaaaacataagccctaaacaagaatggtttatggaatgaaaatctgatagaactctacaagaactctcagtcaatctctgaagctcctctctttatttcacaaacatggaatgagagacttaagtatagaacatataaagaaacagaaacactctccaagagtctaaaactccttattatcatctacttccagccattttatacgcttcaaattccctaacaactctaacagctaactcagcaaactattagttagttacatcttcacaaaactaaatcagttatgaacctatcacaccctaatctatgtaaaggttatataatcaactatcaattaataaatgttgtatttaattcattatggcattgaatcacctatacagcatcagtacatgtcattgaatctacaaaacaagtgcaatgaaaaaataaaatataataaaaattctgtaagaaacaacatagatgacaatcaggaaataaggagctactttttcagctgaggcatccttttccttattaggaggcaacaacgacaagcaatgaagtagcccagaaagaatagtcttaagctttcccttttcttgaaaataaaacttgttcatctgcaacatatccccgtagttgtggaaaatctgtcctgaaccaaacaataaaaagtcttaaaagaactggcaaatggaaaataggctagttggtgagataaataatggagttagctgatgatctaaccaaaaaaaaccatgatcccttgcctaataaaataatgaatgcaattgaatcaaagaaacataaaaaggcaagccagcaaacatttggagcacgagaatattgtccactaagaaacgggtaatttccaaacaatatatcaatgtttgaaagaacagttttgaggcggaaaaaagatcgaacaaggcatagccttggtatgcagcaaggaggtgtatgcctcacacgatggtgaggcaatagaatctagacaatttatgagatattaatgtttcagttttatgaaaaatgttatggtatgctttctgatacattttattctatgtttcgagttttatgagacggagtcatctttgatatttttaagtgttttaaaaatatttcttcaattatatatttgaggcttactcattgcctcacaaatacaaaacgcaagggcgaggcttaaaagctctatttcaaacattgcaatatatgacaattttttcacttactcttgcaaattttataaaatacaataagggggaaaaaagaaagcaaaaatgtgcatggaaaaaaatccagataccttttcagcatattgaaagagagaatcaggatagtgttggacaacaagctcaagaaatctaaaagctgtaacccgaacttccactgcaaaatttgtcattgcatgaaatatgtaggtcatcaacaaggaaacaaacatcccttcatattcctggtcaattaaatcaatgaatagtcaaatttaaattcaaaacaaactattggtaatacaagaaagttacactagaaacatgataaagacaacgacagtatgtgtggaatgtaaaagggtaacctgtgtcgcgttatgggttgggttgcccaacaccctagaatatggcatatcgacattggttcaatttagtaacaggtcccacatatctcaagttaaaattttaaattcaaatatgcaggagccgatattcgtttgtgacaatagtgtcattgggtgatgggcacaatggtcaaatggtgctctttagcatttctcttccaaattacatgtatagggagaaagaccataccagcaactttaatataatttaacaataaacacatcaacgagcttatttaagctaattatctcatgtaaatctcaccggtacaatgatccactcacaattacttattcaatgttttatttgaaagcaaaatagctagcagtgaaaagagccacaattcaagcagcaataataaaaatgttttctagatgttcagaagttgaatgctaaataaaaaaaaaacctcttgctttcaataaccatatttgctaatcaaaaaaacttttacctcattacatcctgggaaaatcaccgacttaaataattgatatagagtctctctaactgctttatcatcatcaccaacacgttctcgaagtttttcaataacagcgtacttgtgcagggatagctccaatggatttgcaagtaatagatcccgaatacccatcaaagcatctttaaatagaaataaaagataagttagcaccatgctattaggtttagcttgaatagccacatcccacttctaatattgagttttagagttcacatcaacccctcagttggcttagcgagtttgagttctaaaactgagtcctcccattgaatcctaatctatacaaggattttgttacaagagaatacctttacgaactttggcattacgatgcgaagattgctgaagaagttccttcaaagttaagcctcttttattcactgctaacccaactttgtctgctgccacgctctgttcaggaagaataattgctgttcaaaaagcaatattaaactcttgttatatttctacgctccaagacatttagaattcaaaactgctgcctctttcatatcaattagaagattttgaatttcataagttttcttaaaagtaattactaataactacttactcaattaggctgttaaagtaagtacttgggtttattccattttttgtttcaggaaaaacaagcaggaaacttggtcaaaaattgcaaaaacaaatggaattttagtcaatacctttggatttaatttcagtatttgtagcgttcttcgcaggaggcaattttctaccaatctttcgctttattttctgcaagaatataccaaatcatcagcattcattcactcatataatcccttatacagattgaaagtaacaatacgagtttatcaatcaattttataattactttgaagtcaatgcctccctttttttgcttcttcgatggagcctttgacggtgccataatatatttctacagaaaaaagacacaaatctcagacttagataagttgcgatttctgggaatataatggagtaatatgtaaaagctaagataaaccagttgaagaagaacatgaaaacagaagtgcttgtgatcacaaccgtcaatcaagtagttcttaactgaaaaaagtgactacgccctcgtatttcagaaaaaggaaaagaatcaactaatccgaaatttcaaatttattggcaaaggcattgagaaccctaaattcctaccttcttcaacagtagtacagccagaattggccacttccggcgagaacgacgggcagtgaagaagaagaagaaggttgtgaaaggaaaaaatggagtattattatggctgctgggaatgataaaccccagggttttcgtgtttgggctattcattgggcttgggtttcgtaagttgggctattccttgggcttgggtttcgtaagttgggctatttgttcaggatattttcataaatacctaaaataaagtaaaaaaaaataaggttttatgaaattttaaacatttgtatggtttataaaattttatttacaaaaaaatacatttatgttatttttatattgtaatatgttattttgttgttagtttggccaaaccgataagtctaatttgcccaaaggatagaagtcaatacttcacatatgtaaaattctaaaataaataaacaaataaattattatttaaagtactttatgtaaaaaaattcttcaactaattgacaacggattttccattatagaaaaaataataagtgtacttaattacttcacttttaaaatattggaacctatgctagaaaagtaattaatggaaattaccattttttttctattttaactttgacatccttaaaatttttcaaaataagaaaaaaaaattaaggagaattatcccatatattattttttaattttttcaaaaaaaaaattaagatttaagttgcttcggtattttttatgtgggttgcaatatgaattttagttgtgatttcgttagttattataatgaattctgtgtagaattatgtaaaaatgtaaaaaaaaaataataataannntaataataaaaaaaaactattttaaagtgtaaaataaaaaaaaaatcaaatttaattggttgcttggattttttaacaagaatttctagggtgttggatgtcatatctcaaaatattattaagattagactatagtgcaaaatatctttcttctaaaaatgttattttgccattaaaacattaaatcgattgaatggaatcatacatcacacactagggatggtaataaaattcatggttacgggtactcgtagttatttgatctgaactgggagagaaataacagttcaaatgggaaaataataaagatggggaattaccacattgcacattgcacatatttatatacttttattgcttctcaactaattttgtaagatataaagtctaaaatagtatttatcttaaaatattttaaaatcttctttattttatagtatttgatgtgagtgcttaacatatgctatactaaccatgttgatgttaatgtagcctcaatatcttagtgttttcttttttcaaaaaaaaaaaaaagaacaagctctagctaggttatggtatatcctagttgtgattaattatttttatttttctttttgtatacatttgttgagattgattcttatatgtgttattcaaattgtccatctctttctatatatatgatttaaaatcaatgatacaacgacaataatttattcataccacatgcaaaattatcataatttatcttagaaaccattatttaaatatgtattttctacaaagattctcaagttataccacatggcatttcattgctacaatcacaaactaccattatttaattaagataacagttgaacttttgatcaaaataatttataaatatcgaattaattgttagattaaacttaagcagacattgaagtaatataaatgataatgaaaatttataactatacgtattgttccaagtaataaagtgtctaagtacaaatatcgtcctacaaaaattattaccaaatactaataattatttttcaactttctatttggcaagtaaaaatttaaggttgattgacattgaagaagcttcattgaagagttggtagcccttggactgaaaaagttgaagacaaccatgttgttggacttggcaatgacattgaagagttggtagcctttttgactgaaaaagagaactctcgtaaatataaggttatttcgttacgaggaacgggaggtttggggaaggctactcttgcaagaaaggtctatcagcatcctcatgttagggaacactttgattgtcatgcttgggtttcacttctcccacataaaaaagttaactgatgctgaattaaccaagaaccttcatgactttctgaaagagttgaaatgtttggtggtccttgatgatatacggaccaccacaacctgggatcttctaaaacatgcactccctacttaaggagacacatctagcaagatcttactcactactcggaaaaataatgtagctttgcatgtggatcaacatggtttcatccatgaatctcatttgctcaataacaaggagagttgggagctgtttcagaacaagtactcctatgttgcaacagatccatcatcaagtaattatacaaatcactctttctaatgcaatgatcataatattcctttttattttgctaccatttgtatctatacatattatgtttatgttcctagtttgttaaacacagatatgtttagctttgccagagtttgctaactatgctaatacatattagttcttccattcatctatagaaaaatgcatgtagcattagtgagataggatctaagtggcagagctcaatttaattatactttatgcatattgcatatgcttttacatgatgacaatccaatagtattactatgtaagcttccacaactaaagtttcactagatgatgaagaaaggaagaaagaactagcggtagagatgcttagaaagtgctctgttctaaaagtactaatgctgatgattttattcatatggttcgaaaaatagatgaatctctcaggagctactacacaagatggaagagttgtctgccaagaaagagtattgagtcacgtatgtaatcagcttagagttttgattgttggtcatgaattcgtggattgccctttttttttctgaagtttcctaaacaatttgggaatctaatccatctaaggttattaagtattccttattggccaactagaaagattccatcttttggcaatttaagatgactgcagactttgagaaagagcaagaaaacatatttttagtagggggcatagaattgtggaaacttaggtcacgtttggttgggaggaataaaaatatagaaataggaatgagaatgggaataggaataaaaatag

SEQ ID NO: 18398 - DNA, 3504 bp, Cannabis sativa
agaagtgttgctataagaagactttggttggtttttggaaaaaaatgaaaacatgttattcctttaatgagagcagcctaagctatgatctaggatattctcattgtttctctttcagatgaaaaagaaaggtgtaaaaatattttctttatgatataaaagtaaaagctgtttattttaacactaaaatagaacatggattcttgaataagtgtcattaaacaatcaaaatcatagaatctcccttaaacaatgattttgatattagataaaaaaaattggataaatatatagaaaaattttagaatgcacccactaaattctttatctattttgacatttgagagaattttttatgctaaaaatagagttcaaatagtctattttacatgcttatttaaaggctaaatactattttggactttctattttgcaaaagttacatattagatcttctattttggatgatgtagtatatgctatagttatttttacaatgcacactcttaaaaggaatgcacccttatttgttttggtatttaaaatatttttttagtaaatttttttctcatggttatgtatgctatagttatttaagacatcttataaaaaattttttgcacgtgtgattttcttttgatacactcgtgtgaaataaactttttgaaattattctaaatttttaaaaattttacaaatgtctcaataattataacatacaaaattataaaaaaaattaaaataaaaaattattcggaatgtcaaaatagataaatggtacacatatactctatactcttcttatattcttttattttatttataattttttttaaagtctattatttttatttatttatttttttaatattgtactaattttagcgcggtcactttaagatattttccatgttactcttttatctggagattttttttttaaacacattacatataaaaaataaaaaaaaaatatgtttgaattaaatataaattaaaagtaaatatagttaattgataaataaaaatagtatttcccttttaagtgttttgaagtataaaaggaagagagtcaaattgtttaggcattgatgataagatgccattcttcaaaacccctttcaatggctactcagtcaaattcagtcccttctacgagaaccgcttagccgtagccaccgcccaaaacttcggaatcctcggcaacggccgtcttcacgtcctcgacctctccccttctcccggcggcccaattaccgagctcgccggatacgacaccgccgacggagtctacgacatcgcatggtccgaatcccacgattccttactcgtcgccgccatagccgatggctccgtcaagctctacgacctagctcttccacccacttcaaaccccattcgctctctcaaagaacacactcgcgaagttcagtccgccgattacaaccctattcgccgcgattctttcataacctcgtcttgggacgatacgatcaagctgtggactttagatcgacccacgagtgtacggactttcaaggaacacgcgtactgcgtctacgctgccgtttggaaccctcgccacggcgatgttttcgcttccgcttcgggggattgtaccgtacggatctgggatgttcgtgagcctggatcgactatgattctacctgctcacgagtttgagattctctcctgtgattggaacaagtacgacgattgttgtatcgttactggttcggtggacaaatcgattaaggtttgggatgtgaggagtttcagaacacctgtttcggttcttaatggacacgagtatgcagttaggaaggtgaaattttctcctcatagacagagtttgattgtttcttgttcgtatgatatgtctgtttgtttgtgggattatatggttgaagatgctcttgttgggaggtatgatcatcatactgaatttgctgttggagttgatatgagtgttcttgttgatgggctttttgctagcactggttgggatgagcttgtttatgtttggcaacatggcactgatcccagagcaccttaaaaatagcttctttttcttgactataatgtggctgagtttgttttgggcaataataaataatagtgtaatgataatgttatggtaatgtgttttgatataaataaaggtttgatttagtgcttctctctgtaaagaatacagagaaagacaaaagcttgattgatttcatatcattaatgaatatgttattgtttacatgtattctcctaaagaaaaaacattaaagttttaaaatagaaaataagtttagaatatatgatatgttaaagctgcaccaattaaacatcaattctcaagtatgcaagatagtataattttcctatcttactatgaaaaatctaaacaaagaaattctcatgcattatacaagttgtaattattagcttagccttttcataactagatctagcttatcaatacttacaaccaataagtataatttaaaaacagtacactcacttgaatgaacaaagacaaatttgttaaaatcctgcataaaattaattatattaaaatataggaattcatagtcattcaagacttaataaaattagttcatatttactctagctagcatactctaaaataaattataatactccagggctacaaataagtttttataaaatttagaggaataaaaaaagtaaaaataaatagaaaggataaatcctataaatgagtgatggagcttcttttgaccttatgcttgtacaactttgaattccccttctttaactctttctctttctgtactttttttgatgcagtaaatttcttcttaaagatgacagctaagaattgtgttcctctaaaatagtgtaatggagactaggttatattatctttctttttcacaaaaatatctttcataaaaatcaattctacatgtgtcctatgaatttttttaaaacttcatcacaaatcagttacaaaccacatgtatttatgacaccttacctattttttgctacatcaattaatgacttgtggcatcatttttttatacattaatttcaccattcagcccatgctacttttattacagcaaaatccttgcaaaactttacacatcaaaaatacaaggaaaataactaaatataagtaaaatacatagaatttaaattcaaaagcatgacaaataagtcttcattccagagttattacatatatgatttaaattaaatattttatgaaaatctcatatctctaatgtatttattctgttcttattgtttactccgataaatatttatataaatcaaacggaaaactattttcattagcaaatcttctatatgtgaagtgtttttgaatcataaaatgttacaaaaaaaatctatttttcctttcttttctaatatttaaaattcctcatttttacattttttttaataataatttttcttaaatgcctgtaatatctaaccgttgaatagtaaattttg

SEQ ID NO: 18399 - DNA, 9136 bp, Cannabis sativa
ctcttccgatcttgagttttatttagggcataaaacccaacaagtttgaagtatgatcaataggcaaattgaatattttattaagtttattagtgatcaatatagatgggtgtccaaggtgagagtgtcattggtttttattacaagaaacattgcagaaagtaaaaggggtatctcgagatggagaacatgcttcctgttgaatgtagtataggttgtcaattttattagttttcccaatcctcaatgtctgagaaagctcctaaataaaacattgattagaagtaaaaatcatgttagtagagcacctctttaatagtgagctaactaatagcaagttgaatcaaaattgtggaacataatgaacattagtaagagtactattgcgattaataataatcgttctaacttttgtaattttaactggagtgtcatcaggtagggtaacaaaaatagcatgattataggattgaaaagaatgaaagcatctactatcatagcagacaagatgagttgctccactatcaacaatctaataagtgtgaggaaaatcaattttgttaccagaaaaattagtgatagcaggggtgtcattggatgtggaagcagttgttgtagttgttatgtcaacatggagattagttgttgacattgatcagctgtgagctgagaaaagttgatctcagtagtggatccaaaaacttgagattcctgaggtgtttgttttgttgattgatttttatttggtttttgattagatgcatcaagaagccttctattgccatagcctggaggaaaaccatgtaagaaatagcatttatctttgaaatgcccgggttttgggcagtgggaacacattggatgcatctttctatttcttgatggaagattggctactgcatcagaggttgcaacagtagttggagtagtagcagcaataggggcattattacgagtatctagagttctttttcgttctcgatgaatgatcatagaaaaaactttatttaaaggaggccagggatcatacattaaaatctaggccctaacaacatgatatgattcatttaaaccagtaaggaattgaagaacttggtcatgatcaatttgacgttgatgttgagctactgcaacataggtacatggaatacgtgggtataattgattgatttcatcccaaattataattaatttggtgaagtatgtgctgattggatcgtctccttgatgaaggtagagtaaagattcatttagttcgaagatccgagggccattcccttagttaaaatgattgttcaaggttgtccacatctcagcaactgtttccaaatacattatgatgtcaataatatcaagaaaaactgagtgtataatccaagacataaccatttagttctaacgggtccaagagctaagaagaacatcatcaggagtgccatcaagaaatagagtcttatttcgagcgtcaatggaaatcatgaaatcttatttccatggctgaaaattttgatcggtgagcaccagagtagtgagggcgagacttggatgattagttatgcttaagtagtaagaattacgaatatcatcataagttgcgggatcttagacagcaggtcttggagctggtaatggagaaggagcatgggttctaggagaatgtttagatggtggtggaacaatcgaattcatggcatcgatcacaaggacatcgccggtgatggtagctaaaggtgttgctctgattctcaccattgttgaatgctttgaagttcttcgaagaataaatcactagttttcatttgataccacattaggaaaataatggattgaatatactctgttttattatttgtaaaaaactttgtattacaaaggagaaagagctctatatataggctcattgatagaggaaatacaatgtaacaaaccctttgattaattaacggaacctaacaaactaatcaagtgaacctaactaactaactaattctaataattacccttaatgtcattctttaaaaaattagtaggggaagttctccctttcttttctccatatatgaaatcaagttcttcttttcctaaatttagtaaattaaataaataaatgtaaagaaatgactcatttaccattaattctcatttcttattagtaaacattgtcataaataattgtatatataactaaaacaaatttaaattaccataacaaaaaaaaaaaaaaattcatttaatttaccctacatttaacttagagatgattatgcaatccaacgttaatatcaaaatatttataatattatttctgtcaatttaattatttaaaatgtcatggttgttttattacctcatgacatgcatactgagataaaaaagtcattatcttctctcgcgctgtggctaatagtaatacatagttttttgtctctctttctaaatttgagtttctttttttttaaaaaaaaaagaataaataaatgaaaaacttaaatggtggaacatactcatattctctctttttaataattttaaaaattattttggctataccgatgatcgtttggtatgaagagttgcaccaacgaaacctactctttattgtgataattttaatatgtgagaagtatatatttttttactatcaccaaaaaagtaagacaaattaaaagttatcttttagtttcttttaatttaattaactaaaaagtgatcaaaatttaatataataaaaaaaataaagcatatgtttaaaatgttttccacttacactattattatttggattcaaaattggtattgtgacaatttatttttcattgtgctcattttagcatgtgagaaacatatttttgattatcactaaaataaatgattgaaatcaagagtaacttttaagtttctttttaatttagttagcaaaaataattaaactttcaatttaaataaagtttaatatttcaaacaattatatatgttactaaaatgtagtttgtcatttatattaaaagtttttagatagtattatacataatcttatttggtaacaattttgacaagtttctaaaataaaaaatcacataatatcttaaaattcaatacagcaaccaacatcacagattattttataattttgttaattgcgttccttgccatgagaagtatcatggcctcccttgctttgcaggtagaagtaactctaacttatttcaatctattcgtgataaagtttggaataaattctttggttggaaagccaaatatttttctgtgaacggtcggaaagttctccttaaatctatcattcagtctattctaacctatgcgatgaacatgttttgccttcctatgaaactggttgaggaaatttatagattttgtgctagattttggtggggaggtgatgatgagaatagaaaagttcattggtgtacatgggaacgtctatgtttgcataaaaatgatggtggtatgatattttaggatctctttgtttttaataaggccttgttgactaagaaagcttggtatattattcgtttccttggtctctagcggctcgggttatgaagggtctctacttccctaatggaaacatcctctctacagaagaattaaaaaaggactcttttctttggaaaagcatcctgtgggggaaggagctgtctataaagggtggtcgttggcttattggtgatgggtctactgtgagcattaaaagtcaagtttggatctagaaaagtctttgtggctcttacttatgcttttcggcccaaccagtctatctctagggttagtgatcttaaattagataatggagattggaatagaagccttgttgtgtctttgttttcaacaaatgaggctttacaaatcttggctatccctcagtctaaccaacgacaagaccgacttatttagcattataatttgtgaggtttttatatagtgaagagtggttattggaacgccattagagttttgggtagaggataacaagattctcctttgggtccctcatcttggtagaagtatctttggagtcttaccatcccctctaaggtaaaggtgtttatctagagagcttgtttagattggtttcctaccaattctaaccttgcagctcataaggttctaatgattcttacttgcccggtttgtggcttagaaaatgaaacatcctttcatgctcttcggggatgtcctagtcttggagccattgtcagtttggtgaattttgctctcacttcttcctctcttgcgcaagtgaacatgtagtcttttctttgagaacatttgagaacataaatttattctttgtaaagataaaatggaaaggttaatggttccttgttggcgcatttggtatcatcgtaatcactgggttcatgatcataagcttcttgatgtcgaaggtgtgttggggtgggcatttttcttggcgtgcaactaccaggaggccaactcaaaaattggaggagctgttggtatttcacctctctctgttagttcgacggtttttctttcagagcccccgtggtcacctctgcctattggggtgtttaagctaaacatggatgacagattgaggtttagtgaatgtcgtatgggctttggagcagtcattcgtgatcataatggaacttgtattgcttcaattgcttcttagtcgggtgttctttctccatctgtggccgaggctatggctattttggtgggatgttctcatcttggttatgtcaatgctgaagcgaaacagattcccaagttatttccaatttattgaacaagaaagagttgtgcttgacggtctatgattcaattttacaagatatttacttagtttgtaataatctgaatgtttctaagtttttattttataaccgttctgcgaattctattgctcataatcttgccacactgactttctcttttgataatggaagagtttaagggtctggattaccaaagttagtgtaattttcttattttgttttggcttaaggcctaatgaaaaatttctttcattcaaaaaaaaaaaaaaaaaaaaaaacattatagagttacttatattataaatactattatattttctaattttattaataggttatatggtaagtacctatattttattgtacattattaaattctcaagaagattttaaatgtaatgaaaatgttgctaagaaaataaaaagtaactagaaaaaaattatataaaaaaacaaaaagattacttttatcttgatcagcctatttttataccgaaaaatatatatatatgctttctacatttcaaaatatagtttaaaattgcttagaaaaaataacgttaatatatcttaaacaataaaataatataatataacctaaaaattaagaaataaaatcatggttttaaagttagctaatcaaaataagtaatcagatatgtatgagataaaaaattatcttgaaataatttttttaataaaaaataactaattgatatattacttgcatcaaaagtaaccaaaaggttgcttctctttaaaacttacaaatattaaaatttttagaagtgagatatttcaattttttatattttcagtaattttttgaattttagtatttatgcacattggtatttgtataaatattattgttgaaaatatttttgtaaaagattatttttaggtagtataatattaaaaaaaaaaaaaaacccctttaacttgtactatcagatcagatcatcaatatacaccactaccagcagcactcctagaaggctgaaacttatagacaataattgatgccctttttattagccctattcactcttttgttctaatgcactttcttgtgctacatatgtgaaaatatgcaaactttgttaaaattgatacaaacagctaccatcgtcactccttgctgtgggatcaaagttagcagctgatggatcagtgcagccttctttgataggaatgtgaatctgttgagcagctttccctgcatccaaacaagttttagaaaagaaaaagaagatcctttaatatgacacatattcttaaatatagttggttacttggttgtttagtctgttaagttagttggtctggtttatataacagatttctgttatatttgtcattagtcaaagtctattgtttaccttgtataaatactgttccattcatttcaataatatactttttacattactttcactaatacatattgccaaattgttatgtccaatataacaatcttaataccagatgatgctggtgatgatgagagcctataatctattttattttaggtcaaggagtacttgaggaaaatctaagattctaaagctctaaccatagaagtttccggacttgatggagtcatcatttgcatctccaagagctgcctctttcaagtacttgtctgacaactgaactctcttcacattttcttgctcttcaacaagcatgtttccatactcaagaagcttctcaagagtcatatttggctgctcaaatgttggtggtccttctttcgagttcacaagtctctttccaatgttctccactccaatgccagagatccatttcctcacttcatcatcataaactctggctctcagtgcaccaaagaagtctgcaaacacaaggtcacaaatggttttcacttactatgctgaaatgcacaacagctctggcttagattctatgttagttagattatcacctatgttattaccatatgaaaaatgctgttaagttgagtaaaggcaaagtcttaccaatggactgtcctgggaatttgtcaacaagcttgacaatgtcctccctagggatcttatcagttctgaagataccagtacaaacaccgatcctgtcttctcgagtaggtgcccagtagaacttctccattcgaccatcgcgaataagaggcgcatagagagtggagaaatcgtttcccgtgacaatgactgggacacgaggattctcctgcttgttgtacattccagggagttggacattggtggggttatcagcaatgttcatgagtgtagcattgaccatttggttgttaactgtgtactgtgtggttcccccaagcctaccagctcctgcatcaagatcgttaatgaacagacaacacattttccctttcttgattatgtccgccgcctcacggtacctctgccttaccaactttgcaggctcaccggcatttccactttccaattcaccagcactcatcatgattggactaatacattcgaattcaaactatatcagtgtatggatcttaataccttagcttgaaaacccatgaaatttctaaatcacataaccaaagttaatggaagaacactttgtactcacttgattcccatttttgcaaagacaagttcacattggaatgtttttccctgacctttgcctccccaaatacccaaaatcaaaggagtctgcaatcacaacaatctatcaatatcttcccaaatatttcacattctcttaaaatattagtagcaatagcacttagatataaacagaccttaatgttaggcaagttcaagaagttcttagtgatgtggacaacaagtttgtccatgaaagctggcgcaatgtagaagccatccatattattgtccatattatacctattacaaaattcagtatcacttattatacaaaaccctcaaatgggatcaaaacacataaccaatatacatatataaagatagttttatatgtttacttactgacgaagaccagcactgatatagtcataggagctcatgacagcatcatgagtcccagaaccaattggagcttggaagagagagtccaccataccctttcctctggtgatgtcttgttgatcatctgacgtatcataggccaatccaccccatttgtccttcgaggtttgcttctcctcatcatattccgccgctaccttcaaattccccactgaaactttatcttgccttatcttacacctctgtatcttcttcaagttattgccccaaaatgccgaaacgctgccgtttaagttcaactaaaacagagagaaaagagagtcactacactactacccttttaagacccacttgaaataatagtgaaagattccatttttcataataatattaagaatgcaaaattgcccatgtaaacatgttcgatgataacgatgaaagttttatgatttgatgattttagtaacaaaagaagagcgggaaaaacagtttaccgttgctttgttcacagctcctccaagggttgagacagcagccattgattggtgttataagtacaaattttcaagttcaacggtggtgattagattatagtatctagctaacttaagagagaacgattgagacttaaatagtatagttttggaggaaagttttgtgtaatctgatccgagggacagggaaatgtgggcgattagcttttatagggatgagtgaaatgtttttggagttttattgagtttgatcagatagtgatgttgttattgtatatgcaaataaaattagtcacataaatatatatatatttatttaaatcatatactgtgggattggcttacgattttctaacggccacaaaaaatgggatttggcttggtgatgatgtagttggtgaggtcgacatatacttatattaacttgtacaaacaaaacggaggcttctaggaacttggttttgaggttagagtttaagctagtgtcttctccactcaaaagtaagtaatttcgttaaatagttgccacaaaaacttagaatatgtaaacatatatcatttaatgttccatcaaaaattttgtttactaagaaaagaaacatttggtacacttcatgttccttcaacttacagcaatttctagactactattaatttgtccgtttttcattgttactcatattctaatgtgtagagtactctattcacattatttataaaattatttaacactcgtgctacttttaaagctttggtgtggtctgtttgttattccttatgtttatgtttccatatatttcttattgtatgtcggttatttaatattgttatgtcctaataggggtttttctcttagttgcaataggaatttgtatgtggaattcaataaaaatac

SEQ ID NO: 18400 - DNA, 3810 bp, Cannabis sativa
cataaaacccaacaggaatatggaagcttcattagtcaaagaaacataatttcttttgcttgtggagaaccttatagctgctcactaaatggttgcacccacacacatgtaattttagacaattttgttgtcttataattgttcctttatctgctttgacttggcttgtgttttcttgttattgttattgtggctgtccgtgcagatacttctgaatcacaaatgttaaagtccttgagcaacaagtttgctgcaaccttagccaaggtaggagacacccaggacaaggggaaggctaaagcaaagacataggcttccacgatttgaaagccatgacctccttcaacctcatcatcgtcagaggtcagggaaattgctcttcttgcgaaggaaagtgctgcggcaccaggttcctcggctcccactggggtggagaagactcttgttgctgtcagggaggcatccaaggaacctgttgctctaggcgagcaagacttagggaatctctactagtggagggagcaacttatgccagtccaatgaatataggaggttcagatgatagtctgaacgggcctgtctttcccaagaagggcacaccaacaaagtctaactacaaagggccaacctcttccccaagctagggtgccaaaaaggaaaaaccttcaaccccaactttatccaatccattgtctacaacaccaccaccaatgaaacaacaacaacaaccataacaacaaaagcaacaatagcaaaacccacaacaccaacggattccgcaacaataataaattttttaacaacaacaagtcaaaaactaaatagttttgtctcatccaaatcaaccacatacacaatctttgtcctctcaaaatataatagagcaatagtttattaggccaacatcctctagccaacctcccagacctaacagttctttcgacaggatcccacagttagacttttctttccccctaaaaccggtcattcatagccaaaaggttctcaccaggatgggcgagaccactatcaccttgagaaggtatcatgaaagggagcaattagtcttttagaaaagaactatttgtggcctaagaacaaaaacataaattttaaccgaaaattccttttgctttcatttcattacacttttaggtttacattaagaagataattttacaaaaacttacatgaaacttaagagagacattaaggcctactcacctcaacctattggtagtatcgatgtaagtggtctacattcaaggcatgcgggacccttgattcatccattctcttaagttgaaatgttctttggcccactttctgcagtattccctatgggccttcccaatttggcccaagtaaccctgtccccaattcttgcaaagttgagaatactcttctcaggacaaggtctctaacatcaaatgtatgattcttgactttggaattaaagtgtcaggaaatttttctttggtacattttgagctaaacttgtgactattcctaaagttcctcgatcaaatctatcgattcttggagcaagaaatggctctgagaaggatcgtaggtatctcatcagtgtgaggggctcgtggcttctattgggattacggcttcacacccgtaagtcatcgcatatggcgtgtgtcctgttgaagttctctcaatggtcttatgggcccagaggactcacagaagctcttctagccaacaagatttgcatacttggagttttttcttcaatgttattttcatgatttttttacggcgagcctgcggcattgtcacatttccagacatactcaatgcaatccttctttattgtgggccaaaaatacccttcgcaaaggattgtctttgacaggctaggaccggatgtgtgatctccaaagaagcctccatgaatttcatggattacagcgctaattttgtttctggcaaaacacctcaaatatagcattgatattccccgatggtaaagctttccatccatgatcacgtatcacggagcatgatattggaccttcgtataggcagctttatctgttggaagatttcccaaactcagaaagttgtaaataggttccgtccaagaatgataattgtcaacaatggaatttacccctggacctcaatgctcgatttctctaggtgacaaatttgcactactctgtgttgaatgatctcaagatttattgcaagtttggcaagcatatctgcaaatgaattttggtcccttgggacctggcggatcttatagcatttcaatacgtgtagcagatcccaagacatcatgacataagcgggaaattttccaccttttgtttgatactcgatagagatttagtttaccgcctgttgggaatcactgtgcacttcaatgtgttggggtccaactcttttagccagctttaagccagtcaacatagcctctattagcttcatttttcaaggcgcaaaaactgaactacaggacactttgtagttgatgcccttacagagagatcaaaatgatccttgctctggttcttttcttatttgacgctctattaacatagaccttctaggtggacagttttgggactggctcctctgggaggtcattcatgctggaacattctactataaaatcaataagggcttggcctttgattgacacccgcgacttgtactgaatgtcaaactggttgagttccatagcccattttaatagcgtgctagaggactcaggcttttgaagcacttggtggaggggatggtttgttagtacctttatggcgtgagcttagaagtacggtctcagctttctagacgcgatcagtaagcaaaatgtcaatttctcaatcattaggtatatggattctgcacccaacaatcttttgcttatgtactagaccgaaaactggacctttccttcctcttgcatgagtacgtcacttatggcatgatcagacactaccaagtataggtataaatcctccccttccataggctttgacaaaattgagctttggtcagatccttttttagctttttgaaagattcctcgcattcttcagtccattaaattttttgttgcctcacagcacattaaagaatgggatatatttgtccgttaattttgaaatgaacctactgagtgcggtgattcaaccggaaacactttgcacatctttatgtttttttggggagggcatgtcaaggaaacccatgatttctctatattttcttcaattttgtgggagctaacaatgaagcccaagaatttcccgggaggaaaccccgaaggtacagtttttggggtttagcttcagcccatacttttgagaattgcaaaaacttcttcaagatctaggccacgctcctcaaaggttttagacttgaccaacatatcatccacgtaaacctccatgtttctctgtaagtgattcttgaacattttgttgaccatccgccgataggtggctctagcagaccaaacggcatcactttgttacagtgtatgccctttttagtttgaaagctggtatgttcctcatctgcgatgtgcatcttaatgaatttatagctggaataggcatccatgaagcttagcaatttgtacccagaagtggtgtctaccatttgatctaatcacgtgagcagaaataaatcttgtgcacaagccttattcatgtgtataaagttgatgcacatcctccacgtgccattgggtttgggaaccaaaatagggttcctaagccagaccaggtataatgcttcctggaggaagtcatcagtagtcagcttgtcaacttctacttt

SEQ ID NO: 18401 - DNA, 4094 bp, Cannabis sativa
tcataccactagaccaaatgcccgttactgtttttcataatttattttttgtactcattatttttaaagcaattttttttttttttttttatttatgttgcagttaatctataacaaagaattaagagagagattgttgggaaataaaatttgagctagcgagaagagatgaaagggagagaggagagagaaggggataaaggtctggtgtggaagcttccggtggtgaagtcaaggcacctgggtaaggttggtcctgccttcggccttggtgctggctgcggtattggctttggcatcggtctcctcggtgctgcaggttttggtccgggaattccaggcttacaacttggttttggaataggtgttggatgtggagttggtattggatttggctatggttttggaagtggcatagcacaggatgaggatcggagatactcgagtgttgggaatctttacagtggttctagaaatattcctacgcaggatgagattggtgcacttgtagatgatcttgtcattagtacaaagaggcttgtaaaggctacttcaaaagaaatagaaaaatggagaaggtgaatttgttggctgcccttttttgtgggtaacattaataaaaggattaacacaaatggggtcacaattatcttggtaagtttgtgttggaagatgcgttttgtgatgggcttaggatcttaatatgtatatgaacggtttctcttatgtctttcaaaaaataaataaagaattctgtcttctgttgaaaaattattcttgttgctattccaaaatactgatgttacaataagcattagatagacttgcatcctttgctgagtgaggaccaagtttcacttaacaacaaaacagggtcattctgggaatttgggatagagacctttgtcacccaaagtgtgaatcataccactacaccaaatggccattattgtaacttttttatatataggattgatttcttttcttgtattacgtttttagttgccggtcctaatgtatagtgttatcttttaaaaataggacatgatatttaataataaacatctagctctttggtttgtgttaatcatattcattagagtaaattgcagttaaatcttcaatattgcgtttaactaccaaatcattttttttgatgggttaacggtttagctttttcatccaattttttctgttaacgtttactttgcctaatccaatattacgtagatgcttttcatgtcattttaattgtgatgatgtcttaaaattatattggtccatataatttatttatttatatattataaaaattatttagaatatcattttaaattaaaaaaagttcaaaaatttggaaaagaaatcaaattttaaatgaataaataaatgaattaaaatgaaaaattcaaaaatagaacctaaattgctccctatctctgcctaaagaaaaccctaatttccaaacaaaaaaattccccctcttttcttctttctctcccttgcttcaaccatggcctccgtcgatagctgcttcaacgaacaaattcttactcacatcaaactagtcttgaaattctgttggaatacatcctcaggaacacttcgagcttgggaagcagacgaaccaaataaattgagaaagttgagagaaaaattgtgtaaactgaaagagattgaatttagattagaccgaattttttgtaaagaattcaaaatcgaaatacaatttgttgtttttggcttcaacaataagtttaggtagtttgaccataaaaaaatgatttggtggttattgaggagcagaagagaattaatgtggaccaatcaaaataggcaaaaaaaagagaagctaacaaatagaagacccctcattcgaaaagacgaacgaagtcttgctcacatcaaactattctcgaaactctgttggaatacatattcagaaaaacttcaagtttgggaaacagacaaaccaaacaaattgagaaagttgagagagaaattgtgtaaactagcagagattgtattttgattagaccaaatttgaaataaataattcaaagtcgaaatacaatttgttgtttagccaattttcgacttcaacaagaagtttaggcaatttgaccttaaaaaaattaatttggtggttaaacgctagaaaaaataaaggattggagatttagtcctagtttactttatttaatatagtcttgttggaataaggtttacatcaattctttccatgtaagagtacaaattctcaacttgctgggaatcaagtaacattaacaacaattaaaaattaattaggaaactaacttataagtactagtagattccttcaccaatttatttaagaagatgacagactaacttacaatgatgcagaggaccaaaaagaaagatgtggtttgaaaccagaaagcaaaataagattagaaggggcattccgagaatcgaactcgggacctctcgcacccaaagcgagaatcataccactagaccaaatgcccattaataaacaagtttgcataatccatatttgacaatttttaaatttttggctatatttgactttattttatactctagaatatatggtttacccaaaggcttgatctgaaagacttgatattatattattatcatgtctaataaaaatttgtttatcttgatagtctcttgtattaaaaccaaacttaaaactcggaaagtagctctagtgtcctgcctttctttgtttcatcatcatttcacaacgtcattggtacaaaagctaccaaaaccaatcctttgttacaaataatgttagcaaaataatttctttcattcttctctgttttctgctttaatatttgggttgcttgttttcctattaaaagaaatcagtacaatactgacattacaatgttcataagtgggcatttggtctagtggtatgattctcgcttagggtgcgagaggtcccgagttcaattctcggaatgcccctgtttttatagtatatgcatattttttttcctcttgttctgaactacaacagcacaaagtttattgtaaaatattaaactatcattaatagaaaaacgtaaagaagttgtgctagcttactgttttacacaagacttttcaaaatgaataaagtaactagagatgctgatacgccatgctaagctactccctaaccaaaaccctgccaaattaattaacacttgggcatgttttgttgcaattcgaagacatgaattagaaaacaaaatatatagaaaaaaaggggcattccgagaattgaactcgggacctctcgcaccctaagcgagaatcataccactagaccaaatgcccatacatggatattgtgatgtttgtattgtaatcattgtgtacgacgagaaaacacgcaacccaaaagttaaagcagaaaacagagaaaaatgaaagcaattattttgctaacaaaggattggtttttggttgctttttccgtttgatgcagttgcttttctatgcattttcttgtctttcttagattgtttggctcaaatacaggcgttcagggttaaaactgttttaatgtgcttaaaaaaatgaacaattttggggcatttcgagattcgaactcaggacctctcgcgcccgaagcgaaaatcatacaactagaccaaatgctctgatgagcctctaattgaatttaaagtcctattttaaaataattaaaaggagagcctacactaaacatctagttttactaataatcaacttcatatgatgtgttcggtgttttaattaggataggcaatgtatgtttgcactttatatgacttttggtttttcaactatatatcattataattagtgattgtggaccaaaatttcatatctattttgtttgcagtgtctaacaactcttattatgacattaattatttaagaagaaaattggaacttataatgtttgcagagggccaaaaattaagatctggtttgaaaacctaacaaaacttggaacagaaaacatagttggggcattccgagaatcgaactcgggacctctcgcacccaaagcgagaatcataccactagaccaaatgccc

SEQ ID NO: 18402 - DNA, 4762 bp, Cannabis sativa
tgtatctgattattttgttatttttatttgatttgcaactaattatttcccgctgtaataatttaattatacatatgttatataaatatattataatgttacatttaaatcacataataataatccatatacatttataggtgtaaagtaggtgttgtaatccataattataatccatttacatttataagcatctaatttaatgtgttatcggttccatcaaccatatatgtaatttctttagcatataatgataaattatatatgataggcacccattccaaaacaaacaaataaatataggtttatataactatcgattcgatacatatgatatattaatgtatctacctttttcttttgtttaaaactaagattttataattaaggcagttcgatccacttaatcagggtaatccgcttacaaaaacgaccaagatttcttaaaactttatcttaatgagtccacgctcgtgcgacaccctgtttgaactcgtgggtcgccttcgtgtccgtgatgcctttggctctatttctctcttttcctccaaaggcctttttttttggtgtactttttattttctttggggaggttctagaaaggcttcacttttgatcttcttcttctggtgatctttaactgctcgctcttgtcttcctcacttggtaatatttcaatactaattttattattgatattatttgtttattggattatgggtttctttaatttccttggtatggtttgcataagttgtaattcttgaggtttattataagctatttcagatttctcacagctgggttttgttttagaagtgaattttctgcttataagcattgtgaagtatttatagttgaccttatttctcatttaaatataaatttgatagtttttaaaactaattttgatgggagaactaactgtgtatattttaccttgtgaaatgaacatgtaaaatgttgttggttctgcagctggatagtatatattgttcgtactgaagttattattattttttttatgtaattatttttattgacttaaagaagtatttttgtttaattatttgttggtatattctttctagtggatcagatttattaagagagcaattggataatggagtcttgtgactgcattgacacacagtggccccctgatgaacttttggtgaaatatcagtatatatcagatgtgctaattgcacttgcatatttctccattcccctggagcttatatatttcgtccaaaaatcagcattctttccatacagatgggtgctcatgcagtttggcgcttttattgttctttgtggagcaacccacttcataaacttgtggacattctctatgcactccaaagcagttgctgtggtgatgaccattgccaagatttcatgtgccattgtttcctgtgcaactgctttgatgcttgttcacattataccagatttgttaagcgttaaaaggcgggaacaatttctcaaagacaaggctgaagaacttgatagggagatgggtcttattcttactcaagaggaaactggaaggcatgttagaatgttgactcatgaaattagaagcacactaaatagagatacaatattgaaaaccacccttgttgagcttggtaggactttaggtctggaggaatgtgcattatggatgccttcaagaagtggtcaggatctacagctttctcacactctaaactttcacatacaagttggttcctatgtcccaataaacactccaatagtcaatgaagtttttaacagtgttcgagcaatgcgtataccatatacgtgcccacttgccagaattcggcctcttgtgggaagatatgtgccccctgaggttgtggctgtgcgggtaccacttctacatctttccaatttccaaattaatgattggcctgacctttctggaagaaactatgcgatcatggttttgactctccctacagatagtgctagacaatggcgagaccatgaattggagttggttgatgttgttgctgatcaggttactttgtaatttttattttccatatttaatggctatttgttaaatatgatatttactaagtttggtatcctaatgcttgctttgcaaaatcttaatttttctcacattttatttcatggtctcattgtaagttatgttcacttaagataatcccctgtagttaagtttcaaagatgatcttatcattgaatcactactgatattccacatgtaatagaaagaatcattccttgaagttgatgctcattcagttgctgtaattgttgtgatagtgtatgcattttacaggtagctgttgctctttcccatgctgctattctggaagagtctatgaggtctcgtgatcagcttatgtcccagaatgttgctttgaaatcagctcaacaagaagcagagatagcgattcatgctcggaatgatttccttgctgtcatgaacaatgaaatgcggacgccaatgcatgcaattattgcactgtcttcacttcttttagagacagacctaactccagagcaaagggttatgatagagactgtactaaagagtagtaaccttttggcaacacttattaatgatgttctggatctttcgagacttgaagacggtagcctaaagttagatattggaacattgaaccttcatggggtgcttggagaggtaaattttatcaataacacaacacaatgccaaacagaatatatatactctctatgcttcattttattacacttagtgttgagcttttttaccctgtaggttattaatttgatcaaacctattgcttcggtcaaaagattacaactgaatttgattcaatccccggatttgccagtctatgctgttggtgacgaaaagcgtcttatgcaaactattctaaatattgttggtaatgctgttaagttcacaaaggagggttacatttcaattatagcttctgttggaaaaccagaatctttaagagagttgcgaccttccgaattctttcccttgtccagtgatggtcatttcttcttacgaattcaggcatgccaacttattatgatttcttttccttttgttatagttttttaatttcttatttatatattgtattctatataactagtgtagctttactattcaagatgtgcctaattaactttgtttctctcttatttttgttatcattttatgtcatttttaaggacaaattactgatatgagcaggtgtaacaattaaagaaccattttgttaaattgtaataattagtattagcgttttgagatggctctggctactgtaatactaacttgtggttcttgtcccatcaatccatttgcttaacctgctacaggttaaggattctggctgcggtattcaccagcaagataaaccccatttattcaccaagtttgtacagcctcaaagtggatctggtcggactgctaatagtggtgctggccttgggcttgccatttgtaaacggtagactcacatttctatctttaacatattatgctcacttgctaatctatatcatttggaaccatccttggtagttacactatgcatttcaagcttaagttaccatttctattggcttggttgcattttagagatatgtaagatagtgaatactatagtactgttgatgcgaagtgtaattatttaactgttattttttaaatggttgaattaggttcgttaatctcatgggaggtcatatttggatcgatagtgagggagttgacaaagggaccacatcttcgtttattgtaaaacttggcatttgcaataatccaaatgactcatccataaatgttcaaatcggagaagtggcaatcccaatgaacattaaccaatgctcatagccatccacacaacaaagatgcaccatggatggtttaccttgatgtgtgaagatatcattgtacatcatcggttgaactggtggtagcagttgcagaccgggtttattggcaggctgaacataattttggttcattgacaaggcaaggcttaccctctttgattgattagtctaatgttgtatgatcacttagtatgagatagatgtcttaacaatgaaaatttactttatatgaaggaaaatgcgcacatctttccaatttcacctttctctcagtcttattattaataattaaatatttcattgattctttggcaattgccacttgaaacctgaaagttcaagataatccgaaagctaattgatcaattttaagtttgaatcgcaagtattaaaactgaaagtgtacatcaatgaacacagaaatgaaaactcattcccattgagtattgcttgggtccccaagaattgggtaaaataaccttcattatgaaatcattcgaaatacattctttggttttgatttacaaatcaaagtaaatggaaatgatttcatacaaaagttaccactacacttgattaacaatcaagaacaaagatataagtccccttagatctcagaagataagatctccttgtgttttcgataagctgaacttcttctagcaaattagtttgaactcccttcagatatgacagatcaatattccttcttcaagtcttgaagatcaaatgattgacaacctgcaaatacaaagattatacaggaaaggaattcgccctagcagcgcaagaatctcaagaagattttatcaaagatgaagaagagttgattagaaaaagcttgatcaattttttatattcaatattttggtacaat

SEQ ID NO: 18403 - DNA, 3205 bp, Cannabis sativa
ggctactcgatgatcgcttcatcagatctttcatcctggaggccatgtctgcaaaagaaaaatagcaaggttagcatacaagtaataaacacaaagagcaagtaaggtaagtgaattactaccatcaattttctcgagatgatttacccaagagaaccgtctaaaggcccttcgtcttcagaagaagactcatcagagctgtcatcagttgcaataaccttgcctttgcctttgtttattgacgtaggttgggcaagtctcactgactcctgtccctcaggcctgattagaactggattatggttcaggtccagggctagggttggggtcggggtcaaggctggggctagggtgcgggtttggggtgtaggtctaaggttggggctggagctggttcagagtccgaggctaaggcctgggtccgggtcctggtcaagtcttgttcatatcggtgtctcaaagtattaatgaagtattttttaaaaaataaaattaatattatttttagaaacattaaccaaaagacttatattttaaaaactttaaaaattattttttgttctcaattttaaaaatacttttttaaaattaaaaacaaaaaataatgacaaacatgctccaattattctttaagagttcgtttggtaccccgtattgtattgtattatatttaattgtattttatataatatttttttatgtaaaactatgagtagtattaacttttatgaatacctaaatatataatattttaatataaattaaaaatttaatataatattatataaaaaaataatatataatctaatttaatataatacaatccaattttccgtaataagttacaaacgaactctaaatatttaggagaacatgtcgaaagtaatatttagctaaattacattaacccaatttgtattgttgttaaaaaaaaattgtattatccctatttattttcactattatttttagcaattttattgttttatttttactgtaactcagtcccaattcccaaacgaaaagggcgaagccgagtcatgacgacgattcgcagattttgctgcaatgatcttctccgattcgcctctgtaaattttgatcacctcactgaaaccgtaagagtcccttgttttcattttagtttcttcgctgaggtgggcataaccattatgcatttaatttattaagcatggagttttctggtgttatttacagttcaacatgtccttctacatgacctatttagcaaggtggccagattactttcatgtcgcagaagcccctggaaaccgagtaatgggttacagtaagctttttcaaatttaaaccctaaacttgttgtttttgaccttcagaagttctccctcttttctgtttgttcgtctttttttttttcattattattattgttttggctatgaaaggtatgttctttaattttacttatatataggcaacattgcaatatattgtttattccctctttttttatggtagcaaagtttttaaatcattgggcggatgaaatagataatgaattggaagaaattggtttactattacgtgctgtcttgttcaattaggaatcataaattgtttatgtgtcatagacctctaaatatttcacaacagagttgttgaggctgaaccactaaaattaataaatggtgctggtgtttctaaggtttttactgattcaggagtcaatcagtttaaccggagtgtgaatggatattgctttaccttaggtagttgggattgggctagttgtttagtttagttagaattgtatttgactttctgggttgtttttagtagtttacttatggatgaaacactgcgttgctattcatcaattgcagttatgggaaaagttgaagggcaaggtgaatcttggcatggtcatgtaactgctgtaactgttgctccagaataccgcaggcaacaattagcgaagaaactcatgaacctgcttgaggacatcagtgacaagatgtaaggagttctcatttagttatagctgctcactcatctcagaagtttgttcatttaaggatataagtattagcacctatttgtataaatcatttttatgtcatgtgctatatcagctacttactttttgtttgttgaaaaaaaaaaaagaaaaaaaccaaagcttgtgattgcatgatggtcatatatgcagagatttttcatttgtgtggtgtgtgtgtgtgtgctcttataatttaatttatgatatttgctctcatgatgttagggtcaagttctgaaccatgctgtaccgttatttatgttgtgatgcttgaagctgtatttgagtgtatctataaaagagattgaagatttagtggatcatgcaataaagattgagaattttaagttatgtactcaagcttgttgttgatgagtttttcttggcagtgataaaggttattttgtggatctattcgtacgagcatcaaacacaccagcaataaagatgtatgaaaaggtatcattgctgttcatctcgttaaactagaatgactattgctgccttttgccactactattttttttttttataattctgcacttatgctagataattttttcttattgaaacccttatatacattgattatgcattatcttgtcatttttccttaaaagttgaatctaacatatttaagctgcatttgcaaagtgatggtttaagctagactttgctgtgaagcatattgcacaaaatggtaacaataggatattcaaatagtcaattcaatttaaacacacacacacacaccaaaaaattaaacaaaaatctgtctttattttagtaatcagatccatctgttgtattggcctgagctagcacccttaagtgtttaaattgtttgatgttttttttttttgaaaaaagatcgtttcattaaataaaagccaaattggctcaaatcagttacaaaggagagcacctggtataacagcagggtcaatcataccagtagtgtttaaatatagtgcccatctagcgatattatgcgccatacaattaagatctctacctatcttaacaaaattacaacccataaattgttttgaacaaaaaaggaaaaaaatcagaaataagagaagaaatctcccagcagtcaacattgccatgcaccgcatgaattacagtactgcagtcagattcaatctcccagcagtcaac

SEQ ID NO: 18404 - DNA, 5280 bp, Cannabis sativa
atataaaagtggcgtaatgactgaatcagattcttagcggttggacttttctactagttaagtaaggtatggatctatttccaattttttgggggttaggttttgtgttttgtattctttagttcgatcattgtttctgtgactaaattattcataatagtttttgctcattaaactgtggtctgtggctagattgtttttcattatgggtctatgacaaatgtgggagtggtgttgtgaaagaatgatatattgaagttgtttgtaatgtatttgataaaatgtcaaagagggatatttttatttttacttctttcattccaggcctgttaattatggtctatgaacaattgccattgagttggtttgttggtcgaataggggtctagatcttgccaatctaggaaagaaatgattcaatggtaagcagacagatgtcatttgatcactaaattatgttttggttttatgttatcttctttcaccgtatgctagcataattgttattttcggactcgaaatttttggcttcagccacttttcatgctctgctttattgtcttgttagaacttttttgccttaatctgttactggttcaacatacagtaagaatatctaaagtgtcataaaatggtttgattgagaccaattagaaggttcaaagacatattgataattctactaagcgtagatatatggttagtttaaggcttcatatgaagtggtagcagtgatgaggagcgagcactagtgggcatggtctcacttatttgctcatgtaacaagttttttggtatgactgtttgctcaaaatacgggcagtactagatggtaacagtgggtccaattaatcatggtttttacatgtattgtctcaattaagaagacatttgttaatggctaggtagggtcccttcacaaagattctaaaggattttcacttttacccttaatttatcttggtaagctgaccactgccccttagaagaaatcattccagagcatcaccgcgcctcagttggaatcctttgatatcttctttttactgctctttcgaggaccctttttgaagttttggaccattatgtgttttttggtttctcttcaaacagtgcctataaactataatggctagctagtctaagaatctataaagtcctattgcttttcttcttatcatggagtatgttgagattgtgaagaggatagagtgacctttatatgtatgtgtgtgtgtgttttgtcttctccatttgttaatgatatttttaactgtcaatgtagccttttaatttgatctttcaatcataattctcttatattgattttgaaaataataaataatggtccttagacaaaaaataaaagttcccaaaacgtatttatgtatatatttatttatttttgaaccaaaaacgaaatatatatatatttgtgtttaatattttaaaaaataaaataaaaaaaacctaagttaacaatagtatttcaactggtttgaatgtgtgaaagttgtatggcatttctgaatttttcttttattattttgttgatctccataggctgagatgtacgggtatgtttccttgttttgctgctttagtatttaaaggaaactcttttgaaaaaaataataatttgcaccgtgtgcatcagatatatgaagtaaaaaattcactctagacctggatggtatcagctggatgtgcatacatgaaaacactcctaagaaattatggtaagtttcaacttgtattcttttgtggcggtcaaagcattggttttatggcttgcatctttgtctgtaatgtatgtttcatttatcatctgcctatctttatctgggttttgcaggaatagcacatcgtttcgatttcaagtttggtaagatttacaatttttcacaaaagtgctcattttcatcaaatgggaatttttcggagtcggaggggaaagttatttcctttgtggatggtggtagtatccctgaaagcccattgaatgctgagtgtacaagacaggtagttgatgaaacatgccatatattggagagcagtccttggggaccttccattgagaattctctgttggcacgttttgagaaacctcaaccagaatcagtcattcgagtgttgaggaagctgaaggatgttaatctagctgtaaattattttcggtggtctgagagacaaattgaccaggcacattgtccagaagcatataattcactaattacggtcatggctaagagtagaaatttcatttggttagatcaaattttggaagaaatgagtgtagcaggaatcggtccatctaattatactactgttgagttagttgtgagctgtatcaagtcacagaaactaagagaagcttttgatctaattcaaaccatgaggaggtttaaattccgcccagcattctcggcttacactaatctgattggagcactatctacagttcatgaagcagatctcatgctcactctctttcatcaaatgcaggagctaggttatgaagtaagtgtgcacttatttacaactgtcattcgtgtgtttgctaaggagggaagagttgatgctgcactctctttgttggatgagatgaagagcaactcgcttaatgctgatattgttctttataatgtatgtatagattgttttggtaaagttggtaaagtggatatggcctggaaattttttcatgaaatgaaagcgaatggtttgaggcctgatgatgttacttatactagcatgataggagttctttgtaaggctgacaaattggaagaagcagttcagttatttgaacagatggatcttaataggacagtaccatgcgcatatgcttataacaccatgattatgggctatagttcagcaggaaaatttgatcaagcatacagcctacttgagaggcaaaaaacaaagggatgcattccaagtgtgattgcatataattgtattcttacgtgtcttgggagaaaagggaaagtggatgaagcgttgagaatttttgaggaaatgaagaaagatgcagtgcccaatcttccaacatataatattctgatagacttgctttgcagagaaggaaagcttgaggctgctttgaaggttcaggatgccatgaaagaagctggcctgtatcctaatgttatgactataaacataatgattgatcgactttgcaaagctcaaaaactcgatgcagcttgttctatatttgaagaaatggattacaaagtttgcaccccaaatgagtttacattttgctctcttatagatggcctgggcaaacaaggaagagtagatgatgcctataagctttatgaaaagatgttggatactgataagattccaactgctattatttatacatctctcattaggaatttttttcggtgtggcaggaaggaggatggtcacaagatatacaaagaaatggtgcagcggggctgtcctcctgatttgatgcttcttaatacctatatggattgcattttcaaagctggtgaaactgagaaaggtagagctttgtttaaggagattaaagctcaaggattcaatcccgatgtgcggagcttctcaatcctaatccatggtcttataaaggctggatttgcacatgaaacttatgagctgttttatgcaatgaaggagcaaggctgtgttttggacacccgagcatacaacactgttattgatggattctgcaaatcaggaaaggtaaacaaagcataccagttgctggaggaaatgaagacgaagggtcaccaacccaccgttgttacctatggctccgtcgttgatggtcttgccaagattgataggcttgatgaagcttatatgctttttgaagaagctaaatcaaagggtatagagttgaatttagttatctacagtagtcttatcgacggattcggtaaggtgggtagagttgatgaagcctatcttataatggaagaattaatgcagaaaggattgacacccaatgtttacacatggaattgcttgcttgatgccctcgtgaaagccgaagaaattgatgaagcccttgtttgctttcagtccatgaaagacttgaactgtgctcccaaccaaataacttatagcattctcataaatggattttgcagagttagaaaatttaccaaggcttttgtgtattggcaagagatgcaaaaacttgggttgaagcccaacacaatcacctacaccacaatgatctctggacttgcaaaggccgggaacatagcagaagctaacagactgtttgaaaggttaaaagctagtggtggaatgcctgattctgctagctataatgctatgatagaagggctaagcagtgcaaatcaagcaatggatgcatatatgctattcgaagaaactcggttgaaaggttttaaaatccatagcaagacttgtgttgtcctcttagattcattgcacaaggctgaatgtctcgagcaggcggcgattgtgggtgctgtcttgaaggaaaccgcaaagtctcagcatgcttcaaggacatggtaatactgtcctcttactcaatggggacatttgcattaaatgcttatataaaaaaaagtggaataaacttttctgtgtggtgggcattttgttgggagagagagtagaggaagaaaagaaattgagttttttggccttggaataacagatttttgtaaaagtggtagtttgtagtatatactaaatatattacccattcttttgcagttttccctttctttcacaattaatgacaatcaacaattgatttcttcagtaaggaaaagaatgttctatgagtggtgactattatatattgattgaaaggcatagtaagcatcttcaacgacatgtaatttaaaatgaaatggctcaaggaggaggaataaaggaaactatgaatatgaacgtgaatgatatgataatgataatgccataatggtaatggaatggatgatttgtttaaatgagtttgtcattgcacttccaatttcagctactatagacatcacatgaatgacttgctctctaaagtgagttaaaaagcatcttgaatattgaaaactataaaaatgttgtattgctattaacattcagaaaaaacatgtaactctttttttttatagaaaaaaaatatattgatgtataccatgtaactctagtgatactgcataaggtgaactaaattaatttggcacatatataccaaaacaaaatattgatatatgaaaattgaaaattgacttaactagtttaaaagatgtaatt

SEQ ID NO: 18405 - DNA, 3205 bp, Cannabis sativa
ataagtttcaagtaggatttaatatcaatgtaacaataaaccagaacaattgaacaaacacttgctgagctaggaatgttagcttcagatacagatccgatattgatagaacagtagaaaaatcgcaagagaaatgaaaggaaaacacctccaggaatttgagagcctggtctgtcccaattcgtctcctctcttcacaccccctttattcccgaaaaactcagcactcagtaacaactctagactctctcggacgagtcagcagtcattacacatcaacccagccatattttaccaatggtctaccattacccccctcacatatgcacttcgttttcaaggtgaaaggatgagaactgttcattgatcacttcaaaactctcccaagaattctcgaaagtgggcaagtgctgttacctgatgaggacttccagcaccgccttctcactgtaacgcatgctctccagtcttgggctcgtctcaaaagtaacaagctagtgttctggtctttgaggaactcatgtcatcagaacataaataatgcaacatgtcaaaattgcaatttgcaagggaattttcaagaagaaactgcaagaagttcctttaaaattaccaaatcaggaaaaaaaaggctaggagactaaaaaaatgcaattaacatagcaaaagcccaacaacaagtgaaacagagcaaatcactacaaatcaaaacaaattgaaaggaaatacctctctcagcatcagtttactaagttcagtctcgagcagtctatgagattgtagacatgccattaatcaacagatcgcaaggtaataagtattttatagtgtgaaaataaaagagcttcacagcttgcaacattcagaactccaagcataaataaaaccactcaacaagcctctgtaagatgaactcgaaaaatgacatgatccattcaaacttagtcacagatgttagaaagaacatacatatgaatgccattaaaagcatcaactaatttttcatttgacaacaaatacatcttcagaaaaccaataatggctcataaattcttttggatcactggtttcagagacgaatctatttcaacatttcatatcactttaataaatatgtctgaccaataataactcataaactctattaaatcactggctgcaaagaagaatctatttcaccattacatatcattttaataaatatctctgcagttgaagcatctgcagaaaaaccccttttcaccatttcattattgaactcaactccccttgatatttcacaattgttgacaagtcctcggatcattatattatatgtcccattatctggggggcatccattttcttccatttctctgaacaaatttaaggcttcacctacaagaccttcacttagaagtccatctatcatgattgtataagcctttacatcaggtctcaagcccttcgatgatagtttgcgaaagagatcctttgcccctgtaaaatctccagctttatacatagctccaatgatgatactgtagataacaatattcactggtaacttcttctcttccatatcctgaaatattttcagtgcctcctccatttgtccatatttgcatagcccatcaagtaaaatggcaaaagtttgaatattaggaagttggccagcagctagcatctctgcaaatagctcttgagcagcatgagttcttcctacggtacacaaaccaccaatgagagtgttgtaagtaacaacatcaggaattaatccattcgatgaagacatttctcgaaacagtgcaagagcttcctctatccccttgttcttacaatgcccattgattattatattataactatgcaagttaatgttgaaatctttcttaaccatctgaaacatttcagttgcctgatcaatttcacctcgcaaacaataaccatccatgactgaacaatatgtgaccaaatccggtttgatgcctctttgtaccatattattaatcagtctttccgcctctacaacatcaccctctttgccaagcatatcaaccaaaacattgaaagtaaatacatcgggtgtaatatttttatcgatcatttgattaaataacctcactgcttcttgccgttggcctagcaagcatgctccatgtatcaagctgttgtaagtaatgacattcggaacaaatcctttcttagtcatttctgagaggagatccaaggcatcaacaactaatccatccttgcagagaccgtcaataacagtgttataagaaattatgttaagcttggttaactttttctccatgttcctcagcaattgtatagctgcagcagtgttgcccaccttacaaaaagcatttagtaatgtgttataagtaactatatcaggctgaaaaccttctgcaatcataatgtaaaagtattctttagcctcatcaactttccccatcttacaaaatccatttatcaatgtgttataagcaattctatcaggcttaaaaccttctgcaatcattatgggaaagtattctttcgccttgtcaacattccccaccttacaaaaaccatgtattaatgtgctataagtaattatattaggcttcaaaccttctgaaatcataccatgaaagtatctttttgcctcgttcatttttcccactctgcaaaagccatttagtagtgtgttataaataattatatcaggcttaggagaaccttcaccaatcataagatgaaagtattctttagccatatcaattttctccaccttgcaaaaaccatttagtaatgtgttataggtaattatatcaggcttaaatccttttcctgctaacataatgtgaaaccaaacttgtgcttcatcaattttaccctcatccacaaaccccttaattaaagtattgagagtaatggtgttgaattcaaacccaaatttgatgaaatttcccaagacaggtagaccaaaacgggtacgctttaaatgagagaagcaattaatcaaaatgcctagcgtatactcatctggcaggattccaactgaaaacatttggttgtagaaagtaatcacaagggaatagtgtttcattttcacaattttaccgaagaattgattgaaacgcacaacagaaggcagaggtcgcaagtggaacattctatcaaacatgttgagagcatctttaacagtacggacttccacctcattggttacagtctg

SEQ ID NO: 18406 - DNA, 5460 bp, Cannabis sativa
aaaaaggaaattaatgggacaaaaatggaaagttaattagataaggactacgtacgctagagtataaaattaagttaattaattaatcaaaagaatcttaaaaattactttgatagaatagaaattaatatatatttttgtatattaattgagtagtactagtctgacatggggctccaacatatcttgttcatgttatggaagcaacaatttgcttaatcaaattaataaagggaatcaactaaatcatatcatagcttttggagttggaattaaaaaattcaattatattttaataaaaagttgtttgaaagtttaagttagtgagacactaatctattttgtttgccatttttcttgggccatgcacaatagagctaacccgttttctattggttaattaaactatgctacctatttaattattattattattcttgtatttgttttagctcttcttttaagaattgtttccaacctcaaaacccaattttcatttctacttagataatttcccacccccctaatttttcttttcttttttgaattattttcttaggaataattagaataaagtaaattataaacgtccattatattttcactatcttcattgaactgaaagacctgaaaaaaaaaataagaagagtaaatatatataccttagaattaaaagatatataccaagttaaaaaacacattatattggaaaactatacttgtcaatgcacaaattaacatctctttgatatttcaatctattgtttttccctcccacaatacccaaatcttcttattaccaccatttttcataatttatttttcaaatataacataatgattcaagttatatccattatgtagagtcttacaaataattaattattaaattaaaatttatcaaactcgatttgaatataattacaaatggtattgggcatcactactttcctttgatatttcttattagaatacagtatatttggttcaaccgagtgaatttctattatttgattgtgtagagatgtaaaattttgttctattaatattatttatagtattctccaccttttttcagactatttatttatttattttgtttagtttgttttattgtcacgtgaattttggatagtactcctacgtaaaataattattactatgtccccttaattatttttcaacttaattactatttcatataggtggcataacacataatgtttgtcattattgtttgcctgttaaattgtttttattgctcatgtttcgaagaattatttgttattttagcttataggagtagtaggcacaattctttatttttaatttgtaaaatgaaaattaaaacttagcatatgtttccttatataattaaagaatatttaaaagcataagttgtcaaatttttaaactcaacccaaatgagcacataaagtaactttaattgttcatatctctaaagtaaaaattaaaatagtctttcaccagcattattttattccaacttttccattggcaaatatttggtgaatatcatagcccattaattaattagagtgtaattaagactagttgggtgttttgatttggcctaagaattttattttattttgtggtcccatgaatcaaataattgaaccaactttccacgttggtggtccattctcccaccacgtgtccacttcgattgtgttgtgatattttgttacaaaaagaaattaagagatcggataccttcaacctcttagttaattttcgtatttgaatatatacatcggaaattttgtttttaaaattttttcataacgaattttattatgcttacaacattatctttgtaatgctgaaattacgtttgaagttttttgaacacgcatgctaattaactagaatatcaaaaaatttatttttcggcattgtaaactattcgaacttttagcaaaaatttatactgtaattatgatgaataccactctgaaaaaaaaaattaaaaaaaaatatttcgacatgtaattttaaccgtgaaaattaactaagagtttgtaattagcacttctctttaattatatttttaaaataaaaaaaaataaaaaataaaagaaggacaaattaatttaggactcgatcttcaaaacaccaaagtccttagtccatacgacgtgtctaatttctatatacatattttttatttattttaatatgaggaatcaatttattattattttcataagaaaaacaaaaattgaaaagtttgatttgatattcttattgacttaagggaggtattttcacaatgtggatcaactacattattaggctttgctacaaagttataagtataaactatgataggtttcccactttccattgatatcggtagatattgcctttttttttttacatactactttgttcactttgtgggttttttcagaccattcattaaattgtattagtaaaaaaacaaaagtgtacttaatgaaggagtcatttatgtaaaatggtaatagttatgattaaaataactaatattatatatagtgaatactctagtgagggtaaatacttggaccatatattttaaaaaaattacaattaaatcatttattttgtaaaatgataaacttgacccttgtattttatgaaataataaaaaatattaacttgagttgattatttttttatcaaaataaaacttaataataacctaatataaaggtgttataacaaaattaattacgttttatttatttgttcatgttggaaactgtcttcaaattgattatattaaattgttgaaaattgagctcagggtcttattatttttactatatattttagaaaattcaggatcatttttgttatttgacaaaatagaagatctaaatagtaattttcactatgccacaccaacccattacgagcccgccaaagagattaacaaatcatggcaacatgacacactttcgacttagaaaaactccccaaaatgaaaccaacttgagaaatcaaatgccaagagaagccataacgcctcattaaccctctgccaacatgcctttactaataggtaataaaccaaaatttgaagaattgatttgaccctataattacacaccaaacaagtaacaaaaacatccacatgcgtatcctttaactgagacaaggttggtagacacctaaaacaagctctccaaagtaaattcttgactttaggtgggattttgaaattccataatgctctccaaaagctagagttactatcttttgaccatctaccatgcaacaactgaagatacttataagcactctaaacactataaatcttgaaagtttcctgaaactaataccaatgattcggaccttgattatcattcaaaataatattcttaataagatgacgaccagttgtattgaataaatcattaagaattttgtcatcccactctcttgcccctgccaccatagtttgttgaaccttcactccctctaaatttagatgggaccaacggacactcctcactaggaagccacgactctcccaaaacatcaatggaagagccatcaacaacacaccacctacatcctactcttaatagcttctaagccgccaggatacttcaccaaacataacttgggtaagaccccaacttagccatcaacaaagtgccatgaggataatatcgtgcctaaaagatgtgactaacaagcgagtctttttgagttaggagacgccacccttattttctaagcatagcaaggttaaaatcatgaaaactatgaaaccctattccctcattatctgtatgcaccaccaacttatcccatgacattcagtaaaaattctcggaccattaactttagagcgccaccaatacttatacgtaatttgctccatctccgaacacaactttaatggaagcaagaaaacgttcatagcatagctgggaagagcttgggcaatagatttcaataagacttccctttttgatctcaaaagccacttactatcctaactttctacccgtgttcgcatcttatctttaaggaagcctaaagtagcattcttgtcctgcctcatagtattaggaagacccaagtataaactctgatcatcagcagccacttgcattatgagaatcgcttgcactctagcacaattgaacttagaagtattaatgctaaaaaagatgaaggattcagcaatattcacatgttgacaagatgcttgttcaaaagtcgccaaaagcttcataatcttaattgtttctttttcatttgcacgataatacaaataattttcatcaacaaacaacttgtgggaaactatcggtgccctcctggtaaccttacacccatgcagccacttattcatttcgaacttcacatttaaggcaaaaaatccttcagcacacaaaatgaataaataaggtgatagaggatcaccttgtctaatcccacaagtaggaataatcggccctagcatttgtcctccatgcataatccaatatctgacttatgtaacactctcgaccataatcaacctcaccaagtacgggtggaaacctatttttaagaggatcgccttaaaattttcaaattcaatacgatcataggctttacttttatcaagttttaaggccatatacccgtaatgaccttgctttttctttttacgaaatcgagaacctcaaaggagattaaaatatcaaaaatcaacctaccaataaaaaaagcactttgagaattcgagatgatttctaaaagaaaatcttttaggctattagccaacactttagtaatgactttacaaagaacattacataagcaaattggtcgaaggtcacccatacataccaataagatgcttcttcttcggaataagaaccatataaatatcatttaaccccatggcaaaatagaaaatgcaaaataattctgaaccaaagaaacaacatcattaccaacaactgaccagaaattttggtaaaaagccggtttcataccatcaggcccagaggacttatcaggatacatctcgaacaaagcatctttacttcttctcctaaaataggccgcaagagagccacattatggacaccagtaatagacatgggtacacaatcaataacctcgtgccagtgaatcgaagaagctaaaaaatattagtaaagtagtccaccgtcatctcacctaaaccatatttccaatccaccgaaatacaactactcgagttcttcaactagtgaatggtattgttctttcgcctagaagtagccctggagtggaaggatctcttgtttctaaccctatccttaagccaaagttgatttgatctctcacgccaaaaagtttccttaattttgatcaagaatgaaagatagctctttcttggcctcctcaaactgctgacaaagaaagattatttcgacgaccttcaagcctcttaataacacc

SEQ ID NO: 18407 - DNA, 5233 bp, Cannabis sativa
atatttaggttttgctaatctattttttaattctgggtattacaaaaatggagagtggggaagttcaggaaggtgggttggctgagaagataagtaatggagtaagggaaaggatagaggatggtggtgagggtattcgagtgacttctaaaagatcccaaattctcagaggcaaaaaaaaaaagatcagggacctaggtcagtagaggatgaagaaagtaagagattgcataatacatttagtgtgttgcaaggaaaaaggggtgtgtcaaaaattggttctcatttaatcaattctttgatatgaactgtcgcaacatcatgagttagaatgttagaggcctcaatagtcttaataaataagaggttgctctcaagttatgtagaataaaggaaataggagttggggctcttcttgaaacaaaatgaggggtaataaggttcaagagttggtttgtaataagttgaagggatgggatagttatacgagtcttatcatagaaggtagaatttcgcttatttggaggaaaaggtttgctagggtgattgttattgaagaaaccaatcaatattgcattgttatgtgaatttgacaatgcacacaactcctttttgtgtgacttttgcttatggatcgaatttcttggaggagaggaagttactttggaaaggtcttgaaaatgcagtttttaatgcagtcaagcattaggttatcttgggagattttaatgcagtttttaactataatgacagagttggcaggagcactataactgctattgaattggaggattctaatgattggcttgctctcaggttagctgatatgttgaaaagagttggctctagctacacttggtcaaacaatcaagaaggaggagacagaacttactcaagaattgatcatgcattgaaaaatgaagagtggttagatttatttcctaactctaatgctacttattgggagacttttttaatcattgtatgattattgtgtcctctactacaatgcaaaatataggatttaaaccttttaaattctataacttttgtgcagagcacatagatttcaaacgagttttggtttggctaccatttattataaaatgttgagattaaagcacatgttcaggaagtttaacaagcagtttgttggggaggttgaggttcagtctcagatggctaaaacttggtatcaagaagctaaagaagtgactcattcgaatcctagatattttttatgcattatgttagagaagaaagcagttgttgaattttgtctgcaagaaaaaaattcttcgaagctttctcatccagagaagtaaaatttcttgctaaaaaagggtgatgacaacacaacttatttttatgcttgtttgaagaagaaaagggaggagaatagaattactagcttcatcaatgattagggacaatgggttgagagctattcagtggttgtgaaccactttcttgatcattttaaaagctatacggggagtcctagcactgctactgtccgggttaagtcagagtgcttggagatgggtaataaactggatttgaaccagcaacttagtctcattcagccttttactcataaaaaaattaaggtagccatgttcagtattcctagctcaaaaagtcttgggcttgctgggtttaattcaaaaaatttctaagttctttggcctgaaattggagaagaagtttataaagttgtgctggatttttttgaaacaggtactgttcctcaccaattcaatgggacagtaataactctagtgccaaaagtagatatgccgagtaaagctattgattttaggcctatagcttattgtactactatttacaagtgtattacaaagctaatgtgcaaaagattagcagtagtgcttccttctcttgtcaatttgaatcaggagggttttataatatagagatcaattgaccataatattctcatcctccaagatttgataaagaactatggtaggaaaaatatttttctaagatgtgcgctaaaaattgacctaagtaaaacctatgatatttttgattggatgtttttagaagatttgctcattggattgaacttcgtaactagatttattaaatggatcatggtttgcttgagagggtcttcctactctcttatgttaaatagaagattgcaagggagtttccatggtaagaagggccttaaactcggggatccaatgtctcccttgttatttgtgatcatcatggactactttactagaaatctaaaattggaagctttaaaaaggaccttcaggtctcagcttatgtgcaagcatgcaaacttgattagtctatgttttgtagatgactaaatcttattctctaaagggtctatccaggctgtttgacatctcaaggaggcttttgaggagtttagcaaagttttgggtattgtagctaatatatctaagtctcatgtttattttggcagggttactgatgatgttaaacatgggattttggaggtgttggagcttgaagagggttcttttcctctaaaatacttaggggtctcgatgagaccaaccaagtggaggaaggaagattgtgagcctattgttaagaaaataacgttgagattgcttacctgggcaacaaggcacttatcttttgcagaccaagctcaattgattcattcggtgttattggtattgcttaactattggatgaaaatctttattctaccttagagtattataagggagattgtgaaattatgtatatgttttctttagggtctcaaaggtgataaaagtaaatttcatgtggcctcttgggaaaaagtttgtctccctaacgtttatggtgggttgggtttcagaaatggagctaattggaatagagcatttcttggaaagtgtatttgggctataatagaaaaatatgttcttctttgggtaaagtaggttaatgcaatttattagaagggtaaagacatatggaattacaagcttgcgacttatactagctggtattagcacaaaattttccatctgagactgaagtttgacaaatagagcttgatttctactgaaaaaaaaggtaaattttatgcttcaaaactgtataattgccttattcagcaggaattaattagctataataaagctatctagtgtagacttactatccctaagcattgatttatcctttggtaaatagttaatagcccattactgactcagaagttctaggatttatcctaatgtgatgtgatttggtactaaataagcaccgaatcaaccttaacatctagaggttgattaattaccttttcagaagcatcatggataggtattcagatgatctcttcactgagctcttcttatcgcctggaggagatgtctttccggaatcttgatggctcgacttagtaaatttggtctattatcttaattgggcttataaactgggcctttgttaattgaatttggatcatataagtacacatgtccctcttctaaaaacacgaataacatacctcattagttctttgcccacggggcaaggaagagccaaatatgtagtaatggctattgataacttcacaaaatggaccggatccaaacctctcgcttcaatcacataaaaaaagatcttaaactttgttgttaaaaacataatttgtcacttcaggattcccatgaaaattgtattcgacaatgggacccaatttgatagtgaacaattaccgaagtttgcaagaggaataagattataaaagcttcttgtctatagctcatctgcaagagaatggtcaactagaagtagtgaataagactctgtagaattccattacgaagaaattgatgtagccaaagaaaggtgggtcaatgaactcccacaagctttatgagcacataggacaactgaaaaaacgaccattagacatatcccatttcgttagcattcggctcagaagcaatgctacttgtagaggttatcaaacctcatttatgttaacgaattttttagttgacaaatatatattaaagtgtggtacctaaattatataacttatgatttatttaacctacacattgtaacatgaataggagttacataaattatataatacatttaattacagttttatttattttttaaaacacatttgtgaataataaataagcgtaagtgttttatttttaaaattattattcataaatttttaataaataaattatattaatttgttggactattattaggagtgttcattggaccacatctaatatttttaggcctatctagatctgatctaaatatatattggatattagattttaccatacgattcgatctaatttatttcagtcatctaatcaatccaacatccattagatattggattggatcggttccatccatttgatgtacttcatgtatatctattggtttaatttagaattatctaatattttaaacctagtattttttggatcagattggatccatctaatattttagatccagtatttattgaattggattggatccatccaatctaaaaaaaatgtaaaattttaatattaattatcatatatacatatatttcctaacgtataacaacataaaatcaaattactcatccaaattaaatgaaaatgttaattagttcgattggatgttggatgtattagatttttggacaccccatccaacatccgatccgatccaattggatattaaaaaataacattcaatccgatccgattacgattggacatctaatgtttggtggtcggttgtaattggatcgatcggttgttatttgattggattgatttatacacacccctaagtctattattataataaacaatctagaataataataacattataacattaataatattaataaaatatttaataaatatatatttatacattggctataaaatataaataaaatttataaatatatttgtatgtatatatattttttaattttgtattgaattttagtaaacatattattttaataatatatcaaaatataaatattgatttatgtatttatatatttatatatttcattttatatttttttttccttttttaaaaaattaattgaaaataaatatttataaatatgtttatttgtaaatatttataaaattgtatagaattatataattatatatattttttgtaatataataagggaatagatccgcgcttcgcg

SEQ ID NO: 18408 - DNA, 7039 bp, Cannabis sativa
ttttattttgataaaaaaaataacccagtactattttataccattttaaaaaatacagaattaaatttattatttaacaaaaaaaaaaatccaatcaatcagtaactttcaacaaaaaaaaatattacctaatattagtattaataaaataagagtcaatatatgattcttccatttggaatttccaattcatgttccaaacacaaaatactcatctacttatttctttatgcatgcataaaaaattacataatataataataacaataatatgattcttttttcttatttctttatgcatgcataaaaaattacataatataataataataataatatgtttttctttctttctttctttatagtagtatatatcatggtgattattgattaacgaattgattactataagctatagattttgtttattgtcattatatatacatgttgtttaattatctaacatatataatataaaaatatttaaatgaagaataataatatgtaatattgggagatttagtgagaaatgagaatataataactttatacaaagtaagagccattgagaattaaaccttattatataagtgcttttgtttggttgcttctacatatgcatgataacaaattattctataacatgataagattttaattattagaatgagatccttttttttcaatatattataacaataatactagataattcatcaccaattaatattaaattaatcactcttaggctagggtaggctacttgtgaacttatttattattgtaaaataattttttttaaaaaaaattaaaaataaaaaacaagtttgtaataaatgataatatcatttgaatagtattattacattggtaactccgatgatgccgtcctcttctattttttttttctttttactaccttccttatacatgtattttttaaaaattaaaattttaaaaaataaatagctcattacaatttttgtcttaaattttaatatgtactaaatcatattttttaaatttttttgacagttaaaaataaagaaattacactctatgtccacttttcatttattcttttaatttttacatttcttttgttattttttaatttatatctaattttataagtcatattcttactatgtgcgttaagaactctaattttgataagttatttgaagttatatttgacgctttaattataaaagaagatatttataaattaaaattattttacagttatatttggttaatgtataataaaaaaaagataattagcaacttatctgttaaaaaatctcctagaatattaaaattgttagatttaaaagtttttgtctaattttattaaatttattaattcggtaattgtttatgtattaaatcactctttaaattttgatatctactaaattatacttctcgaatattgataagtatcaaattatactccctaaatttttattcatattaaactttttttattaaaattaaacaaaaaattttaaatctaacgatcctaaaatataaaaattattaaaaaaatatgatatgatatatatcaaaattcatgacaaaactcattattagcttaaaaatatatatttacataaaaacaaataaaattaaatattttgggaaaatgaaaaagaaggtatttataagaaagaataggttataacaagagccaaatatattggaaggaaaacagaacaagtgtacaggtgtttggctagtaatagtagaaattaaagcacttttttttagcatctaaaaaccaattttaattttattgacagcttgccttccacttaaattttactataaattgcttctgtacatcacatgatactagctacttaaaacattccatctttgaattcaattattattaattattaagaaaaaaaaaccaactaaaaaaagggtttttatatttttgttattagaggctaattaagagagtagtgtttaaggaaaacaaaaacaaaaaacaagaagaaagatgaaatgggttttgggggttacaatataagttgttcttgtttttgtttgaataagattattattaaggaaaaaggagtattggtaaaagtgaatggaagataaagatttgatttttattattagttcttcttcaaagattccatccgtttccggtccaccaccaccattaccccaaaacacccttttttttttcttccttcttttgttcttgtctcaatttctttttcttaaattatttataatttataatctctccttttttgtttttcatttttctcagacaaaagaacaaaaaactcaacacaacccacacccacacactcacacaccatttcattcttctcttcttcttctcaatcatgattcttcaaacaataagctaacaatttctcaaagcaacaaaattgggggttgagttttatgctcaatctcattatcatcatcatcatcatcatcatcatcagctcatttgactatctccactcaggtaatcatttttaatcattcttttttttttctctctctaactccatcccaacccaacctaatatatttctatcataaatatcataattctgcataaaaaaagaacctttctcctaccatctctcacattttcttatgtttggatcttagaatttggacatatatgtattgtattatatacccatttgtacatttaggtgaaaactgcattaaagattcaatttttattagcttacttctgtttttggtgctttaatcatatgatatgcttcttttccttgatgggtctcagttattagctataataattgctacccaaatcgtaattcttaagattatttttggcaaaataaaaaactcagctttttttgactcatccaaaatgaagcaaaggacaatcaatttaacaaaatggtatctttgtcaggttgttcgatgacaatgctgtctagtgtctagtgtgtctagtattagctcaaacaaacacaccatcttttgcttttcttgaatcaaaaaattatttagctttaattgggttctaaaatcttttcagggataaaaatttgatagtgttctggtgggaaaaggagctttgattttcatggcaggcttagatgacaatgtggctataattggagattgggtacctcctagtcccagctcaagagctttcttctcagccatgttaggtgaagatattgggtctaggcaattctcaggcacaacacataacaagacagaagatctatttccaaacaataacaacaacaacaacaacaatttcaaagaatttagggaaatgggatcattttcttccgagcaaaaatcaaactcccgtggtgggggacttgtggatagaattgcagctagagctggatttaatgctcctagactcaacactgaaagcatgagatcttcttcttcagacctttcactggctgcttctgagtctagatctccttatctgacaataccacctggtctcagccccactacacttctggattctcctgttttcctttcaaattcattggtaaggccttttttttaaagaaagaaattacaactttattggtatgcttgcttgttgctttgactgtcttttcttttgctttggggacttgggaatcaggagagagaagcttttatatatgatataagttctgttaagctgttcatcatcactttgtgttgatctgttaataaataaagatagttgctttacatgcagtgtgtcagtatgtcagtcagtcagtttgtctgtctgtctattcttatccaatctcatattatacacacaaatgattaaaggagatgaattgtttgtgttgtgttgtgttttgcaggcacaaccatccccaacaactgggaaatttccatttgcttcttctaatggcaacacaaggagttcaacattaattatggaagcctcagatagaaataaagagagtttctttgaggacataaatgctggttcttttgctttcaaacctgtccctaactcaggcccctcctcctcattctttcttggaactgcaaccaaagtaagtaacaacatagcagttagtttatgattatgtcaatatggctaatattaactattatgattatgattattgattaccactatagatgacatcagctgctgccatgcctcctcatcctcatccatcttatcccaatattgaaatgtcagttcagtctgaaaactcacctcctcaaagtgtaggaggaggaaatgagaaagatagcagtagtgatcaaaagggtggagagcttgagctttctccaccattggaggagcaaggagaggaagaaggagatcaaaagggcagtggaggagattgctcagcaggaggtggtggtggtggtggtggtggtgggggcacaatatcagaagatggatacaactggagaaaatatggacagaaacaagtaaagggtagtgagtatccaagaagttattacaaatgcacgcatccaaattgtcaggtgaagaaaaaggtggaaagatctcacgagggccatatcactgagattatctacaaaggggcccataatcatgctaaaccttctcatagaaggtcagggattggatcatcatccaacccactggccgacatgagaatggacattcaagagcaagctggtatgcaaaatggtaatgttaatgttaattgtggtggtggtgatggtgacccagtttgggcaagtacacaaaagggtactgttgttgattggaggaatgacagcttggaggtaacatcatcagcatcagcatcagcgggacccgaatactgtaaccagtccacctctttacaggctcaaaatggtactcagcttgaatcagttgatgcagttgttgacgcctcatctactttctctaatgatgaagatgaggatgacagggggacacatggcagtgcttcattgggttatgagggtgaagaagatgaatctgagtccaaaagaaggttactgctcacctatttttatatcttttttcttctctttttggggaatgctcttttagtatctctatgtatatatatatattgttgttgttgctgttgttaagagtgaagtggtagtacttatattatctttattatcatgaacaaatcaggaaactagaagcctttgcaacagaaatgagtggagccaccagagctattagagagccaagggttgtggtccagaccaccagtgaagttgatatccttgacgatggatatcgctggcgcaagtacggtcagaaagtagtgaaaggaaatccaaaccccaggtttttaacacttatacctctactcactgtctttattctactactactgttgccgctgttttagtgaagagaacctcttattctaattctgttagtaaatttgtttgatgggggatgcaggagttactacaagtgcaccaatgctggctgcacagtgaggaaacatgtggagagagcatcccatgatctcaagtcagtgatcacaacatacgagggaaagcacaatcatgatgttcctgctgctcggaatagcagccatgtcaactctggcccttctatgcaactacaaggttcggcttccacagccatgcaatcccatgttcacaggcctgaaccgtcttcacaacaacttcataacaacatgggaagactgagttcatacagtctaccgaggcagcaattgggcaactactcttttggaatgaaccaagcaggtttggccaatctggcaatggctggtctgggctcgatgccacccaaacttcagggaatgcccatgaatccttacttggcgcagcagcagcaacgacaggcgaatgaaatgagtttcatgttgccaaaaggagagcccaaggcagaaccaatatcagagtctgccactggtctgaatctctccaatgcctctgtgtatcagcaatttatgagtaggcttcctcttggacctcaaatgtaaatcaaacccctttggctttgggctatctttcttttctttctttttttttttttttaaggaaagtagaggtatttttactgttcttacttacaaagaatataactatatatatattatatatataatgcaatgtaagggtcatgagaaattatatcaaaacaatcttcacatcacatctattgattctttatgcaatgttctatttacttgacttttttcttttctaccatcgtctttgtcaagtaacaagttaggtgattaagtaaagtctagatctttatcatggttatttcattttgaagccacacaatataatctttttatcatttaaaattaattattaaataaaaattaaaaaataaattacctagaccaatcacaaagtgatatgtaggtactaacatatcacttaacaatcagtacctacgaaaattttcagtatttgtcgcaaattactccctaataatttactcactccataccatgtgatcacctctgactttgtagagtattgttatttgatatcttaaagtgccaaataccaacatcgatatgtcattttataattagttaatgattttttatatcttttattaaataaaaatatacaagatcaaatattaaaatgtaccaataacaatatatcacatcttgtggtacttcgtgccttaacatttttcgtttcttggagctttcctcttacttttcaatttttactgtccgatactatttagtgatactactgaaattactagctacattgttctatttctaacttttttttaccctctcatttcttaactttacttttaaacaagcaattttgtgtgacaatcaaatcacatgtttttgtgaatgctattgcaaatttgtaatctatacaaagatgtttcaaatatcttttaatctttgttcatgatgatttatgagctgatcatatatagatttaaacatttcttcccataatcataatcataggctttggtaattaattacgaaatatacaccaattctaaactgaaactaaacactagaattggtataaatgcaatgtgtttcatgttggttaaccattataaaaa

SEQ ID NO: 18409 - DNA, 4378 bp, Cannabis sativa
tattaaaatattttagaacaaaaagtactaaaaataatatgaaagagaaataaaataaaatagtatatttttaagtgatgtagttttagacactcttaaaaaatactactaatagagatactctaagtgcatatcttacccgctgagtcgaaactgatgctgagcaaaagtcttactatttactacatgaggaaatagttgtgaattgatggttagagttcccgaaccattttcaaatggatgttggtttagtcgtcctcattgtatttgttagagactcctacattgctaatttatggaaagataataaaatatataagaaatgtgctactcttctcattgccaatcggttttaaaatggaactccattcaccttatcttaaattctaatttgaatgttgttgcattgcatataccattgatgcaaaagttgatttgaagaaatttagacagttaagcattcaaatctattgtcacctaagcaaaagaagaaataattttgctaaagcatgtataaataataccattgttaatattaggacattaataaaacatcatagtaaaaacattattattacataacaccatgtatataacaataatatccatatgaatttctcaacagatttgctggaagatccaaaagaagggtattattaccaaatctaggcctaaacattccttccaaattaataatatataaagtgtatattctattttttatatatatatatatacatgcaatttaaaataaaattaaacatttctttatacatacattttttttctttaaatttgttatttgttattttatttattttaatttgctgttgaagacataaaagaactataatttattttatttaattactagttatgtgaaaaaaattatttttttcatgaatattaaatagtttaatattaaaaagtaactaatctaaaataaccaatccaatccgcatttttgcagattggattggattttgagctattgtacgaattagattgggtccaaaaaatgaaatttgcatttagtgatgatcttatgcactatgagcaaaacagattgaattagattaacaccctttataaaaataagtgaatatatagtaaggtgtttggagttcatctcaaaatcaattgacaataaaaagaataaccaataaattttatatatgctattattattcaacacattattaatgaacttcaatactcaaatgagagagattgtcaataagtaaaaataacaaagtttagttacatatttttctgaggaaaaaaaaaaggtttaactgaatttatagaatcattaataattccttaagaaactggtgatattaaaattttgattaattttattcatagtttagattgttcacaatcactaccacaactcagtgaaagcttgcccaagattgggtcgaaacaaagttagttttggctgatatcgaatttctttgtaaaggttttaatgatatgtaaactttcatcactgtaaagaggtcacccaaagtattttgctcaatctttaacctgataattcaaggttaggctattagcttcttgaattaaattcaatttcaactcaaaaaagaaaagaaataatgatgatgtggtgtactttaaataggtcaattgacaagcttgtccctagttgtacctaaagtcaatttgatatatatgatcatcaaatcatttaagctaatcatgcaacctacaaactgggcttgatcacaatgccaacacatacttgttggcacgttgtcaaaaaccaggaaagaaaaacaatggcatcctcaatgactaaactaaaaagaaagttgagataagcacataatgcagagtttgagatttgataaaagtattcaatgaatataacatggtacatgcactacttacctccataattataaatactatacccgttcaaaggtgtctaacaacaaaaatacacaaaagacataatatagaatcgaaaggggtttcagcttcaaaagctttttattcggtcaagaaactcagatctttacttctaatagcaaaacaacaccatgtgactggaagggcagttactaccacaaatatataattttaagggatcctgcaacgtttatccagcgattatcatcttcactaaccgataatggcaagaaaaaaaaattaaatgcttctgcccaaccttgaagtaacataataagcgataaaagaatatttggctgcaatggccgcttctcattctgctctggactggccagcacgagaagacaagataatgccgacgataagaccgtacagggcaagagcctcagcaaagatgaggataagaatcataccaacgaaaagttttggctgctgtgcattagctctgcaatacaagatcatttagtaagcataccatacaaataataatgagtctagtattcactataatatcaaatcaacatttaaaacagaaaacattcccgaactgtctacacagttaaagtataatatcaatcgcaaatcactttcccgacaagtgacaagattgtgaaagcagtagttccaaactgtttttatgttaggtctaacttgagcccaaaatctacatcattctttatcatgagttaacatctttgctagaagttatattattcttaaacacgagtaaagaataaacacattgtcaaaggctcaaaaaaatttggaattgacttattatgtgtttttatataagtgaattttgcaataacttagaatatttatcagcaacttatggatgtactactttaagatgctacaactatacactagaaaaccctatttttgttatttcttgtgatctggattcatccaccatgcagaatttttccgtgtattacaataatcaattaagtgattgaaaaatgaaaattaataagcacttttactcccgaaaaaagatgataaaattaaatctcaaaccagtaaaattatgctttaacagcacatgataagcacacaggtagttattcaactttcatacagaggatcgtacctaacaccagcatcaccaacaataccaatggccattccagctgaaagaccagcaagaccacaagcaagaccagaggaaagatgagcataaccatcaaaaaggtagtatgattttgcctttgggttaatccctgtactgatgataacagcaataataagaccataaatacccaaaactccagccataacaactggaacaatggacttcatgaccaactcgggtctcatcactcccatagatgccacaccaacaccactctttgctgtgccataggcagctcccatacctaagaagccagaacaatccaagatcaatacacaaagcaggaagtaagctccactcaaatttcatgaagatctaaataagtgaaaacacaaaaagtatacactcaagtaaaaactataagctcagaaaaaagtacaattgattaccgatctcaactaaattcattagatctaacaccctattattattaaagcattaattctatgtgagattcaaatgatcaacagcaaaacctaaatcaaaacaagatccaggaaaaaaaaatcacaaaaccccaatcgtccactaaaagtaaaacgagaaaagcaaacacacaactttaaattgcgtttgaccaaagcaaatagtaacacaaaacacaaactgttttctttgttccaaacctaatcagatcaagacccagatcattcaaacctccaaatttcacgatcaactattctcatcatatcacaatcaattaattgaatcagagcaagaataacaataacagttaaaatttaagctatctttaacgaaaaataaaaataaaaaataaaagccccaatttcgtggaacacaaacagatcccaaatcccaaaatctttagagtacgaaaatataaattggagattaaaggttagggatttaattacaggagaaaactagagccgcggcagcgccgaggaatccgaagaacggtgccgtttcatcgccgctgaaggttgaagacattgtgttaatcggatctgagaggacttcgtctggatcttcagagagagtttgtggagcttcgagtttcgatctctctctctctctctctaaactctgtggttgtccttacttacgaattgaattaggcttcaaatagtttcaacccaactgctttataattcattttactgaagatacttatagccttattgggctcactctcggcccactcgatatcactttcgatctcctagtgtgggctttagtcatcgatgatggttctctaatgggcctgtataagggcttatgatctagcttcttggaaattggaacaaggtacatatatactcagcttagtaaaggaaggaatgtttgtattttctc

SEQ ID NO: 18410 - DNA, 9251 bp, Cannabis sativa
atatatatataatatttatcagagcactaaagagagagaactcacaggttgaggagaagcaagctttgcaatactgtggaatttaacaacataagcagtttcgaagtgtataacatctttatgtgacttcacctgtgatattttccaggataatgttaacaagagcttgaaatagaggttggtggcaaacttcagcacatagacagaaaatatacatcattataaagctttgaggctgtcactggttggatgaaacttgtgtacctgaaagaagaaagaagcataagaattgaacaatgattgctttgacaactaatgaataaacaaactattcactcaaaaaaaaaaaaaaaatgaataaacaaactaatgcagcctcctaaaataaataaagaaataaaaatttatggcgtagaacaaagtattatgtatcaatgtgtttgaatgtaaaaccaaacacagaatcagagttcagatcagtatggtgcaaataattcccaaaattgacctaaacttaatttccataatcgcatttttcttttaaaaagtaaatgatggatccagatcatcaatacataactttgaatcagctcttaataaatcatgcacgagtaagatgcacaaatttccacgaaatcgacattaacttgaattccataattaatttctcttagaaattagatatggattccgaaaaatcatcttcagaacaaccatcaagcatgtaaacacacccaaaaataaatttgaactcaacaattgggataattataaatacaatgatggtaaaactaaaaaagaaatatgaacccaaaagttgggataattatacatacgatgatggtattgagattccatcaggcttcaagaacctttgggctccatcaaggcattcaggagacagctcattatcaccaaaagaacccaacaattcactaacctaaaacaaatgaaagaatacaaaaatttaacaataaaagtgagacatagcagaaaacatataaaaaattataaaccaaaagaacagaagtccagtaccataccaaaatgtcagctttttcaggagccttccagtaacgcatatcacaagatattatggtaacaacgctttcccatccctctagtttaaccaagctctgcatcaacaagatagtgttaactcaagcatgaaatacaatagaatataccaacaggacaggaatagacatttacaaaaccacggaacggattcctaacgtagtatttccattcaagactgaaactcacatgaagtgtaacaactgcatttggatttttctcaacagcgtaaactttaagcttgcgccctgtttcttcagctgcctacataaatgagaacagaaatcaaataaaaatatattcaaaaaagaaccatgaagaatgcacattatataaacacatccataacataaaaggttgacattaagacccatgtagcccaaaggttgaacattaagaccaagttttcttttaaggtattgaggaaataacctgtaatgatgcccttacaagaggtccacgtcctgctcctacaaccatcaataccttacacacaaaaaatatagatgtattagagctgcagccctcgcgtactgagttttctttgaagtaagaatcatctgacaccaaaaggtaatattggtggaagcgggcagcttactgttgtaatagctgatgcctctttatcaggaaccctgtccaataaagctttagaaactgccctttggtactgcataaacaagcagataaccatataaatcgaattaacacatcagaagataagttactaacactcctttctcgcactcttggagctgcatcaacataaatatactactttattattaattttttttaatcattttattactttattagcatatttagctatggcattaaattataaactatttatattctttttttattattattattattactttacctaataacataataagaaagttattattttttatatttaaaaaaaaaacattaattaaacattaaattttgcaattatgcattagagcacaataccaaaaattgatgtaaatatatcacaaagtcattttttttgtgccaaatatagcacaacttttgcgtcttaatttgtttccttgtcgcttaaatgaaataaatgagaagtgtgcttcattccgacaataattatcataaaaataagtaacccatttgagatacgcacatataagggaaataaaagcaaacaaaaacaagagaaaaaaaaaatgaatttcaactcatacctgaatgtacttcattgtatccttctcaaatgtctcgtaggtttgagcctctagattatccataagaggctgcatttgcaataaccagctagtaatttagtgagtgacagaaatttatgaaaattatgaaaatgaaattgtataatttagtgtttgaataaaattaaaagtgaaagatggcctagaaaaatactagcaaaaggaaaatttatgaataaaaaaatcaggtaaaaaagtgcacctgtaagggtgattgcaaaaaatccctgtatcccagctgacataagaaaatacaagagttaaaagaaagaaaatagcaggaaagggtacattatgtgagcaatcatatgcaatccataaataacaactaacctacctcaaatcgttcttgctctggaatgggatccaacttttggtagagataaccaatgtaatccaaatacgacctcaatggatgcctcttatcacctgaacaaggcgagggagttcagaacaatgcaaaactagaccagctttaaaacatctgaacataaatctatatttgattaagaaagcaagggatatttaaatctccacggtaaaccaaggccaaaattgccattaaactttaagaaaatttcagtgattacagtagttccacaatcatattgagcataagaaataaaataaacttaccatcaacattattaatactttgactggcagtcaaatttgtatttccgctaggaagattgtgtactggttttccagatattacaacctaaagagattccagaaacatagctaagtagagcttacaggatggtcataatgatatctacaaatgccaagtgtaatgtttacaaaactactatgagaaagagaacttaacattctaattatggcacaatgacacagagcgaagatgagctagattgttaagtttcatggaagtaataacaaaagagccttgaaatcttctagaccatcttcgtgtaacttctctattctatttataacactgttccctcttatatgtattaaaaaaaacaacacaaactcatctgcctcacctggaagtaataacaaaagtgccttgaaactctagaagataccaaccatctacgtataagttctctattctatttataacactgctctgttacatgaaagggtatagggagtaattgttagtattgcctagttagtataaatatataatactattacacaaatggaaaaaaaatcaatgaatgaaatgagagaaaattaagattattcctattagagtttggcattgactcgaagggtgcaattcaatacaattggtaattgtatcattggtgctttcattgagctccaaaaaatgactgacgatgagcatcatgaattcgtgagatccacattgaaatccatagagttgcgtacggatcaattcttcgatgctcaaaagaagcaaattcatgtcatgtttgagccttaccgcccatcgacgaaggcactaccagattcttcatctcaacccacttctctagaggtcgataaccgcataaatggccatgttgaatcggtgagaagggagatggacgatcctgacagacatcgctgtcgatatggatctcatccgagatggcagcaaagcacaaacaaagttgaatcacaatttgccggaggtagaggaaaagctctctgctcgaatggagattggggatatgagaatctcgccacctctttgactggacaatctgatcatcttgcgtgtacatagaagaaggtgatgttggttgagtgcttgtggatcgtaaagtggtgctaagagagattgtttttggtgttactggtggttcaccatgggaaccaattacaccgttgacagatcgaaggtggatttttgatcggggacgacaaactaagttggaagagaatcaacgggagtggatgactatcaaaggacgagcggagtcttggtcacgtcgaatcacaaaaatacttagagaaatgaagttgacgactgtccttgctctgtattcactcatttgcagaaagataatatatatatatatatctatacatttcttgttttgcaaatatatatacactgtggttcaaatagtgtgcgattatgatgaagcttcaaatcagggagaatgcaatgagtggaggtcatgactccaaagagaattgggagttgtttcaagtataaggaagaagacgaagtagcagagacggctggtcgttaatttcatctgaagggaaagagaagcctagtgccaaataatgggcttgggcctagaaataaaagagggttggacataattaaaagtttgtgtgttatttttcttcagtttattttttttttttattttcttgtatgtttgtgctttgatttagtttttgaatttttaccaccttgaggacaaggtgattttgaagggttggggagtgttacatgaaagggtatagagactgattaggaattgttagtattgtctagttagtataaatatgtaatactattacacaaatggaaaaaaaaaattgaatgaaatgagagaaaattagaattattcctattggagtttgacactgactcaaagagtgcaacccgatacaattggtaattatatcacctgcctcacaaggaagtaataacaaaagtgccttgaaactctagaagataccaaccatctacgtgtaagttctccattctatttataacactgctccctcttatatatatgaaaaaaattaatcaataacaaaagctcatccgcctcacatattaacaaacactaacaataattgatagcaacatctgaagcaattcaataaagctacagtaaattttaactactcatggcaaataatcttactaataaaattcaaatagcaagcagattaaccccttccaattgaagtataatgtgtaaaagaaaacttaaatgaaaaagttggcaaatacttctctatagatacctgtactgcatgattgaagaaacccgtgattaggttctggtgacgctttgacaagcatggataaccccttgtgtttgttaaaaatgactggcaaattaataatagtattgttacaaatctaaataaggacaaacaacatgcagtaaaaaccttatataatacagatataatgctgcttaatatatagttacatcagtattaacaatggctgctcgaacagactctccaaaccaacgtccaagggagttaggtgaaggcaatgaactcctaagaattagcaaaaaattaagattagaaatgcaatctacaacgaagcctttagagaagtgatccaaagttgcaggaaaattttattctaaaaaaaaattcatctcaggttcgtttaaacccacataacatcaagggcaactgataagcgactatgatgttcacaaagcagccgaaaagaattccaaatctcccacgaatcaatctgcataaaagacagaaaagagggtttatttttagttttcagttacctataatgctgacacaggagaaatagtggttagttttttaatctagtcaagaatcaagcgcaagcagataatattcctccatttaaaacttggacaactttggtgatgacataaattgctaaaaaaaaaactcatgcaaagaacaaaccagctataaaagcagacacgcagaatgtaccaaaggaaatcaaattatacttcctaaatttttcaaggagaatcatagtcataggcactaacgagattcataaacaactcacaaatatttgattccaaagaaaaagagtgtaagagttactttccaagttattttttttttgaaaaagaagttactttccaagttattagtcagtcaatgtgaaaaattaaagattaaccttaaatagtaatgaattttactcaccaattgatctgaattggaatccgtggagtcttcatcagatttcaccaacggaatcctaagccacaactgtaataacagaataatgaaacaacataccatgaataaaattgaaaagaaaaaaaaaattatatggacatattgataatgaaatgatgaatggtacctgcatattgtttagactttgtaaaatctgattcacacacctagcataattagcacaggactttcccttaggagctggaagaaggcatgcctgcagtatgagtacttaatgaaacttgttcttaaaggaccactctcaagacattgatatacatggaggaaataaagtataaaggatacatttttgttttatgcgcacactaagttgacaaaatgtgttaaaaataatatttaagataattggcaagtaaataatcttaaaattgcattacatcaagtacggagatgtgtgcaattgataagttggaataaagatgcaaataaccaaaacaattaagggatcaatgaaacaatccaaaaccaaaaagctgagcataactgaagattaaattaaaatgaccacaatgcataagagtgatgataagtgcactcaaaaaatgcaccaaaacaatatactcagtgatgttgcacaactttttaaaacagtggatccccatttagataaaatgtgaatgattatataaactatcacgccattatatgtaatttctttatgcatatttcgggtgcacgtatcatactcaattcgtaatccccttcttgtaaaatattaactaaaaaaaaatgttttccctttattctacttgaaatagtggctaaattttacttaaatctacataccatacagattatggaaaatgcaagaagttaactgcaaaaggctgtattattataaataatatatacttttccaaaaattcaaaaacttaaaaaagtatgctgctaagggaactttcaagttcaataatgtgcacctgcagggagagatgagaagcccatgcaatctcttgctttagggtggtttcagaatctaatcgaagaatctcatcttcagcgtctagatcaatccatgagctaacttttcctgaaaatagaaaagccattcatataagcttttgatcatgctgtcagccataaaataagctttgcttatgccaataaatatatacataatgcaaaatgagatacaagtatatactaataaaggatatgaatttatattaaaaattagaattatttacctatgttattggatatgaatttattatacctagtaccgtttctaataataataagtaaataaaagtttagcttcttttaatgcattgtatttatagtccatttcccagtagggataggcttgctttgcttgtgtacggcttatcatgatgaaggctcgtgtatagatgtggctcaccgatgttagacattatatcacttgcaataaaatttcagaactattaaggataaatctctaatactaacattatttacttggccttacatcaatatgcatgcagatgtatgaagcaatgtgctaataataccattaaaaagataaagggaggagcacaaatagcaggaagtattgatccaccaacccagcaaatcaacaaaaaataacaggtattgagcaagaatatttcagatgtaaagaacaagaaagcagatcagtaaaattaaaaaaacactcagtccatagaatatctagtaaggtggttctttgttcttgtaattcttaacaagatgctaacattatatattaaagccaaaaatattttattaagaaagaggttcaatctctagcaatccatgtctattaaaagtgaaaactgacaacaatgaattattgaagatgcagaagatagaaaagcgtatatatttcacaaacactgtgtactcaatgttcaggaaatgtaagaagcaatacagtgcactaagactaattttattaactacgccatgccaaactgaatcacgtgcacatttcccatgtcacaacgaaattaaaatggcctaggacaaaccaaaacctacttgatactaaaaaatcagtttcttaagctaatatgattaattagccacactaatgggaattcaacattttcatccagatatttggatcacgcaattcactaatctcataggtcccatgctaacataatttcaagtagaaagctaatgaaatactttggaccaaactcaaaatggagctgaaactcgaagaaattaagataatgaaactaacaccgagactaataatttaaattgttattacattaatgatttttgttggtccaagactgctcatttttaaagtaattgaattatccttttgcaaggattcagacattctcttaacagttaatgaatctgaattttgattggaaaataaaaaaagaatagttgataagaagatgagagaaatattttcgaggaacaacgaacaacgtacaaatagagatattgggagacaacataaatttgtagatatccacttcaactgaccacatatcagacaacattaaattatacattcgaaactactcggacttcaaacataaatttcaagattgtcatttgatcaagaatattatatatggaggaataccaattttagtttacatatatatacatatatgcacaaaaaaatattcacaaagtatatgaagcgacaacgaacaaatcttttctccctcagatgcgaaaaatacaacacaaggaatgcttccaaaataattgactttactcccagatgttcatacctacaacatgactgctccactgagaaggacttaaaactaggtctgatccagcaaaaggcagagcaccatattcaccaccttctttctgcagtaagctcggccgataagcaggatccatctgcaccactccaaaattgcaattaattgcattagtaccactatatatatatatatatattttaagtcgattttgatgatggcatcgaatagtataataccaacctaaggaaaagattttaaagtatctaaacatgcatatgtaagaatagaacaatgaatgacaacaaatgtagatattagccactgagtaaagccagca

SEQ ID NO: 18411 - DNA, 10331 bp, Cannabis sativa
  modified_base (2132)..(2132): a, c, t, g, unknown or other
  modified_base (10304)..(10305): a, c, t, g, unknown or other
taaaatacgataacgatgtatattatattatacagtgatatatataatattttgtagtagtattgaataccaattgtatttttttcataaatattttgttccacgtgggtagcacatgttattttcactagtattattttaataatagaataaaatacaacatattgtactattaggtacaagctgtattccactacgtaccagcaattgtttaagatttccagcacatagataattttttcaattggtttggtttggttgcctactattgctgatacgtagccaaccagttacactttgtgttctatagtataatgatagtgattaacagacagagaaactctttcaaaaaagaaaataaaataatatagcaatagccattatatttatttaaatctaataattagtgttttaaaaaaactgatgtaatatagtaatgaataattcaacaatctaaaagggtccactgatgtatttgtttcgatatttagaacaatttttcagtctaatatttttcataatcgtcttcgttgaaattatttagaacattctgtaaaatattgagtaaattagaaaactttaatacaccgaataaagagtttaaacagtttattttacaagtttataaaataaaagaatctcgcgtataacaggttatttgaaccatattttcagcgtgttaaatttttttgaattttctaaaatttaaccgaatgctttaaataattacaatatagacaatcgtgaaaaaattgaattaaaaaatcctctcacatgccaaaatagataaaagtacatcaattaaccttttttagagattacattatagaagtatctattttcttttcttttttcttgaataaaacattcattcaaaatgaaaattagacctcacggtcgttagaaaagagattcataaaaatagatgagatagtaagtcgcccaaatcggttataggcaaaagtatattatgtaccataaaattataaattcttgcagtaatacaaaataaataattaacaaaaaataaataattcttttaaataagaaatagttctcaaatttgatttatgcccgtgtagaagtatctttagtatgtatactattgcatattacgtcggagaagagagacctgtcctttgagttgattgtggccttaataagtaagagcacaagtctttatctagatctctctctatgtaagtaatatagtgcatgagacaaatttaaatatgggtaaatatacttttcgaccctatgtattttgcaaaagttatcaattataaatttttttttttgttaaatgataaaatagactttatattttctaaaataataaaaataggaccctaagctcaattttcaataattttatttttttaatataagacaatttgtaacacaaatagatacaaaaaaatataatcagttttgtcataacatctatagatcaaattattattaagtttattttgacaaaaaatcagttaagggtcctatttgtacaattttaaaaaatacaacatccattttgtcatttaacaaaacagaggatccaattattagtaatttttacaaaacacaggattcaaaatggtatttactcttcaaatattcccctataataaaaggaatgaacattctttggtaaaaattggtgtcacatattgtgttaaatcaatctaaatttaacgtatcaactaattttttaattattaaaaaattaaacttttaattgagtcaacaaaagtagttaatatatttaatataaattaaattagtagatgtgttaaatttaaattagtttaacgtaatatgggacaccaatttttaacagagaatctttattcatcataattaaagtggtcatgtttctgtgtaagagcatctccacccattggagtggtctatacaaattttatcaagaattttttgcagttaaaacctctcaactatcattctatttgtacttaaccctctaagctcaaattttgacggtaaaaccctccaaactacttaactgtttttaaaatttaaggtgtcatccattttctacagttaattgtcaacatagaatgcttatgtgtacattcttatacatatgacacatttatattagtacacctaatatnattatttaaaaaatataaaaaatatttcaaattttttagtattttttattttttaaatattttatttttgtatataattttatttttttaactaaagaaaactaaaaggcaacacttaaaaaagtgttgtctcctagagtgttgctaaaaatataagtataaggcaacaattataaaagtgttactatatgttgtaacttaataaaaatatataaccacactaattataaaagtgttgtcatatatttatttatttttaaaattataatattatttcaaaatattgtaattattttttaaaataaatattgttttaattttattacatcaaattttacaatctatttttatatcataataaaaaatttaattttatataaatttaatttagtaataacacaatccgattatgttaaatattcaaatttatttttatacgatcaaaatatattatgttagtgtgctacaatatttgataagagcttttataataaatttgaatttataacaagtgtaatataactttcctaaagaaaagagggtatataaaatgtgcataatatctgttttttcaaaaactttattctttctaaatactcgaagtttctaaagctagctccaaagattaattaatcgtcttcattcgattttgtgtgttgttgaagaaacaattcaacctgcaatgaattaaaaaaacaacagtaaaatgcatgcattattatcaagtcacattatcaataatatgaatttatacataatgaacaagcttggcaattggctcaattattatggtgaatatatattatcaaaaggttggttcaattcactacacaattagtgtgcaaataagaagaaatgaaaaattaatataacactgtataagtaaataatcataaagagaagatgaaaaggagaagaaaaaagtctgataaaaaaatcgatgaaatgaaatattaataaaaaaattacctgtgatgtaaatttaaggagagcgcacccacttcaaattgatgaataacgttgatgtataaaaattaaataatgctcgattcgacttgtaaattataaataccaaaatcttcaaataatatagtaatgaatagccaatatataagagatccaacatggagtttggagactataaattttttgaaaactttgttgataccattggtggtttggagagaaaaacagtgggtagtttttatttttttactttccagctcatctttatcttcaaaactaaaagaagttacactccactaaaattaatatataaaatattttttttattttttccattattaataaaaacatactttattttagaagtgttgctattggttttaaatttaatttttttttttttttttgagaaaaaactgttattattaaaagtgagagtcattaataacaacagaatagattggggagggaattttccccagccaatagatatcctcatccaatcgaagagcgaatttggctaaagcatgagccgcttgattagcatcacgtttaacatgtgatactttcactctaggaaaataggataaaagatagcaaatatcctctaccaaatcatgaaaaggcgttacatatgtggtagaagacatatggtttattgcattcgcaagctgcagagaatcggtctcgatgacgtcaataggcaaatgcttctcaatcgcccactggatactataaaacagagctgctgcctccatctcttttggagaaaaacatcctttgaaaggcttagcaaagccagcagaaacactaccattgtgatcccgaattaacgcaccaaaaccaagaatgtttccttccttatcacaagctgcgtccacattcagcttatgagaaccatggatcggtggtgaccaggattgctgcatggtcactgcaaactggtggtgagatgcacttccagcagtatgagcaggcggatcgggagcatttgtagctgcagattgtactgatgcagtgacagatcgatattgatccaaataagaaacagcaaaggaacagataatagctgctgattttggtcgagtaccatgtatttctttattgcgtttagaccaaatgcaccacatgagacatgtgattaattcaagatcagcatcagtatgtgcagcagctaagtgggagaaaatatcaaatccttttaagttgtatatatgcggcatatagacttgaaattgatatttcttccaaacttctttcgcacgggcacagcgaaaaatggcatgtccaacagactcccatccgtccttacaaagtgagcaagcagcagtagttgtgatttttcggtgggctaggttcacagaggttggcagggcatcattaatcaaacaccaagcaaaaattttgactttcttaggtaacctgagagaccataaccgattccaccattgtctattagaggaagaaggagaatgatcattagaggaatccagagcaacagctaaatgataccccgtcttcaccgtatagataccggattcagagtgatgccaaattagcatatcctcttttggaaagggactaagaggaatcgagagtatacggtcaatgtcaatagtaccaaaatgatgctgaagaagctgaaaatcccattgtcgacttgctgaaatataatgctccaccgtgaaagaaggatcaccactgtaagtctatggtgtgaaggtagtattcccaggtaaccaaggatcagaagcacaacggacattacgaccattaccaattttccactgaagacctttcaacaataaatccttaccatcacatatactctgccaggtgagagaaggcagaataccttttggtgctgaaagaaaattcccattcttaaaataacgggctttgagaacccttgctagaaaagaggaaggagtatccaagatccgccaagcttgtttcgccaaaagagcctaattgaggtgcaagaaagaacgaaaccccataccaccatccgctttagaattacacatgaacttccatttcttccagtggatcttagaattattggtgttggacccccaccaaaaattggccatcatggactctaactggttacaaaacttctttggaagactgaaacagctcatagcatatgttggaatggactgtacaacagctttgagaagcacttctctaccaccaacagagaatagcttagcgtgccactggttcataagtttccaaaggcgatctttgataccactaaaaagttctttcttgtctttaccagcataagatggtagacccaaatatttctcatggatagcacaaataggcattcttaacacactattgaatcgttccttaatgtgttgtgaagtattcggggagaaggacataacagtcttctctgtattaagaagttgtcctgatgcacggtggtaataatcaagtgttctgtggacagcttggcaagactcttcagttgcttggcaaaacaacaaactatcatcagcgaaaaggagatgcgatattgaaagagcctccctggcaatagataaacctttaagattacccaacaattcctcatgttggagtaaagcagaaagtccctcagaacatattaagagcaggtaaggtgacaaaggatccccctgttgcaacccacgttttggaacaaccgaccctttaacgaccccattaacattaaatgagagagccgcagatgttatacaagtcatcacaagattcacccacctgatgttgaaacccattttaaccataacctcatacagaaaatgccactcaactctatcaaacgctttgctcatatctaactttaatgttgcataccccatccgacctcgttttttgttcttaaggcagtggacaagttcaaaagcaaggagcacattgtcggtaattagacgattcggtagaaaagcactttgattttgagagatcacatggggtaaagcctctttaaatctagctgcaatggcctttgacaccaacttgtataaaactgtacataaactaataggacgaaagtcactcactaacttgggttgatcaatcttaggaataagaatgataagggcagtgttgatagaacccatatcttcgccatcatttaaaattttgagcatactttgagtaacaagaggaccaacaatatcccagtgttgttgaaaaaacattgcagacattccatcaatacctggagacttgtcaggggccattgatttaagggcttcttcaatatccgaggcagtgaaaggcattaacaaatgctgattaatctctaatgtgatagacgttgggatagcagaaagaacataatcaagagcttcctcatcaacaccatttgaagtaaataaatgtgaaaaataattaacaatttcaacacttatttcctcctcagtatggacaacaccaccagtcccagcatgtagctttttaatcttattgttcttgtttctggttttagcacgagaatggaagaatttgatatttgaatccccactttgaagccagtcgacccttgcacgctactgccagtaaagttcctttttttccaataattcatccagtattttatcagcattttccacttgttgaagatgggcagccgagttgttatagctattgtggagatgtgctgattttttgtgagcttcagatatatctcttcccatttgtccatatttcctaagatgccaatcttgaagagcagccgaactagctacaatattatgcagcagcaaagtggtaggattttttgaagccacgtgatgccaagactcctgaatgatgtttcggcaatcaacatcctttagccaaaattgttcaaaacgaaaccgagtatgcctctgatgagattgagcattagacaccgattgtgatacactttaagctaacgctcgatgatccgagtggtaaaaatcgagatgggatatatgatcttcaatgaaaaattcagaccatatgtgattgataaaacctcaatcaagcctttctctgacaatattcccatggtggtttttgttggtccaggtatatacatcacccttacatggaatagcactaagttgacaatgattaatggtcttcctgaaattatccataagtaagtcatctctagggggcccccatctttatcttcattggacagtagctcattaaaatctccaagaaccaaccaaggagagttagaatcattggacacaagactactaagaagattccaagtgtttattcttaaatgagtttccggagcaccataaaaaccagtaaaatgaaattgatgacagcaatccgacgaaacgaaaacatcaaagtgattcattgaaaaggaattgagagttacatcaagactatccattcagaaaagtaacaaaccacccttcaaacccaccctaggtacttcaagaccatgattaaatttaagagaaacccgaaaacgatcaattgaattacattttaatttagtctccataataaaaagtaaatcgagacgctgctctttaactagcagcttcaaatgcctgaatgccgaaggattccctagtcctctagcattccaacttataagtttcatggctgggggcggggctgctgtggagcaacctccgctgaatgagaagactgtccttcaactgaatccggagacaaaccagaaacttgctgagcagacatgtcttcaatgcgagaattatctttggcattacttcggcatctcttaagaacacttctaaaatttttcagggtccacttgccttttgaagacttattatgatcagtatattcactacagttttcagcaaacatagcttttcctttgctgttagcacccatagccgactcacgaaaatcagatacaggaggctctttggaggtagtttttagggatggagttacaatattagtagcttgtgattgagtcgatatggaggaaatgtcgtggtgagggaaagttggtatgtaggaagggaaagggagaggcaattcagggtgcttatcgggtgtattgacagggattacaggtgtggaggattcggctatagtgagagatttaggctgaggctatgctcccaatgctagatttctgtgggtattgattgcagggatggtattagcaattgttttcctggttaaacgagtgaggaaaggataaacattggctctagaaaagtcacttcgatatcgatcatagccaacaacagggagtttatctccaatcatttcaggaccatataacagatcggggtcaccaccagtatccaccatttccataaaagatacacatttgtcaaaaggatgtcccaatttgccacaatagaaacagaacacaggcaaattttcatagcgaaattccaaccaatgttcatcattcaccttaggcagagtaaccattttaccacgcataagtggttggttaatgtcaatccggactctagtgcgcataaaaaaaccccatccttcattaagagaatcctcataaatctcaataaattctccaatccattcaccaattttcttagcaagggcgcgcgatttccttaagaatggaagacggtgagtttgaacccagaactgagcatagtagagatcagcctttgtgacattctggagagatgatggtaagtgcaacaagattaagtgattaaaaaagtgccatggttccccagaaaggattcgatgttgataacctgcacaagccaaagttaaaaggaaaagatcaaagtgcatttcagagacaataacttcaaacctacatttattactccagaattcccccatctttttgataaaagtattaggattaatcgaaggagcaaggcatctagccaccagaaaacatttaggagtttggctaggatcaaatagatcagattccgatagagagtgaacaactctctccttctcagaaaggcataagttagcattcatattttgcaatatttattccatatgaggtaaagaagaagaaaaggtaaataggagatgcaggtacagagcgtataatctgctggggtatttatatattgggcatgctttgatgaaattggggatcatagattcaggaagaacatggggttgaggccgaagaagaataagatgtgggtggttatcggcaggcatggccatggtggaggaagggtaagaccaggtaaccgtcgtaactgcaacagaggaaataattccactcgggcacacaataactgtggacttgtttgatgtttaaatttaattttaaagtattaatgtttaaagtatataagctctttagcaacactttgtatttaagagtgtccaaaaaaaaaataaatgaactagcaacacatctttatcaagtgttattaaataagtgttgctagatatgaatgttttaaacatataaattttctagcaacactttatatttaagtatgtctaataataaaaattaatgaattagcaacacttatttaccaagtgttattgaataagtattgctaaacatcttatttgtagtagtggtgccacgtgtgcaagagtatgcacataagtagtgcatggtggtagttaatcggatgataccttaaatttgctactggttcagtaatttagagggtttaactaccaaatttgagtttggaaagttaaatgtaagtaaaataataattgagaggttttagccgtcaaaaactcttttatcaatatagttgcttaaataaaaccacaaccatgcaccctttttttttccttttagaaaaagttatctttccaccaaaaaaaatcattaatttaatattttatgtgggactagtgtagtcaatttttagagttcttaactattaaagtattttttgtagaaaaatgtattaaatcttatttggatgagaaaaaaaataaaaaagtaatattttgagataatatgtgtatttttgtcaattataaatgttacatgttagagtatgctaaaagtaatattttgagatcatatatatgtgtaattagatgtttcatttattattttaaggtgaatagataaatataagagaaattaccccatatattattttttaacttttttttttccaaatttacgatttgggttttatggtagtttttctagtagtttcagccctaaataaaattctatttcaatgtaatctctattatttaaatattaataaagagacagaagtattttcatcacttatnnaatgtgtcatttggttcatgttatca

SEQ ID NO: 18412 - DNA, 2483 bp, Cannabis sativa
agggtccaattagtaacttttgcaaaacagagggtccaaaatggtatttacccatttaataataatctgatctaaaaatgttatgacaaaaccgttaacattttctgaatctgttctaggaattgtctttaagtttgttatattaaaaaagttgtcaaaaattaaactcatgattttaattttaccattttaaaaaatacagaatttaacaaaaaaaaaaaatatataattaataacttctccaaaatatatttaccctttttgcaattctgattttgttttgctgaggaaaaagttttctattcgataattggttaaagcattgtcgtgcatataccgtacatgaaaattaaatattattatatatactaaaaatctcactctcttttcaatacaaaaacgtttcttaccacgtgtcaagcaagggtttgctccttttcgctttacacagaataaaactcgacatgggacgaaggacgcagcaacgacaaaaagctgaatattcttcttgtccagaaataaccttttcagattcttcataccatttcaagtagcctcatcccaaataggggtaattaagtcaaatcacaacatctcattccagcttatatcaaatttgaagtccgccccttataaataaccctggtttttccctctccttttcgcttctttagtttctgtttcatcaaatatcaaaactaagaaagaaagagaagaaacaatctcaattcgaatttccatggcttgatgattaaatttctctctgtaatcgaaataactcggcaactctgattttcttttgtatctcgtagattatttgtgaagcgcgcaattggattcgggactgtaaagcgttttgttgtacattagtactggctgaagaaaatgttcaatcggagctgaaagattagggtttgaagatggatctggtgcgagtctttttcttgatcatgatgaacttgttttactttttagtggaacttcattttgtgtgtttttttattctcgtaacgtgagtcgatctttgggtttttaagcgaaatttcgcactgagtttctggttttctcgagttttcttggaatatccgacgttttcgaagtgagattgttctttaatcttctgaaaattttgcacaaaatttctgaaatgcgaaatgcgagaatctttatctaatcatcgtccttgtctgctgttttttatgcggttttcgagtttagggaaaataaaagtattaaactaaaggagattgttcatttattcctttctgtgaggaaacgtacgtacttaacttacagatgactaatttgtcgcagaaaatccatagactcggaaatgcggagctccgggactcgcttccggaatgtacattttcaaggtataatacatctccaaaggtcgtctccttgatggacgaagacgataatcagaacacgaagagcgtcgattctgaagtgaatctcgctcaagagagtataatcgaattgatttgccgagacgataaagttggactcacggctcagtcaaaacgagtgtatcagctatcttcggaacctttggaccgaagcatcgcatcaaagcttctccatctctgctgcgtatacgactcggtggactgcgcctcggcgttgctctgcggagaggttggaacggtaccgcttgtgaacgatgtggacgacgaaaccggcaaatctccgcttcacacggctgctgaagcgcacgccgcgcggtgcgtagaattactgcttaagaaacgtgctcgtacggacctcaggaccagggacggtcgggctcggcttgctttggagctgtctctttctagctcgaggtaaaatttctttgtcgttttcgttttaaatacattatggtaaaataaatgcttaatcttttccgatgaacgctgcagaaaacttcctagaatagaatatttgccttttttctattcagtaacgttttcactatttacaaattactattattatgaataattttttttatgtattgtttagaaaaagctctttgttttttctttctctcctttctcgaaaactgaaaaagaatatcatttcatctttttgcgatttcaggatggatgtgacttggaaccctgacgattactctattgaggacttggtcgtctttcttggggaaaaggttatccttgaaagagaaataaaatttaaaaagactggtagaaaagattttttttaagggatcgtatcgtaaaggctgcttggttgctgtgaaagctgtagtaactagaaaaatataatgaaatttcagatcatttatgtatttatttattattgttttgcaggatatgaatactataaaacttatttgtgaaaaaacgaaggaagctgcagaggtggcgcgtgcaatggcggttgaaggaggtgtagtcgctttagctgctatcctcgttgtggctgctgagaagattaatgaatcgatcttagaatttcgggattctgattcaggttcc

SEQ ID NO: 18413 - DNA, 3262 bp, Cannabis sativa
ttgtgatactccagtttttgttgagattgtgttttgttgttagtatttttgcagtataatttgttgttagactgggaaataagaaattctcatcttaatgcattacctgataagtgtgacctgtatatacttcttggaacagcattactcaattaattgcaaaaattgttaatctttgttaaaatcagtagttttttatattagggtaaatagttgcataagtactcaaagttttgagtttgtaagcgcaattatattttttagcgacataagtacccaattttgtaaaactataattttccttcagtttcatcagtattgattctgttattgtcttaaattggacacatataaggaaacatgtagtatcaattacttcaatttttttttaataaattcaaaacagagtcctaaacgaaattgaaagaatattatagttttacaaacaatggatacttatgccctcaaaaaatcgtggttttatgcagcttgccactatttacctttattttttttttatgtatctccatattgctattctaatgttgctgcttttaagttacaattttccttttgctacagtgttcgtctttttgactaaaattaaattcgtaacctccagtgtaggctgaaattttaatttgcccaattattgtgtgaaggagtaagtatttatctttttttcttccagatttctctctctctctctctctctctggttgctgcttatatatggtgctctagaaattatgttcttttgacgcttttctctgaaattattgcagagaaaaataaataaatttcttgaatataagaaagctgggaaaagcttcaacgcagaagtgcgcaataggaaggactatcggaatccagacttcctgctgcatgcagtgagatatcaagatattgaccagataggatcttgcttcagtaaagaagtatttgaccctcatggatatgacaaaagcgactactacgatgagataggtctgtacaatccttataacagctgtctgcatgagaatgcctgtctggatatgtatgtgttgcatggtgtcctttattcttctatgatgtaactactgccttcgtatgatctttcttgagctatattttaatttccacttaattatatcttgctagttaattttctagaatacaatggcttcttttaatattttcttttaagaaaaaggaggcaggacctgtttagtatgtggatcaaatattttagaagctgtttgctggttttgcaaatatctatttcatatgcatcagtcatttctttattccctaagatgtcagagtggataatcttttagttttctagtgtagcaattggtggtggaaactgctgtgatacataccctacgtttttcttttaaattatgaaattcagccacatcttatattttatgttctggatgttacatttgaagtttctgttctattagcctaatctagatctgttgcttataatggatggcttacaatgcagaggctgatataaggcgtgagatggataggaaggagcaagagcggaaaaagaatcaaaaggttgaatttctttcaggaggcactcaacctggaattatttctagtgcagccaaaattaacttgcctgttccaggtttgagaagtacttggcttttaactttcattatagtatgattttttaatacatccaaattcagaatttcttctctaaggcgatttttagtaagtgaatatgttcttaacttgagctattttctttaggtgttccaccggttgctggttctgggctgttttctgcaatgccatctgctgatgccgttccccgggatggtagacagaacaagaagtcaaagtgggataaggtttttttctaattcatgcatatagggtagttatgttcactcgtaagagagatgatgaaactgtttcatttttttctaaatttttttccccttttccagatagatggtgacagaagaaatcctctcccttcagtagtgcaggattctttatccactgtcggagctcaagcaacaattttatcagctgttaatgcaggcactggatatatggcttttgcgtaagtttatgaaatactgcggaaggtctagcgatctgtttatcttagaacatttttcgttattttggtttgctatttggatttaattgcaaatgtggtgttctttacaaaatttgccatgaaaacttctctgaaatcaaaaatactgacttcccagatatgcaatttaaattttcaccacattgaaacttgatgatatacccaaactatgcttttgttctgtctttaaatcgaaggtttaatttaacagctatggtcttttttctactgtttatccataacagtaatgctagacacgcgcacacacactgaaattgtacactttggtttaatttttgacactctttatttcattggttatatcttgtggacatttgttgaagatgttgaaatgttatggtctaatttttagttattctttgttgtgttttgcaggcagcaaaaacggcgagaagcagaagagagaagatccactgataggaagttggagagaagatcttgattttatcttaatatattgtgtttctccaatatttaatgataaacagagataaaatacacatccaatttttgaaatctaaaaaggggataaaaggataatgtatattgttagaatgaaaatttacttcttcaccttgtcataacttgattatcattgtctcccatgaaaaatttgtcaaactaaccatttgaaatactaaaatttgcaaaataacttcatttaatttactctatgtaattatgatgatcatatagtgtaaattcatagtcgttttgtgaccataatggttatttatagtcgcacagtataattttgcgaccataggttattttgctaataaaaatttttataaagattatttctacaaaacacacgtctcccattctattgcttgatttttttttttttttttttaacaaaatttctggaacaaaattctattgcttcattccaaaaggcacaacactaaaatgaactagagtgatgctaaattgagctgccaaaaagtgctactacaacagtatacactattttttaattgtcgaaaatattcataaatgtaaataatataatgtgattacaaatattgttttttttttgaaagaagattctttattaatcaactgtccttcaaaatcaaggacattaacatagtaggaatggaatccctactaataatacaa

SEQ ID NO: 18414 - DNA, 3860 bp, Cannabis sativa
gcggactcacaatagaaaaaaaaggttttttttttccttttttatggtttgttaaacggtttttaggccctaccactactttctcttcttcttcttctgttttttttttcttccttggatattggaggaagcatccttcaacagtactttttttctttctttctttttttttattattattacaaagtacccagttggtgtttaaatctatttctttcttttgtatatttttgaggtgcttacttttcttagtaaggtatagctatagttgttgttgttgttggtacttctattttccactacactgatattggaaaaagaaaataatggatgatgaatatgctaaactcatcagaaggatgaacccacccaggtaaaaatattctgaaaactccttgtcctttctgggttttgctgattttggtttaaagcttacttttttatttcgtggcttttgtttccaattttaaaaatcaaatcttttcaaattatccatcttttcttcttcccctggtttcttcaagcccccaattaagtagagattgaattgaagccttttctttttcctttttctcctattgaaatcagattcctcagctagtgttctgttcaaattttaattgattcatcccatatttcataaactattttagaattttgacataattcaggtgatatttgcagctagcttcatctgatatacgtttttaatgtttttgcagagttgttattgacaacgaaactttggatgatgctactattatacaggtttgcttccttttgatttttgtcaaacttaactcacataatcacatctcagatgtaacaagacattgaattcttgttatgaatttgatcaactaagttcatagatgatttttattgctgtgtttaggttgacagtgtcaacaagcatggaattctcttggatgtagttcaagtgcttgctgatgtgaaccttgtgataataaaagcttacatatcatctgatggaggatggttcatggatggtaataataaccctttattccaactactttgaaaaatttgagagccttcttcatattgtttcttaatatctttgatgtattttctgttttcagtttttaatgtggttgatcgtgatgggaacaagataagagataaagaagtattaaattatattcaagtggtaagtccatgaattcttatgtttttcttcattggtttcaggaaatatggtttgattttgcttctcttagatgtgttaattgggaatattagtgttggatttgtggagtttaattgtagaggtagtagattatccaatttcaggtaagtgagattgagagagaagaaaattgcgctttcattatggtcttacagaagactaattacttaaatacgtctgtatcaccggaaaagcagaagggtcaacagggtagttttactacaattacttcaaatgtcgttagataacatcctttttagattaggtatggcttcgattatttctcaagcccgccaattagttaaccatagacatattttatttaataatggtatgatagatataccaagttatcactgcaaaccccgatatattattacagtgagaaatgagtgtgaggttgagcaacttgtgtgcatagcagcttgtgttaaaacaattcatgctcaatagcccatgtgaaaagtgcaaagtagtctccttatgagtcaacatctgctaataaatctgataatttttgcattttgatgttcttgttgcagagacttgaaagcaatgacggttctgcaccttcagttagagagtctgtcggtgtgatgccctctcaagagcacacctcgatcgaactctctggtacagacaggcctggtctgctatctgaagtatgtgcagttcttgctgatcttcattgcaatgtggtgaacgctgagatatggacacacaatgctagagctgcagcggtggtacatgtcacagacggttccactggctgtgcgatcaatgatccaaaacggcttttaacaattaaggaattgctttgtaatgttctcaaaggaagcaatgatctcaaggctgcaaaaatgtcactttcagctcctggaggtactaatagggacagaaggttgcatcagattatgtttgctgatagagattacgagagaatcgaaagagaagaaaaggggtcaagaccgcatataacagtgttggattgccttcagaaggattacactgtcattaccatgagatcaaaagatcgtcctaaacttttgtttgacattatttgtaccttaacagatatgcagtatgttgtttttcatggcatggtcagcactgggccaaaagaagcttatcaggttaggaccatctcattattaaaagttttgcttggttgttaaagctaataaaagtagttcaaatagtcagggaagccatgtggtttgctcccacaaagtctgatgttcgaatttttactgggtatttacatagcaattgttaatagttctggtccccaaatattatagggctaggttgaaaaaggaaattttatagtttttacaccacaaaaaagtagctcaaatggtcaaggggtttgttagctcaaattttgaggtttgagtccttaccaaaactatcttttcttgatttcatctaacaagactcaagtcttcttgtcttgtaggaattttatattcgacatgttgatggactacctataagttcggaagcagaacgagagcgtgtcatgcagtgcctcgaagcagccattgaaagacgagcatccgaggtaaaaaagcacttaaactacacatcaaaagaaaacacctttcattttacttcccctcttatttcaaatcatttacaaaattgaaaatgttttggtgttgttatgcattgcagggtctagaactacagttgtgcacagatgatagaacaggactcctctctgatatcactagaatttttagagagaacagtttgtgtatcaaaagagctgagatttcaactaaagacaagaaagttaaagacactttttgtgtcactgatgtagctggcaaccctgctgaccccaacttaatcgattcaattcgcagccaaatcggtcctagtgtgctgcaagtgaaatataatgctgctagccttgcaccaaagcctcctcaagagacaacaatgaagtttctctttggaagtttctttagtggtaggacttttcagagcttcaaactgattagatcctactcttgagatttcttcttcttcttgtatattcattctcagtacataaacatgatagttatggtataatatagtataatatatataggtgttcagaccctctaaatattaggtcttagtgaccagtatcttgtgttgatactgtacatagaagaaacccagaaaccattactgtagaaaagcaaaagagaaagtaaaaaaacaaaaattactggttgggtttgtacctttgtgtatatatatagattcaagtcatgcaagcatacctacttgtaagtttgtatagtgtagtgtgtacataacaatattgtacagaagatacataagattgtacagatacttaagctttaatcagaacttgtatgtttatatgtatggttggtttttctatatatttgtttttagttcttaggtagttagaaagagtttttggcggttaaactctttcaactatcgatttacttgcatttaatcatttaaatttaaattttggcggtaaaacttttcaaactactgaactgtaagtaaatttgaagtgttatccagttaactgtcactgcttatgtgtacattcttatacacgtgacatgtttatattagtacacctaatatttgtattttaaaattaaataaaatt

SEQ ID NO: 18415 - DNA, 4319 bp, Cannabis sativa
aaaatggtatttacccataaaatattgatctaattgcaaaaagtaaaataatatcaactctttaatatgtttgtattaagaatcctttttacttaattttaacaatatgatttatcttttttgtagtatgatccttttaatttttaatttttcattttcctttttgagttagtaaattaaaaataacagtaaaataacaataaaataactaaaataataaaaatataactataaatcaatagaaaaataataagagaccaatagtattaaaatatataaatcaattataaatttactttaaataaattataaaacataaaaaaaaaaatatcacttttactatttactaattatatgtatatgtaaaaaaaagaaaaaaaaaagaaaaatatagaagaaaaaaaacacttgacaaatgactattttttttcttaatgaaagttggagttgcatagattcttcaataggatgacagtagacgacgaaagatcgatttacattggagggatcccctacgatgcttccgatgagtctattcgccgagtagtcgatgtctatggcgctgtcgacgctgttaaggtaagcagaaaacacttttatttgagtctagggtttaagcatttggggtttttctttgctctcactattttgttccttttaaattgtccgggaacgaagtactggaactatgaccaaaggaaatgggataatgtgaaattgtaatagaagttgataaccagtgatcagtctacgtttgttagtgggtagcaatttttttcattatctatgttaatatgttattatatgtatgtgttcatgaaatgtattttatttgtaaatgggagtacttgatcatgatatatcgtaatgagactcgatcatgcgtttttcttcgccctacagattgttaatgatcgtggtacaagaggaaaatgctatgcttttgttactttcacaaatcctaggtcagtcattgatgccattaaatgcatggatggcaaggtccgtttttcttttatgaatttcattatacttttagtgcaaagtggaacgtgtttatagttttcttattatgaaacatttgaaacagactattgatggacgagttgtcagagtaaatggtgtaagaaccagaggtggaagaacaaattttggtagagacagtttccggcaggattttgagagtggcagggaatgggatagaggtcgggtaagagataacgaaagggattatgatcgtgataaaaggcggtaccatgatagaaggtcgagagagcgtgatcagtctcaagattatgatttgcaaagagaaagagatcatgattttgaacgagcaaagggtagtttcttggaccgagatcgagttcaagatagagacctggtagataatgacagagaggattgggagaaagatcgtgatttcaacttttataggaaaagggatattgatagagccaatggccatgatacatttgtggaaatagatgcttttttgaaattgaatgggtaaggtatctcttggttgattctacggtccaaaattttgatctgtaacaagctattagttggtcaatacttttcttaagcatatgtttgcatatcttcactaatctcttgcagaaaatgtcctttggtgttatattttactttatgcaattgtgaagcaatcattttctttgttgctgttggctttttttacacaaagtttttagagagtcttgtgcagtgcagtgatctgcttttactatagtttttatattcaacttcctggcagtttgtcgtactatcttctagacacgtagctaagaaaacgttttgggagatcactttttacccactcttatacaacatactctggaagatatttcagttttagatggggaaatcatttgggtaggatctttttgtttttagtttgtcttgcaatgttgacaagtggattataatacatgtttttttcccaatgtttgagtgtaaatagagattataaaatagtggtctatgtggctgtcttgtttttcagatcaacaatttctgttatatgcagatatctgaatcctctttgaattcaaataagtactttatcatataaaagttcttggtactctatctttatacggagtgagaggacaaaaactcatatactttaatgcattggcattagaatttacatttgttcatccctatgatatcattttttttctccaggtcaactgaagctgatcgacacaataaagaatttgtaagtgatataaatgatgaccaagtaagtaaacattctgattttcttgttaagtaggcagttgcatccatgtatttgtttagggtgctctctcttcttcttttttcaaaattcttaccttatcagctagaagaacaactgtatagatccagtcaaaggcttgaagaactaaacgaagaggtttgtgttttattctgatttgtagaagaatattatgattgcacattgtttgcttacaatagaaagaggtcttaattattttcaaaagtttgctgatgaccattggatgatatgtggtagttttcttatcttcactacaaaaggaaagaacttgagtgagggcactttcatggttcagtaaatgcatagtcaaaactttgctgctaagaattcagtggaaacacacacacacacacacattgttatttttatctcagatttgtttttgtggatctaaggttctttacttttcagattctgcagttagaagataacttagaagagaaagaaaaatctgttttgtacttgcagcaaaagtctaaggtaaatcgtatccttgttgcttgagttatatcactttacttttttgatttagtgttttcaccacttctgttttctcataatgagcaaggtgactttcatttccctgtaatatttttatgattaatgcagaaattggaagatgcgttgatcaatgtaaagaaaacctcatcacacaataagacacagttgaccaaggtatttcaaatatttatcaatataaagctggagaaattctacccagacaatgattggattcagcgctgatttttctttgattttctgcagcttcacaaatgttttcggctagtacaagattatactgaaagacttaaaaccagggaaaaacaacttcaggttggtcatctctcagagtcctcatgtaccatatatgatactacttttttcttagttgcatgctttattcgtagctaggacttaccagagataatgcatacaattgatcttttactcacgtttatcagtatgccattttgcatacatactagtttcgtagtacttattcatctttcttaaacctctgtttttctggtaataatactgtcgttcctgtaacatgacattgacttgcatacatatacattctatccttgctcgagaacctactatttatatcatatatgcttggtcttaagactcttaacactctcatattgctcccataaaaatgctgccgctcttctacttgaagcagtctcttgttgatgaggtgaagacaggaggcctatgtgctggaatcacagcgaatggaaatgcctgagtcatgctcagtttacaaggcttgtaatttgaacaacatttcattttttggttttcttagggcatccatcacattttctgcggtgcttagtagttgtatcttctgatatatagtaggtatatatatatacttaaacatgagagtttataagtgttagttttattaatcaaagtggaagctttttgaaatgtacaaggaagttgtttttctcgccagtggtttatttgaaaccttttttggatagttgaagtgaatcatatagctaataaaatatctactatattattattaatcacttcagccctatgctgcagcctatagagtatagaggtctcatatcattcttgtcatgttgtagacagaacggagtagaaaattcatctttattgtaagggttatttgtttgtgtattctttcaactttctggggttaatattaacaaatttaacaaattatctacaaagttcgaaaaataaaaattgacacaattctatttcaattcgtccctccttgcacctacctaacccccatgaccctccctcattgaaattgcctatgaaagcatctttatcatgtactattaagcaagactcttagttaggaatacagttagtagagttagttacagtttgtacactttatttaactgaattctaatataaaagctattactctcttgattcagttgagaatactctctctctctctctctctttctattcggctgaggcaatcaaggagcaaactggggttttt

SEQ ID NO: 18416 - DNA, 3431 bp, Cannabis sativa
agcttgtaaattctgtgttcattgtttttaatttctaattcataacatagaattaatctgctaagaatcatcaatatgaactggtagtaattaggactttcacaaaccactatcgagaaccatgtttcaagccatataatgacttatttaacttgcatacggcattgggtggtaattaactctcccttaagactatactcttgagggatagttatatgcatatcttcatgtaagttaccatgcaaaaaaatattgttaacatctaattgatgtaatgtctattctttaatggctgcaagagtaacaaatttaacagtgataaatttttcaacaagggcaaatgtttcaaaataatctattccttcttgttggttatactatttggccaccaatcatgctttaaacctttctactggaccatcagtattgaactttattttataaacccacttacaaccaatcacaagttaatgtaaagaaaggctgacaattgtccaagtattatttgcttcaagggctacaatctcaatatccatagcacaattccaataaggaatcccatgatcttgataaaagagctcaggttcttgcagtgcagagatggcaaatatgagagaaagatatgtaggagatagtctggaataataaatggcatttgatagtggatgtgttgtaaccaaaatagaatcctaaaaaattacttgaagataagttagctaaaaaaagtgataatcagtgagataagatggcttatttcgagttctaggaagtctagttttctcactagatacatacacttgtgtagtaggttgtaatttttcattattgggaacagatgaattagtagaatcgttagatgagggtaaaatagtttgtgtagaatagggaacagaatcaaaaaaatgatgatgtgaatcaagtaaagattcagtttggacaaaaggaaaaatatattcatggaaaatagcatccctactgtagaaaaatcgattgatattaaggtctggaaatttatatacctttataccagttggataaccaaggaaaagacaaggggcatatcttggtgaaaattttattctagatgagctaagtgtagacacatatgctaaacttccaaaagccttttaagtgttcataattgggagacatatcatgcaaaatttcaaaaggagttttgcgtttaagattgggtgagggattttgtttatgaggtaagtggtagtagcaacacattcattctaataacatagttgaatataagattaaaacaacaatgcattagaaacattgagtagatgctggtgttttctttccacaatagaattctattgaggcctttggacacaagaatggtaataaataatgacaatatctttgaataaaatgataaattgcagctctttggcattatcaaatctaatgcatttcatagatttatttaactgagtcttaacaaactgtaaaaactgggaaatgactatttgaaaactaagtttttattaataaaatggacccaagtgtatcttgagcaataataaataatggtgataaaatacttatatcccgtagtagtcatggtattatatggcccccatatatcaatgtgtaaaagattaaaacaattaacaacaatattatggtttgatacaaaaggcaactttcttttttagtatagtggcacaaaatagtgaaaatgaggactaggataatgtccaaactgtacattttaaattaaaggatgttgtttgatacaagaaggatgtcctaaacgatagtgagatacaatattatcaacaatcttagaatcagaattgacaaaaaatagcaatagttatagtatcatgagacaaatttaaatagtataattccccattttgattgcccataccaatcatttgagtcttcatattttcctctataatattatacatagatggaaactaagagatgaggttagtaaaggaacatacaataaactatacttcaaattaggagcatgaaggacattttttagaataagatcatgagaaagtttaattgttcgaacacatttaatagaaatatgagaatccttaggcaaactaacaatcgaatgtggtgtaattttatgtatctcaacgaataaagatagaccaggacacacataatgtgtagttcctgtgtcaattatacatctagcagttaattcattcaaccgccttattaggttggttgtggtggtccagctctgcctgatgtgattggaggatgtattcttggtcatctatctacctcaagaatttgaatctctgttaagtgaatacattgcaatcaacttgacgtggttctttagtttggccaacatggcagatgaactctctaagtctggaaaactcgagatcttctcccaagtctacatggggctcgccaatggctagttcaccaattctcatagccgtttctctagcatagtactggggacgaggtctagttgttattcctgggggctgctccacgtgggtccttccttcagtgggaggcgctagtggagggtcttcccttggaggtaggggccgattgtttagatccatcgggatgtttatgttgacctagcgagctctaatggccaaatttgtgatgcctaccgagatggtaggattgaccacatttgcagcgttcgtggaaattccagtcgcgattggagcatggacattaagatctagaatcaaagggtcttgcgggaaacccgatgaggtagaggctgtagtcggagtttctctcatgttaaccatatcgtttgattagattacttgagttcagctcgctctcaatgaaagcaccaaactattaacctcggatttggccaagtaacagtggagtcgagtgtaataccgatgctttccatgtgttacacaattagaacaataaagtaaatgaacacaggatttatagaggtttgacccctttagttagcgaataatgacttactccctttttagttgtattgatgccgagagatactcaaatcattatagagatgggtctgaactgaagtagctctctaaaggttacaatgtaggaatcagagttggaaaatctcaagtatgacaagagcagtgggtgtgagagagagagagagattacatatcatacttagagatagggtttttaactagcactctatgacttagagcttacggtactaaggtttggttaaggctctttatataatagagcttagacccttcaaatcccttagaaataggtaaaataactgttatttacatatgaaattagtaaaacacaaagactaaaatgtcccttgaaaatagatattttcccctctgtttttgtggactgttaaggcccaattcgcagtctggcttgttgttcacgtgtcaagttgtgcaccaaagtcttgtcaagccaatgtctggctggccatgcat

SEQ ID NO: 18417 - DNA, 3389 bp, Cannabis sativa
  modified_base (2051)..(2059): a, c, t, g, unknown or other
ttacagttttacaaatattaggtacttatgccactaaaaaaatcattaggtttatgccgcttacaaacataaaactttgagtacttatgccgctatttaaacttatttttttactttagcggtaggagtatctttgttttgaagaaattataatataatattttttatttgatggtgtgcagtacaattatagagatctaaaaagattttgataaatttcaaataatttatagtagaggtgctacaaatgtagtttaaaataattagttgtacaagtacaagtataaaagaaaaatgataaatgtgtgagggtgacggattgtttcaatctattgtattgtaaatttcaatttttaattttttttaacaaaattagtcgaattcttactatatctacaatcacaatgatataaattttggttataatttttttataagatacttttatttactaaaaatattttctatatttatatatggaaaaataagacagctttatttttgctcttaaattatgatctttgtcaatatgatttttaaataaaatgaaagcattagcaatagctgtttgtcatttttatgtacagaaataataatttaaattaaaactaattctttttcaaaaaaataaataaaaaaataaactagtcaagttgcttacaccctcttatcatatttgtctctagatacttattccgtacatcgttacaattgttagatcgatgattacattgattgaagaatacaatgttaatcattcgaaattaaagtcttatcaaatcatgacagctagtgaaaccatttacaattgcttggtttattgctcttttgctagagcttgttgggatcaagtgaggattggagtgatgttccaactgtaacttctttctcaggttggttacataatgttttgcatctgtgtgggatggtgagcagaggaaattaattgcaatgacatgttgctgttgggcaatttggaagattagaattgagctggtttggtctgagaagaaccccactgttaagggggtcatcattttggctcaaaccacgcttacgtactaattggtcctatgctcaagatcgtaatctggtttctactggatgctgatggccacgaacagcggtgggcaatggtgtgaaaataaacgttgatgcaacaattttctctgatgttgtaacttatagtttcatatgtgttgctagagacgctgctggtgttgtggtggaggcgatttcttgctgtcgttcaggtcatatggctcccgaaatggctgaggcaataggagtaaggaagccttaagctggattaaaaagaagtcttggcagggggagttgaaaccgatagtcttacagttgtgggattgattcgaaatcccttacctatgttatcttactttggagtattatttctggttgtaagatgttattagtagagttgtgtgatgtttctgttacttttattagacggtctacaaataatgttgttcactttttgactcgaacattttattttgtcgttaatcgctgatcgtgttatcaagtgtaataatatttgatgtttctcttaactttctgcaggcactcttgaatcattgccactaataaaactgacgaattattttaaataataaagtctatcaaatcaaatttaaaataaattatttattttttgaagcaaaaatacattaaacttcaatcaaagtatatatattatatataaaagatattaaaattagaaaataataatttgaaccataaatatttaaatttaacttctggttataaataaatatttaaatttaatttttagagacaataatacttaaattttatttttgaaactttgtagatacttagttgttaaatgttaagtaaattgtcacgtgacaatccctgattgatccaagtcataattttttttatatatttttaaaaaaattaatttaaatataccaataagaaaatgacatgtaaataatgatttgacatttaacgtctaggtacttacagaattcgagaaatataacttaggtattattaccgctaannnnnnnnnttaggtatttatttgtaaccagaagttaacttaggtatttatgccacaaattactctactagaaaatataacttgagtctgacgtcaagatctgggttgaggtttgggttcgggtctggggtctagggttcgggtccaggtctgcgactgggtctgggtcggggtccgggttcgagtcagggttaggttcaggtccaggtccaagttcggcttgtttcagtgtctaaatctaggtccggttcgggtcagggtttgtgccccaagtcaaagtcagggtcagggtccgaaaatggggttaaggtccggagttgaagtttggggtctagggtctaggtccgaagggctggggtacgggtccaatttcgggtcgaggtcggggtccgggttcggggtcgaggctggggtttgggtcagggttcggggtgcgagtccagtctggggtctaagtttaggtctaagttcggggccaaggtgcgggtgtagggtccggggtccgggtctgaggttagggttggggttggggtccgagtccggggttcaagtttgggtccagggttcgaggtccagttcggtgtcagggtccgagtttgggtctggggtccgactttgggttaggattcgaattcaaggtttgggtcgtggtttgggttcgtggtcggggtcgaggtccagggtttggggtctagggttcgagatctcggtcgggttcggggtccgaggtccagggtttgaggtctgggtcagggtttagggtctgaggtctgggtcggggtccagggtctagggtctagggttcgaggtctaggttggagttggaggttcggtcggagttcggggtctagggtctgtggtccaagtcaaggttggggttggggttaggttaggatcggggtcggggtccaggacgggtttgggatccaggtctgggttagggttcgcgggtccgtgtgggaatctggatctaggttcgggtcggagtttgggtccgtggtcaggttcagggtctgagtcaggattcaggtgggtttgggtctagaatctaaggtctaggttggggtcggagtccaaaatattgattaagaaaaaaataagtgtttacaaaattaagaaagtgacatttttctgttttcaaaattttttaaaattttaattctcgatgacaaaattgaaaaagtgaaatatttttatagaataagattttaaaaaatattttcatttttctaatttaaaaaaacaaaaaaaaaaaattattataaaaatattactaaatacaaccatataatatctttatatattaaagtgcctatctaacggcatttcttggtttaac

SEQ ID NO: 18418 - DNA, 4339 bp, Cannabis sativa
tttatataaaataaaaaatattaaaatggggtgcttttaaaactttttggggtgtaaataaaatttctctttttttatatatttatgctgacgtggtagtgttgtatgacataaaaactagtcgaaattagaaaaaaagtttgaagataaataaatataaaatagatatagttaggcggtgatgactatgaatgagatgaggaaaggagggcacacaagccaataaagaagaagaagaagaagaaactcttgactgagaacagaagaagaagaagaagaagtgattttgagagatggctgggatggtggcaactgctgagctatgtgacacaaacgcagggcttgtgggaagtggtgaggtgagaatcatggagccagtgttcaagatgtacggacagaggagatcattctcaggtcccataatgactgtgaaggtgtttgaggacaacacccttgtgagggaggcacttgagaccagaggagatgggagggtgctggtggtcgatggtgggggcagcctgcgttgtgggatgctgggtggcaacctggctctgctggctcatgacatgggttggtctgggattgtgctcaatggttgtatcagagatgtggatgagatcaatggttgtgatattggtgttagagctctcaattctcatcctcttaagtccttcaagagaggtgttggtgagaagcatgttcctcttcatattgctggtgtttttcttagggattctgagtggttgtatgctgatgctgatggcattctcatctccaacactgagctctctctttaattcaaaactcaacacatgtatgtctatgaattcaattgaatagactacaatgcttgtttctttctttctttgtttttggtttatcataataatattaataataatagctacaaatgttttgctcttttctttaaaactttctaatcaaaacatgaagtaaccacatactatttccattttttccatttccaccagtaagaaatggctaagtaagttaaacacacaaaaaaagatacaaatttccatctctcactctcactctattgttttctaaacaaattgctctaaagccttgttgtatatttcaacaaacaacagcaccaggtaaaaaaaactacttccattccattccattccaactcactgagatagtcaggtgaagagtagaccaaacaatcagaagaaagcagttcgtccacctcttctgctatgccgatcataagaagtgttgaatttgtccactagctcattcattgcactaaatcacacaaaacaaaacaaaacaaaaaacataatgagaatatcactatgcaacattagctatcataattgctcacacttcaggcctctcaacatgttaccacaataaaatgataaacatgtaagagtttagttaccttgagcagttggtgaacatggctaggtatgtaatcagcaacgtatcattgtattcctattaagaaaagaaaaaaaaacagcataacaggagacaaggtgagcaataacacgatgattattaattgaatatggttcactatattcatcactactttacaatgttaatttaaaattgaaaaggaaaattgcaacataatgaaactttgacctcttcgtttaatcaaattcaaaccatgtaatcatcaccttatcctccaatctattctgtccaattattagaaagcaacgaggatttcaaatagcaacaatcccccttccttaatcacactcacaaatctcatctatttgacattccaacattgaccggatattttttattttttttcatatatagagacagtaagattgcaactgaacatatagtcattattatataaccaattatgtcatatttttgataaaggcatagtcaagaggttccacattctttttgttttaagtgattaaaattcttatgttccacaaaattgtagaaaatatgctataaatacaagtgaatgttagaaaatgagcacgctgcacttaccatcaagaaatcatccaagaactttccagattcaatggctggcaaccttctcagaagacttgatacttgtctcagcagtgaattctcacaaggtatttcacctaaacatccaaataaaagtaaagaagattaaaaagtgcattgtcaatagtagctatcctctgaccgaaattgtcaaacgactgaaaccttgagtcaaatttgattaaaaattttatgccaaaaatattctagttatcatcgaaaattcagtcacccaatggactcgcagattcgtgcttgttttccgattgagtgcgaactttgactaagggacttttagaagcacaatttctagtgttcaaagacaagctcagggtagttgagttgaaaagagtctagaagagatatagctagagttagagatacaactactagcagctgtattggttaatactaactgaaatatgggggctgatgacagatttccctttatgtactactctttaactcaactcagaaatctatctgagacttttgctctaaatttccaagtgttgaaatcatatattttctcttttatttatttcttacttccctagtcttcaaattattgatcattaaccattgcacgtttttacatttaaggataaatatctatccagtctactactaaatgtctgttcatacctttctgcatcgaaagaagatagtgatgtagcactctaattctgctattcagcattttgatggcactatgagtgcctgtaaggtgagcagccactgcaaacaactaaattatattaatttacaaagtaacaaaacacaaaaggaaaaaattacttatgctggggtgatcagtgatcaatatttttataatttttaggagaaagaataagataaattataaatccagcaaaatctttaggcaacacgggtaaagagaggatgaagaagggctcacattgtgttgcagcggaacctccatccgaaggtttaagatgagcaacatgatcaactgagattctttctgcttctactgtctataaaacatgtccaacaacaacaacaaaaaaagaaagtgtaagtaactctgattaataatagttaaaagtgttaatagtccatagatactagtgtctaacctcaatagtgtagcttgaacgaacaaaaattagttgtggaatcccatctatgacatgcagctctagagtttgcacacagaaaaagaagtaacaaagttaatagacagagtttctatagagctacttaaactaaataaggaataaacatgaacaaatccacaaaattaaagacaatttcgaagaaaaatgcttataggggaaaatgtaggtcccctgatcctgtaaatacaatgattgagtaaataaatataagctgtaaggcaaaagaaggtgagtgacataccactctcaaaaatggtaactggaagatccttttgagcatggttgatcgatggattgaggagaacataaagagggctttcattaatatccatcaactgtttcaacccaaaaacgttcccagtaaaattattgaatttaagggttagctaagcttagctttacagatagagatataacagaaattgacttacagctttatgaatgttcatgtctgattcctgagcatcacttccagtggagtaccaaccaagtacgtaaaagttagggaaaaccttcttatctgataaaaacaaaaacgaaaaaaaatcagcaaaaccctacgattatactaatagaatatgagaagaagaagaaaggcactgaacagagttcttgcttcttctcgaggaaagcacggtcgagggaattagtggtggaatcgtagagaagctcgaagctattgaagatctcgacggtacggcctctctggactccgataacgcagccgtagaccctaggaggtgtagatgatggaggggacgatgaagaaggggctgcatcagaggaggcagcgttggcgttggcgttgttgttggcgtgacactcggaagaaagatgtggtggttgcatctgagacttaaccctggtgtagtgatcggatatgttgactataacgagtgggtgtagcttgaacgttagtccactgctcgacgacgacgccattgttaccgttcttcttcttcttcttcttcttcttcttattttcgccgatttgcaattgcactttcactgtacccttttcccaaattcagaccaatatttatttattttttagctgggctgtgaaatttggacttggatcaaggtctaataaacagcattttgggctaacttgggccaatatgggccgactcatctatacactccaaaaaattacactctatacccacttt

SEQ ID NO: 18419 - DNA, 2705 bp, Cannabis sativa
acatgtagtttttaattttatctagaggaaactcaatcaaagcaatagcattagttgccaatgcccttttggcaatatagtgtggccatggacaacaaaattaaagatactcgaaatctttgaaaaaatacaactaaaaaaataagtgagagtgattcttacagatagtgatatagttgttaatatctcatctaattaacgaaaagcccttttatagtactaacaacaacatcagaatcacttttcaaaattacaaatacaggcatcaacccctcgagtgaggggatccttagaaggtagacttctaaaagtcacccagacaatgtcagcatcatcatttctagcagttgcttgctattgtcattatatgctccatcccaactgcaacattacaattaatctgtatcaatctgtcagtggcggattccaatccaaacaaatactagcattagatattctaaaagaagagaggaagcataatttgaaaaacactacaaaaaaaattaaaatgatgggaaaagtttactcacattgttatgaattttgtcatttttagccatctatatggtacccaccacaattgatgcatacattaaaatatcattggtatcaacccccatagatgttgagaccataagaactttacccaatctcaacaccttgtaccattatcattaaggagaattaaatcccaagaaaaagatctctagagatggtaagcaaggttgtagtgaaggaacaagtgttccatagattccgtttcacccccacacaaaagactcatcaagtcatcaatcatgatctattaccaattagataaaaattatgtttactgtaattaatcgatctatttatataaaaatatgtgttttgtcccatattatttattgttgtccgtatttttaccttgacaacacatggctttctcatgaaggccccatctacaggccaagaaagccctcataaagcttaaataaactaagtctaagccttacccaagtctagcatccgagaatgccaattatccatcttctcgagtaaggatagctactgagtggactagttttgttcagagaagctaattaacgacttgtctccaaaggttccagtgattcgaatggagcttagcctaccggacttgttgcaagctattcatggtacacccaaggcccttcaaggcgtgttggcctatactgatacctttcagggtgggccctagacataggcggactaggcatgtgcttagggcccagtcattttaggggcccaaataaaaaaaaataccttttaaaaaatgtatatatatttttaataatttttaaaaatactatttatctttatagttagggcccaaaaaatatttttgcctatggcctatttcaacttagggtcggccctgatacccttgatgggagtatgcaggaaagaaatacgaatttagaactatttaccattctgaatgaagtctatgtgttacacctctgacatgatcccataaaatttggggacctatctcgtctacccactcgcaaaaaggctcacggcaaaaaagtagaatcttctatgggattgtcacgaccactactctaatacaccctttccccatgctccaaacgacgatgactcgcgcgtcctataaatatcaacaggacaatgaacagttgtcacttactgattttatgggttgggtctcacctaccaagtccaatacacccaaagttaacacttatcttgtattttctccatcgatggactttttggtatctaaaaattctaattgcgcctagatcaatctgactctaggtgcatgactacctataaataaaacttcactactgccatgaaagaagtttgatactactgactcatggattaaggctaattaacgtaaaaaattatttttttcatttcttttaacctttctttagtttccaattttctttaaatgggttttcgaaaattttggtaaacactcatgtatgagtaaattgtggggtttataatatatatctatatatataagttattgagttaattataagatatttgtatctatatatatgtataagttgttgagtaatgatatgtgtttctcaaatatgcattaaaatatgatgaaattataaattttatgagtttttatattttttttttatgtaaaaatatggaatttttttttaaaaaaaaaaattattttatgagaaaattgaaaaaaaatatgacaaaactaggtagaggtaaccaggtagtctcgtaaccagctatcttatttttctcatattttttttacttttttctaacattttcttataaaataatttttttttagataaagtcatatttttacaaacttataccttaaaaaccataaaaataaaaatttctaataaaatattacacatagtgatatgatattatttttaaaaaaacacaataggttgttcataatatgtattcctcttatgttttatgagtctatattgttagccaccacctaataaaaccgatggaaaaatcaaaattaaagtgaattaggcctacaactcaactccaacatcaaatttattatcatgcccaatccatgttccttaagcaaattcattaatgggccttaaaactgaacctaaattaatgcacaaattaatgaaagtgaaaattacatgaaatatgggattttataacaaagttagaaaaatatggcattt

SEQ ID NO: 18420 - DNA, 2914 bp, Cannabis sativa
tgtattgtagaagcacccctaatattattgtctttttttttttttttttttaatattttagagtgtaattaatccaaccgaattggtgaatagtgattaattgagtagtggtaggttagtctgattattcattgagtttatatatggcattttgatttgatattttgtgggtgcaagggcccagagaattggcaataatgtgattaagaaaaagtagcaaaactagatagagtagtatcttgccatttttaatgtttccttttaaacaagagtatctaggaaggtgtcctcatgtggggttttcaatttattgttgtattattatttgaaaatttatatatttataggaagcttctttgataagggcatgctgtttggctttaacactactgtgtttggcagaggagaattttggaaggagggagaggagaaagaggagagcaaaactcttttgtttggtaagagggaaaataggaaggagaggatacatggagggatgagcttttcttcctaatcttgtgttttaggctatgtttggtaggatggatggagaatagagaggatgtagagttgatgaaggatgtagaataggaggaagggagagtgaaataacaattagtttaagttgtttggtagaaatgatggagtggtggaaggatggagagtatttatttttgaaatttttatattgtctttataaatatttttttaataatatattaagagggtataattgtaatttccgacaattgaagagggagagcatggatcctttcattagtggaaggattctaaattggagatttggaaggatttgctttccatcttgctttctcttccctcctcccatctctcttgccaaacaagaagaattattatcttctctcatctctctctatccacctctccctcttaccaaatattgtataaatgaatttacaaaaatatccttttaaaaggatttttttattaatttacaacaactattatattacaaaaaattgtgaaaaaaatgcttaattataaaaacttatacaatttaaaaaatatacatatataatatttagaccaatgtaatatttgctaaattcttcataaatatatataatttattatatcttcttaaaaatggattatgaggtgattaaagtggctattaaggtctggcctttaatttttttttaatattattaatttaatgctcatgctagttattaatatctaatctttgatgaaaaaaattgaaattattataatttaaaaaaatattaacaaagtatttatgattatataaaattgttatattaactaaatattttgtttatgataataatattattattaatgttcaaattattataatttatttttataaatttgtgtttattttataatgtattattataaaatatacgatttattataactataagttgtcttttttaaaaaataaacaaatatattttaaaataaataataaacaatttaatataataaacataatatttttatagtataactttttataaatatatgtttattttaacaaaatatttaataaaaataataaacaataatgtattaataatttatataagtgtttatttaaaattaaaaaaaaaaaaacatacaaataattttactaattattgatatgttttatatctatgattaatttatatggaatcatcctatatattatttcttaattttttttttcatttttacgtgttatatctaagtttttgatgagggacacgtggaatccaagtcaacatcaaagtcctacaagtgggtcccaaagaagataatttgggccaagctcaaattatataggaccttctaggaacatactttggctccgtgatcagatgatcttctgctagtgacaatctgtatccggaagtagctctagtactgtgatgccggaagagtcatacaacttgttcctagaagactagttcaatttttcttttttattcatgctcacaaataagaaaatagatgtttctcatatctcaatagaagatcgtattaggattgaccacatgatccttgctatggggagatctctaacgtaaaagagcagatactttgatgagagcttaaggattcataaacttagaagaagcttatgctcaagtttatggagtacttccagcaccttccaaagacataacaacaacccaaacttcgcagatgactactccatcaatttttcctttggcatctgccttcacaactcctaccatttatggaccaagtgcttctacatagctagctgcacaagttagttttttcaaattcagagcagtacaaatcggattcagtgccgctcttggacaatcgaagcaaaaagtagaagctccagagtccaatgtaagccaatcgcggagcaagaggagtttaaagggtccaagccgacatgattctacgaaaaaaggaaggacccaagagttaagatacttcgagtacacaagccttgtggatactcgagagaatgtttataagacaacttgtaatatggtccattacaagaagcctccgtcgatgtacaaggacagaagataaaaaaatgatccgaacaaaaggtgtgaatactatggtgatatagggcaaccaccaatgagtgtgactatctgagggatgaaatcgaaggattggtacaaaacggacgtttgtccaattgagtaagaataccaatcatttatcctggacaaggggttgcacacggacaattttttattcctagacagcatggagccattaatcctccaccgaaaccaccaacatgacaccatcccaccgaaaccctaatgcaaacatcactatcccactgattttttttctttttcttttccttctctttcttatggaacgaccagaaccactcccccccccccccccccccccc

SEQ ID NO: 18421 - DNA, 2640 bp, Cannabis sativa
ttttttttttttttgttacagtaaatgagcatgacaacaaaaaatattgacccagcaaagaaaatggctaaaatgacatcatcatcatcatcatcaatggtggttggtgatgaagttgacatgatttcaaatcttcccgatgcattgataattcaaattctgtcgtttctcccaactgaagatgtgtttcgaacatgcattctttcgaaacgttggaaactcatctggtattcagtccccacactctttttctcctctgatgatacaatttatgatgttgagaaattctatagttttgtggagaattattttgaacacagggagaaaggtattgatagtaatattgttgatttaggtataactagttttgagctttacatatacaattattattgtagaagtaagggtgggattctagataaattgttaagttttgcagttaagaataaggttaaggaaatgtatgtatttataggcaaagagattgttgaagaaggtggtgactactcagatcactactactgcttgcctaagatactagacaatgcaagatatttgactattttggagttgtatggagtaaagttggatactagttcttgttcatttagttttccatctttaaaaactttatcattggaacaagtttatcatttagaggatgcaaaagaggatggggtagttaaatttttgttgggttgtccttctcttgagaaattggggttatatgattattgtttctatggaatgaatgttcagttacaaagtttaagccttaagttcatggaacttatgtttgttgacattgatgatatagaagtacaaattgaagttgaagctataaatcttgaatctttggtagttgatggtattcccttgaaccgtataaatttctcttcttgcaagaaaatcagagatttatcattgcctagttctagagataatagtccactgtcatcatttgaagctctcatttcaaatattcctctagttgagaatttggctttgagttgtaattcatcaaagtcagagcaccttaaaatctcgagtcaacatttgaaatgtttcgattttgagaatcgttgttactcgtataatggtggtgagatgaaggttgttacaattgaatctgctccaaaattagcatatattagttatcaaggaaatcttaattttaaggtatcaatggagtcatctagtttggtaaatggaaaaattataattcttgatgcacggatagactatgacacaaaatggtttatcgatttgctgaatttttttgttaatctcagttactcttggaatactgtgacattgaaagtctgcaattatgaggtatgttggttacttgtattgtgtatttcttttatgtaattttgtggtgttatttcaacttcatattgttgttactctctttatatgttttcataaatctgtatatgcagtccctcatctggccagaaaacttgccaaaaaatttgaagaacttgtttcgttatcccttggttagttggaagcatcttgaagtttttactaattatgatcccgagaaagagtcagacttgaaagaagccttaatgtggatttctccctctttagaaacattatctattaacgaaaaggtcatattttagttgctttacaatattataacccctgattattgggatgactgcattttattagctttctttgataattgtactctttgatccttttttttagattccatttactttattagtagctttgtaataaagaatttactacttttagtatatatgttcttgtgaactacccaatattttgttctatttattaatgttggaagatttggtttaatatatgttgttgcaatttgtacaaatcaacaaacttggcatcacaacaacatatgacctttttctgtatttgaacttcaaacttcatgagagcaataatcctagaattgctctgattatacagttgggtactgaataggactgtaggagtatgaatgtagcgaaatgtttggctaaatgcttgagcaactgctcttctatggctggctgcatagtttggttcagagatgtgtttgatgatattcaatgatttcaattgagctgacaaggtctatacatatttgaatgacagcttcagccttcaggaaacatgtataggtacaggttattggttgaaaatgtttgatctatgtcaagttcaaatgtattctggtacgatcgagaactacttgttatggtacaatcttttcctgttactttccaatacttatatttgaccattagggcatttcctgtctcttgggctgaaaaagaaccactgcctatctccagtattcaccattgacatgcctgcatatcaattgaattcttacaaattctaacaaacaaacaatacaaactgcctatctttcattagattttataacttgaaagtgcctgattctcagtacacttgtgtgactattgcattagatttaacattgttcttggaacattgcattaagtaaagcttacatagttttacttcaaatcttgaatttgtatgtaaatgtatatgtgtggaaaacagagagaaatgtaaatattagtgcatccacccttgaagttgtggctctttggtgattgttacactggtttt

SEQ ID NO: 18422 - DNA, 4549 bp, Cannabis sativa
agctttttggaaaccactatagaaatgttgagaaggatgattaagaaaaattagtatatgattttaagtgattctactattaatgaattttagtccacgagtcacttttatttatgattggaatgttctcttgatcagagcatattcaagttacaataccagagctcactttttgtgtgttagtctaaaagtctcctttcctattgtgtttccaggtacttataggaaaatgaaagggcaataggaggtaaaaaggtgtgtgaactatcagtctctagttgttacttaggctccatggtaggagtttagtaagataagatttgtcctatacgcatctaatttgatagtgcatagctatgactttgtctctacctaggtgaatgggtcatgagaatcagtatgattttgtaatgatactaatcttgcgccattgtggtcatgtacaataatcttcttttgaatttgtgttaggctgatgatgatctcctagaagacttgttatccgggggctagacacctcctgggcaactaataatttgttttattattttccttggcaacatgagatccacattcagatgtctcttcgctcgtatagtttgggagtctttcctattgtgtttccaggtacttataggaaaaagaaagggcaataagaggtaaaaaggtgtgcgaactattagtctgtatgtgctacttaggctccatggtaggagtttagtaagataagatttgtcctatacgcaactaatgtgatagtgcatagctgtcactttgtctcttcctacgtgaataggtcgttagaatcagtatgactttgtaatgatactaatcttgtgccattgtggtcatgtacagtaatcttctttggaatttgagttaggctcatgatgatctcgtagaagacttgttatccaggggctagagatctcctgggcaactaataatttgctttattattttccttggcaagaggagatcaactttcaggtgtctctttgctcgtatagtctgggagtggagtaaatcgataagggacgttgatctatctatgaatgggtccctctctgccacatggggcttcatatgtgtgccacatattttgataaaaaaatatgtgtaacacctttgcgatatcatctgcatcataaataagtaaaaattaattatttaattaattttaaagataagtgaaatgcaattattcattttactacttaaattaattaattaataaattattttaaataaaattatcacatagttaattaaattaaaaataataaaatttaatctacttttttaaaaaatattttttaatttactaacttatgacttacattgattacctaaatccaaatttaattttcaatttctactcataattctaccaaagattcggaagcatagcgactatattttaacttattcaaaatttttaaaatctactataaacattgaatagttacatatgcatcacaaatatagaaaatattatgttaacgttaccaataaatataaatgcatacctatatatttcatttaaaaatgaacaagaaaataaataatgattgtctatctacatacaaagaacaaaaataaaatatacataacattaaaaaaataacaaacacataattattaacataaaaaaatatcacatttaacttaaatatttattcaaaattaatttttttaggaagtttaaaactgatatgcatatcttcatggcaaaatgtacatgcatatcttctgaaatctctaaagatttaggagaaaaccaagagagaaagaataagcaagaggaagagaagaagcgagagcaagagcaagaaaatttaacgtagaagctgcgtgttgatggaagctgtatggactacttgtccattgcaggcattgctcattacacataggggcaacaactacatggagcagtagtaaagtttggttttgaagaagcctccaataatgaggctgaatacgaaactctaattgctggactaaaactagcacatgaggtgcgagttgactaattagacatatatagtgactctcagctggtcgttaatcatgtcctaggtgaatacccaagcatcaccaatttagaagaaatagacatgaggatgaaagctacccaatatctcatcttagacagggttatgtacaaaagtggattctcaatgccattgccaagatgtgttaccaaagaaaaagatgaacgactgttggttgtagtgcatgaaggtttttgtcgcaatcacgttggcaaagcctttcaaaatagatactcacgcaagggtatttttgccacactaagattgaggattcaatggactatgtcaagaaaggtgacaattgcgaaaggctctaaagatctcgagagctccaccaaacgagctcacacaaatgcaatatccatggctctttgttatatgggggatagacttaatcgagcaacttcttacaagaaaaggaggagtataatatgttgtagttgcaattaactatattactaagtggagagaagctgaaacattggcaaccataacttcaaagaaagtcctcaactttgtggtcaataacatcatatgtcgattcagactccctcataaaatcatatcagacaatgggaaacagtttgatagtggtatgttcactgacttctataataggcatgaaattattcaaagcttctacacaattgcacatcatcaagaaaatcagcaagtagaagctgtaaacaagaccctcaaagatacaatgaaaaagcatctagaagaggcaaagggcaattggccccacctattcccagaggactttgttcacacaagaccaccgagaagacaaccactgggtagacaccatttacgttagtatatggctatgaagcgatgcaattaatcgaattagaaccaccataccataggaggatatcctaggactaagaaataaaccacaccttgctggaaaaatcccttgattaaatagaagaaagaagaaaccaggctaacttaaagttccatgcgtaccaacgaatggttgccccttacttcaataaataagtcagggaaaggaagttctttgtaggagacttagtgcttcgaagagtattcctctataccaaagatcctgtagtaggagtgtttgcacctaattgtgaaggaccgtaccaagtgacaaaaattacaagtacaggtaattacaaactcagccaatacaatgagaagatgcaattactcttaagagctatattaccatcactctttagtggtggcctttgcacggcatgtcatgcaggggtagcaaaatttatgttctaaaagcagaatttagatatgtaagattttattaccaaatatatgcacgttgcacagaaacaacacatttgtaagaccaatgaatgaataaaataagttttccttttcaaattgttttaaataacttgctaacaagttaactttataatgttaactttctttatagatcaacatgcgtgtgaaaatacccaggcaaaggtctatagtacttagttaattgtaagtgaccaagagaccataagttttctcgatcacttggggagcacccacaacgcaaaacatcaaacaagcacaaaaatacttaagaattttttttaaagatttttaagcaagaaatggaaggctaagtaagtggaaatagcaagattcaagatgaacataaaatgtacaggtctgggattaaaagttgcccagtaagctatgtgttcatagccaaaagaagataagccaggattgaagagtgccttgtcgttcactagctcaaatctaaaagaccttagggctatacaagaacaaaataaaaagtacattaccttgtgtcttaagcttgatgccctactctctaatttgggtatctttcttggcaagctcaatgtctttttcctcaatcttgctcctaaaggctactttagagtccttagcccttgcatggtattgacaagcttcgagaaagcctaaaatagtgaagaaaaaaattaataaggtttcatagtggatgaagtaaagaactaggaaagtattaaaagaacttacatatgcctcatctttcatgttgttggccgtcatattgtccaaggagtcaacatctagctcctggagctgctcatcaacacctaaaacacactttcccatgtatttttgggcaacatctttggccttgtcggccttgctagaagaggctacccggctatgccttttggcttctccttcccagtgcctagggaggaggagaaggtgttgcctcagatgaaggatctcgaatcaatggctggttgacttgaggtggacctgaaggtggtggacgtaaagtggcctgagtcacatctgaggcagccctggttttgacaaccttggggtatgacttgccaactgaggggctgccggatttcctcttcaaaaggtcttgcatcctagaggccatgtctacaaaggaaaagcgacaaggtcagtatacaatttataaacacaaagagcaagtaaaggtaagagaattactaccaccagtttcctca

SEQ ID NO: 18423 - DNA, 2859 bp, Cannabis sativa
agttacacgaaataaatttaagcctactacaactaaatcggttataacaaacttatccagctcagcaactaagcctactctcactaatagactatagaaaaggaaaagaagcttcagataagagaaaaccttatcagaatattttccaattagaaagagaacaagctcgaagtgaagaacctataaaagaaaaaacaaagagagttagagaggaaaagttgagagaaaactagtaaaacaaaacatagagagaaagagagagggagagagagagattgcattgctctgttgtagcttggatcctcacacttgattcttgtaaccttttgatgttgatagtccacgattaagcatctctgacgcgagcttgatggagatgtaaccctagattagggtgaactccaaaatcaaatctcttttgttctctattgtttttgtttgtttgtttgtttgtttatctctaactaaaccaaagatcaatttatatcttgcttgattgtggttttgtgtttctcagtagggttttgtaggatagttaaaggagtacggatttcaaagctcttgtttgagcttgagaggtgaagctcgggttcgagcttggagaacacgaaggaaacctaagggctagggtttcggaagtggatcaaaagtgttcttgatctttcagtattggttttatataattccaataagtggttatttttaattctttaatttgttttttcgcataattatgaaatgtcatatttgatcttgtttcttaataatttgtttagttagtgtaggtgcatattaaggtacttaaattcctacatgtatattataatgttagatattattatcccaaaatttgaacagtatatttgtagctttaggacccatgccaagtggtatgggatccacttaaaggatactcattgtcttatgagcataactagcgaacaatagcctagagcatgttccatcgagagattttcatggatgtagaaaatcccactcgctacagcttaaaaatagagaggctcctctaagaaggaagggtccaggaggacctaaccctttagttgcttctccaagagaggtggaccccacatgtcagcacactaaaagaaaaactattgtagcatgtcccttacgcaccaatgaaaaacaagtttcccataaagcgaaataaatattagagttttcccactaccttttcttatatacacctttgccatgagtctataggcggctcctaccgtcacctatcacatcactagtggaccagtctcgtccacgctcacttaccactggatttgggtttaagctttggacccaaaggaagggaaaatcttcattttagtatgcagaaatactctaaagtcaatcaaccattgtaaggggatctgagactttgatattgagcaaaatcgctaccaaaatctctaggcaatcaaccatcatagtaatatttaacataaatacaattaattcatggactaaggcttattaacacttaaactacgtaaaaaatactcatctaaagacctattaacacctatttagtatctttaatctaaatattaattatgctgaaaatctccgatcaacatatacaaatttgatttatactattgttgttaatggtttgatgccaccgccacagaaattattttttttataaattacacaagtttttaatataaaaaatctacaaagctattaacgaattgatttggtctgaatttttattttttaacatataaatgttttttagaaatgccaaattaaactaccaattaaatgctcaaaccaaactaatctacataagaattgattggtttagtttgaaaccatagtttttataattgtttttttcttgaaaatatagtaattgtttctttttaaaattttttacatttcaaaatttataatacataaataacaataacaacaacaataataataaactgtataaaattgttcacaaatatcaattttgcgtaaataaataaaaacacgttaagtttatataaaagaattaagtttatataaaagaattaggcagatcgatttggtttgaattactagcaagaaatttagggatggcaattatacccgcgagttcgggtacttgcccctaatgaggcggggacggggttgactttcgggagcaggggcagatattggtttaaatatttatactcgagtcggaaacggggcaggggcgggggaatagatacccgccccaataagatatatgtataaatttaagttttaaaatcataactactacaattaaaataacttcatgctttagattttttattgattatactccttattttttttactatacacactattccacttaattttattgttttactgagtttttatgattattttttttaattctctttgagacatattttttttcaaaaacacatatgtaatgggtatccgatgggaatacttccctgtcgggtaatccctgtcctgccccctctttaatttaaatgggtattggagcggatatgggatgaatttagaaagcgggtatgggggtgggggagcaatcctcgcgcccgtcccgccccgtttacatccctagcaagaattctaaaatcgtgaccaaacgagagaactataaatgaatcaaattgaccaaactatttcatcaaatcatttagtctaatctataatgatttagtctagattggttggagtttaaaattacaaattgtataaacaaccctgctgacacaagtacaatcactactagtaataacccaagaatgagtgaagtcagggccggccctgggcataggcgggctaggcccgcgcctagggcccactcattttaaggacccaaat

SEQ ID NO: 18424 - DNA, 3228 bp, Cannabis sativa
caagacaacctcagagaaatcctcgcccacagtcccccaatagtgcttgaagaacagaacagacatctcatccggtcctggggccttgttgttacccatagcaaagagagcactacggatttcttcattagtagggcttttcacaagatctgcctggtcatcaacaaatatcctatcctgaataagatagtcacagtttagatcctgaccattgaccgaactggagaaaattccttgaaagtagtcgatgaattctttcccaatcaagtcacgtctagaaatccagacattatctttgtttaagatactttcaatagcattccgtctccctctgatggctgccgagaggaagaagaatttcatgcatttatccccatcctttagccaattaaccttagccctttgcttccaacataactcctttcgttcccaagcttcattgacagcacgacggatttcacattcaaaaccccagtctctagaccctgcaagcctattctggattaaattgagtttaccttccaactctttgatcaaagtttcaattttaccaaattgggttcttttccagtgcaaaagagaaacccgtgttgccccgattttcttgaagactctggcaagagcccaagagtggataaccgatttccatgcgcaattaaccaccaacttgctcctatcatcccaagtccacccttcttcaaactcaaagctttctcttgaatttttcctccaagcctccggaaagtaggcagagaggtttatgatcagaattgcaagtctgagaagagcaaagaacagctctcgggaacagcttaagccacgcagcattaattaggcctttgtcaagagcggatttaacatggttagggccagtcctgtggttgtcccaggtaagcttattgccataaataggcatgttaaaaagtccactagaattcaccaaattagatatgaccaggataaaacaatctctacccttaatgccaactctttccgaatcgtgaagaacaaaattagtgtctcccagaatgagccaaggaccaccaaacctatccccaatcttcatgaggtcagtccaaaactttttcttagcattgcaataagagggaccatacacataggaaagcaaccaaggatgcgacggggggtccgaatagacaacaccagaaatatggtttcgggagtaagaaatacactcaaattcaaatccaatcttccaagccaaaatgattccccccgcattaccaacagctggcacaaggatattaaagtaaaaatggagggagtgaagtgtacgtaccagataagtggcgttaactttgagctcggtcagaaaaagtacattcggggagcgcgaccgaatcagggacttcaactcacgaactctagaggtctgccctaaccctctacaattccaagcaatccctctcatggctcctgtggaggagatataatattctcctccagaggggtatgagaaattttacatgatatatataatatatttatacggaaaatttgatgaaataagtgcttttgtggaagaaatatccttaagtgtcaaaacaagagcctgacgttcaggttgacacttgaggttagcctaatgttaacttgggccattgaatttttttttttttttgagaagtcttccatgcatatttatagttttcagcaaagattaagattcaactatttctggaacccaaatgaaacttctaggtgtcttaaaattggatccaacgcctaagttgacatattatcaacctaggtcctttataatcagtttcccaaaaaagagttccgggcattttttccgtcattaaaaataacgaagatacaagaaaattcaggggaaaaaaccacaaacctgaaggcttggaaactgagcccaatgcccaggttgacaatcaacctggtgtgctggtttcgatcactcaaatgttaattctgctctaataattctctcaagaatggtcaaaaatgggatggaagatctcgtcctcaagttctagaaccttggaagtatcaaaacaacatcctgaaaggtctgaaataagcacccaatgcctaggttgaaatatggcctagtgcgatgggttctgcttattcgattctatttttgtttcaaccatgaagtcagattagtcaaattcactacttatcttttcacatttccgacaaggtgatttactcagaaattgagtagtttcgagtatctcgtttctgtagaacaacaacatttccgagaacgggtgactagctttgctagaacacataaatggactaagtgatgttaaaatatcacttaggcatcaaacaatataatgccatagtggcaatggattattacacgaagtggacaaaggccgaaccaatgaagaccataaccgccaagaaagccttggattttgtcataaagaacatcgtatgtcgatacgggcttcctcacaaaatagtctcaaacaatggaaagcagttcgactgtgataaattcgtggacttctgtgactgacatggagtcatcaaaagtttttctgcggttgtgaggccacaaacaaatggtcaggcggaagctgtcaataagagacttaaggtcaccctaaagaaaagactcttggcctgcaataataattgtcttgaggaactgccacacgtgttatgggcctatcggaccactgcaagaaccacaaccagacactccccattctcaatggtatacggatgcgaagcaatgatcccagtagaggctataatctcgtcccacagaagagccacttatgatccagcaaagaaccaagccttgtcgtaagaggcgctggatctagtagacgagctttgggaggaatctcaaatacacatggcagcataccaaaggaaagtagcaaagtacttcaactccaaagtcaaaaacaggaaattcaccattagtgaccttgtcctaagaagggtcttctcagcctcccaagaaccaagagtgggggtacttgggccaaattaggaagccccatacgaaaattgaagatgaaataggctccaggacctataaactaaaaagaattgatggattcatagtaactagagcctggaatactgaccatctccgcaaatactatcaatagctaggagtcaatatttaaattcatctttattctataagattacctgtgccgaacaaatatatgcatgatctcacataaattcaagctaagtgacccaaaaagtcct

SEQ ID NO: 18425 - DNA, 7797 bp, Cannabis sativa
agagagagagagagagaagaaatttcaagaacaatggggtttcacacattttctttcattctttcttttattaattaattctgttttagataatcaacttcccaaatggccagttgtccacacacccttcagccacttaattaaaagtctaaaattccaattttaccctttaacccaaacataccacactaaatgacttagggacaaaatggtcaaaagccataattccgctcaaacttggtattctatttatctcaaatatttatcccactaagaaattaattttagacatacccatgtgactctagcggccatccatcgcattttttgtcgtcgccaatcaaaaatcataaaaattacataatgcatatttaacttaaataatactactagagtttaataaaatctccgaaatcaagaaattataactctagtgcccatttctaataataggacccacaacataataaaatcataaataattataaaaaaatgttaacaattaatgttgattgtctttcctaatccatattttaacacgcggtcactacaattatcccaccgttaaaaggatttcagggagaacctgactagctttggatattgagtcctcatgccagactctaattcccaggtggcttcccccaccttgttattcttccagagcactttggccaaagctatggtcttgtttcgaagaatcttttctttcttattgaagatctgaactggttgttcctcataggacaagtctgactgcagttctagggcctcataactcaagacataaatctgaaactattccctcaatattgaaatatgaaatacattatgaacagtttatatcgctagtggtaaggctagccgatacgctacctacccgaccttttggagtatctcaaatggcccaaagaacctagggcttaacttgttcctctatccaaagcgcctaatacttttccgcctgctttgcaaagcaagcatcagagccttgatcttatttataactttattggttctttctgactgcccatcagtctgagggtggaaagttgtaatgaatttcagttccgtacccatagctctctgaagacttatctagaattttgacgtaaattttagatccctattgaaataatggatttaggagctccaaagagacgaactatctccttcacatataactctgcatactgatccactgtataggtagtctttactggcagagaatgatctgacttcgtgaaacaacccactatgacccatactgaatcatacattcccgtggttcataaggcctttcaaaatacttgagaagtttgggcaagtggcatatcggttagccttgccactagtattatcagctgtgcataatgtattctatatttcaatgttgaggatatatgtatcagacccgactcatatcctgagttataaagccctggaattacagtaagatctatcttatgaagaacagtcagtacaaatcctggatagaaaagaaaaagttcttcaaaacaaaaccatagtgttggtcaaagtgctctaaaagaatagtaaggtggaagaagccacctaggagttggagtccaacatgaggactcaatatctagagttatttaggttagattttgagggtccttataatggggggataattgtaatgaccgcatgatttaaatatagattagtgaggctataaacattaattactattattattgatcattatatgtgaatatttatgttaaatgcaaaatatgttatttttgtgattctagctcggtggcgataaaaaatacaacgaagggttatttaagtcacatgggtgagcgggaaaccttttattatagagagttatagtatgttaggtttgaattttgagtttagtcggggttatggtatcagaccattttaccccaagccattcatttatttatgcatttaaagcaagagcgatttggtcattttaattagtgaggatgagtgtctttttctacttatggcagctagaccctttccttttaataaataataataatatgacataattacaaaagatgaaaaattgaagaaaagtttagaatcaccttcttcccttcttctttttcattcgaccctatgcaaaccttaaggaaaaccagctgcaatcatcaaagtttttggagctttagctagggtttgaagtgatacaagtagaggtatgccctagaaactctactctttgtattgtggttgaattgttaggtttaggattataatttggagattttgttactattagttaaatttcgattagggatgttttcaatagatataaattgatggtttaggttggattgagctgtggttggattgatggcttggattttattttgagataatattataggtattctgaagagtttggtttagtttaggggaagattttgttgatatttggttaatcgtttccctagggagggcccggggaaccggttcactggttggggaatctggtttgccggtttgggcagaaccagaatccaaattttcatattttctcagaaattagagcgttagtatgctgttattcaacagggttacctcatattttaattttaggttcatgagaaggtttatccgagttattttcctgtttatgtaaatgtgacataaaacctccattcagctcgtaaattttccattccagttggctggcacacttaaatctagaaataaggtaagatgatcataaagtatgtatatgtatgtgtgtatgtatatgaatgcatgctaattatattattttacactaccaacaccggaatagttgtgatacatattgcattaatacagtgtataataaatatttaagggtatgttaaggtgttaccaacactagtacaagtgagtacatagtgcatgtggtacaacacccggtagtacctgggagtacagtttagtcctaccaacactagtacgagagatgtacttcaatgcatgtggtatagaggtattaagaatgttcttgattatttgttgagccttgtaagtaggcacaagagggcctaagtacaagtcgatattacattgtatattttatgcatatcttactgagtctgttgactcaccaatgtgctaccatgtgtaggtaaaggaaaagctaaggcagaggaacaatgagtttaaagcttgataatgattgtgtatgtcgtggcagtacaacctggagggtttcagtcttaaagtattttgggtttaacttttgcagtcaccatgtgacatattataaaaatatgttatgttatcagaattgattttgaatttgggatctcggcttgtaaaactatatacgtatatatatatatatatgtttatatttgatttgtatgattaaagtttaaatccaagtggtttcgaagatgggtgttacatatcccctctagccatgatgcatgattaaaactctcccagaggaaaatgaaaaggcatcctatagcaagtcccaacttataacaatgcaagttagggtttgggggtaaatattttcaccaatttttaccaatgtatgtggcctactagaacaaagccgcgtggcttgtgcgaccccgattaatgggaagggagaaattatcattggaccataattaggcatcactctgggagaagtaaaagcatctgggaaggtgacatgggccttgagaacctggaaagactaaaataatagtacaagcctccgaaagggacaaggccttcgggagcccacaaggtttatgcttgtactccattcacaacaaaactttcaacaaaaaatattgttgctaactccctttgtacaaccgacaaaacgagtttatattaaaaatgagatatattttaaaatattcactgcatttttctaacatgcatcctcccaagacgcttggcaaagacatgtttctctgtagtaccatcagtcgcagataggtccaatcttgtctcaccaaaagcctacttttgacctactcaacaaacccaatgtaaagaaacatttctctgtatagaaaaattgccatataggctacaactgatggggaaaatgtattgagactgtgttgtactctctaatagtgcctgttaataatgggtcgaaccattgaaaaaaggatggaaaatattaaagggaaaatagctttaaaacaatccttgcaaaaaaaaaaaaaaattggtaagaacttgattaaaaatattaatacaagtgactggtggactaaatctcgttaatgttccaaccacgttaaaatccatctctaaaaattattttgtagctaataagtaactaaaatttagtatttgtcaaaaatctcgatcaacaatatatttattaaaatgttatatataattttataaagaaaatatgtttattgtttgttttgtatatatgtttaatatttatttatataacacttaaaaataattattatcttctatagattgtataaaaaagtataattatattaatgtatttaataaaatctataatcaaatgtaaataaattattttgtattatatatttaataaaattatataatgaatataaaattataaatatttctaaagttagtcactattatgtttggagcataagtgataacttaattttaatacgatccatgaatgtatgttgtattgtaatatttttgggcctaagagtctattatttaatggaaaattctacaattcatccctaaaaggaatacactgatgcacgtttacttgtctcgacatccgagagaattttttagttcaatttttttcatgatcatgtatattatagttatttataatatcatgcgaaattttgagaaattaaaaaaaaaataacacatcaaaaatagggttcaaagaggttgttgcacatgtcactctttaattttatatgtgtgtgaaatagactgtttgaacacttctttctatattataaattaatctgaatttctcaaaattttatagtatatcttaaataactataacatacacgtctatcaaataaaattagactaaaactaattttaggaaggtgcatcccagaagcgccattgtctattacactatcataaactcctctctctacaatcacctcctcagtcttcaccactgcttcatctttctcctttaggcatcataggtatcaccattctctccctctggttcttgatcctagattttagttgttttcttcgatttttcgttcttaataatattgatttggattttgtattatgaataattttggataaagagtatttggattgggtcagggtttcaacttaggctgtgattaatttggttttttcactatgtttatgcttagtgaatttataggtttagacttttgtggtagtacctttttctttctttatttctttttgttatctcaaattttgtccacctgacgtggcatgtccacatagtcaagactgagaacacgtggaatacagctcgtcaacaacaaaaaaaagttaccttacacgacatgtcaaatgtcaatggttctgaagcaatcaagaaaaattatcaagcaataagcaagaggagttaagtaggccaccaaggcataaatcaaccatgtctggccgaccaaaggaagtgagcataagctagccgaccaaagagtgcctgtcagttcaaaaagggcttgtttgaccaaggaagcctgacctttgcaaggaaaattatacaaagaagctagaaagctgacaggcacataccaaggttggcagtcacatggaaaagctggcaagcacatgaaaaagctggcaagcacaaagaaaagctggcaggcacatggaaaagctggtaagcacatggcaggcacatcctggggctgcgggagtaatacctggccggccttaggagtgcatagattggccagctcctagaaaatagggttggccagccaatttctacatacaactctgaccatttgagcaaagttgcgagacaggcccaacaacccacgaaaaaggggattttccttcaagatattagtcatgtttcctaaggatttagttatccttttttgtaacttaaacaacagataaaaagatataaatattcttattttaaaggaatatctttatctacttaaattatatcttttgtcaaccctacactatataaaggacattaggtctctctcattcccaaagtcattccaagtcaccccacttgcataaaaaggcttaagccacacgtgaaagtctctctctctctagtatcatacttcatccatgccacctagacactaagtcatatcttcctatgtccttcataaaaactcatcagttcttaattttcaacacattgttaaacattcaaagagagccatagttagaaattacaaggtaaaaacgtgtaatttgcatgatattgtctctaaaatcaatacaactaaaaggggagtaggtcattacctgctaaacaagggggtcgaacctccataaatctttgtgtctcctttactatttactgttcttatttacacgtggtgattggtaatcataaataaggctccgctgttagttgactaaattctaaatcaacacttttgaatttgggaagttttgactatcattatctagttttagtaggcaaacccatgttttcgtgttatcatctttcattttccccctccaagtaatgttttattttgaaaattttgtttaattcatacaagtacttataatttcaagtgcattttaattttagtgaatgtgttgtcaatgaataatgtaatttactgagcgtgtttctggttgagctttccttaagttttgaaggttaagagaatgctctcacctgaggcttagatggagctaattagatagcatttgattttgtaggctttcttttttattggctatggtctttggaatgaggtttttgaggttgattttttgctcagttgagagtttcactaaaaggcttttattatgttttggttgaacaatagatgaatgaatgatttaactcttaggggaaaaaggcaaatcaatgggatttgttctgttgagtgtgatattattaggttaatagtactgatttcttgttaatattatcatgcacccatgctctttttctattgtagagttattaaaaatcagtagaatgtctaaaaaaattagtagaatgtttatcaaaaataaaataaaatagtagaatatttaatttgattttcctagcttatgttgcataatagtctcagtagtggaagtatatgtaacattttaggtgtatgtgtatgcttcttgttaaaaaaaagtaaaggagagatctcttttataatgttatttttgctattgctttaatgaattgcttatcacacaaattatgcacgcatgagtaatttgagacaaaacatacatattttttttatatagatttcaatcataaattttatatgacaaaagataatttaaataataaagagtgtaaaagaattatttctctacaagttttaaaatgagaatatttacctaaattttagatcttttactaattactataatttctctttgttaaatggtcaaagtcttggaaggagaaaaaaatatcacaagttttagagaattttttaaatacttatctataataactacttattataaaaagatcaacaaattgagtagcacatcatgctgctagacattctcgattttatcctcgttgtaatgtttctgagttttccattacttataaattccaacattttttgcactgagaatgcttgtttaatttattgaagttgagatatttcatttaaaaaaaaaaaa

SEQ ID NO: 18426 - DNA, 4831 bp, Cannabis sativa
aatatggatttaaaacgatgaatttgtttattgtgttgatttggatgtgttcatgttggtttatgtgttgtttgatgaatgtatgcgatttacgaaattttttcgtaaaagtaattttattttcgttttgaaaatttatttggattccttgtgaaaaattaagcaattttagattttacggaactcgattccgataaaaattaaaaaagatatggagttttgagataaaagatcgagaacatgaaaagaaggttaagggcgatattgtacataatcattagggtctcaaacagaaatacacgtcttggtaatattccttagggaacattgctgaaatccatgaggctgacagccattcagaacttcctagttgtttagttttttatgcatggcaaagtctttaagttgagtttagtataatatagactatatgctgccccatacagagcagacaaccctgatcaacaaaaacctaaaaaaaaactcaaaaatagggtatgttagctaaaacccataaatccaaaacctacctaaataagtaaaaatgaccaagttttgagaatgaaatacttacttatgatgttggagggtatgggtggtggcatctgggtcgccgatgaggttcttactcaaaatgcacgaagcttctttacaattttatcataatctttttgaaaattcaacaacagaagcttttaacaatgacaaactgatcgacgtctggatataacctctatcgaaggagtaaaagacagttgaatagctcaaagccgagatcaaacattcaccagaaagttcctgggttcaagggatttctatctctctcttggaattttttttttgaagaaaatggctaaaagaggtttgtctgctgagtatttataaacaaagtgaagatttgacttccatccaacggtttgggaatgacaaaggttgcttttaatgctatttgcataatcgaagggcatctatttatgttgatatttgccttggataatgcactgacatgattagtcgtcagtatgacacccaagatgacacatgccccaatagactgtgtgaacctgaagtacgatcttgaacctgaacatgagcaacaagctttcgtgattcttgagccccgaaggcttgaggggtaaatgttatttatgtttttgaatagattaaagcatgtattgcaaatgttgaataaaaaaacaaggtccactcattgggtccacgcagatgaattgcacagcccacttatcaagaatgggcagaaccataccaaacattcagttctatcaagatcactggtcaaaaatgaacccttacacctgaatcccagatcaacaatcaacactcgacaagaggacgggtgtagactaaaaggggatgccctcagggatcatctgggaatagaatgcgaaaaggtatccataaccgatcatagtcccaaaagccagcccacatggcatgattttgacgtaatctcaaaaaatcagacgacttctcccctatgtcaaaccatagaaaggctcacaaaaaaaggacattacctttttagcggacacccactattctattattttctcattccccatgatggcacacacatacctatcactgtcagtagtacctttgcatatggacgacaactatctccattttgagcctcatcaacctagcccgatagctaatattgtattgaccttatcagtgggctcttgcgctaaacaaaaccttaatgggtttgggtctgggtctgcctgacccatcaacaatttacctataaatatgttattaacctttcatacaaagggttggcaaaaaattgagggttcaagaacaggaaatacagtgtaaactccatagccaaagagtttaataacagtaactcgtggactaataaggctcattaatacttcaaccacgcaaaaatcttgccttattttttttttagctcatttacttatttttgtttttttattgacacaatgtgtagtagtagatattgacatattaattatatattatccattatattatataccacattttaaaatcctaagatttctttaaaaaaaaaaaatcctaagattttattatttctattattaatgtaattatttatttaatttctaagaaataaattatcatttgaactgtcactaactcaaaaaggaagagagaaaaaaaaattaaaattatgaagttgttcaataaattccatgaaaaaaatattgtaatagtacagaaagataaactaagtaaaagaaagaatttcgtaatataaaaacatgttgatgaattgatattattttgcatattgtaattaggtcaatattttgttatttttctgttgttttgtacttatctttgtgttgttttatagttatttttattttgtttgttaagttattctagagttattttttagctgtctgatttgtttttaatttttttttttttttttttgtattttactgtaagacattatttctgtaatttttaaattttaatacaatatttttaaaaacttgatatagtaaaaaaattaaaaaaaaaatataataaaaataaaataataacaaaaaaaatatttttgtaaaattcccttaattataatttttttgtaaggcccttaattataattataattataattacataaaaaaaaactttaacacagtcttaattgttttattttcataaaaataagaaatagaaccttctttaaattctacttttgccttccccacaataattcgagcccccctccaattattatcaccaactattttatttatttatttatttattttcattcaactttatgagcaataaaaacaaaatggcatgtcccattttgttgtacattatttattacttcttactcttatgttttttttttatttgaaaaaaaaaaagttgttgctattccatagttaacctctccaaaactttgatctatttggaaccaattataagatgaggattgtgattaaataattaaaaatctcttaatagaattaggattttgctaaactaataaaatcccttaaaatatgaaggtacatatctaacaaagagcataaaaaataccaaaaaaaaataagaatagtttttttgtcataaaaaagaaaaagagtaatctcaaattgtgtcaaagttctataggtctattttttattgaatgaaatgaccaaaataccctgaagacatattcaatcctctctcacaaagtgtagctaggtagcccaatcacaggctgtctatttcaactcctggtatttggttggggttaagcatctatctactgcgcccacaagcaccataccaaccaatcacaactcaacacttttgacctttccctttcattctcacccttcttctgtttcttgctcctgttccattgatatagagtgaaagatccctgtcttgcaagtacaaaggccccgggctcacatttttctttatcactataatactttacttcttctcactctctctttctctctcgaaaaaaaaaagttcatttcccactaaaaagcttccatgtacttccaaagcttcaagctttaacaactctgcaaaacacagataaaaaccctcctctctctgtttctcttcttttgtaagtttttctttaatgggtgtttgaaattttcagtgaatctttcttgctttcccagctctccgtttctcaaaacttgatctgggtgtctgtgattttcccctaattataagtatttttgtgtgtgtggagatctgatattgaggtctagggtttatcttttttcaccaattaaggatcttgaattctccttgggttttggaaagttggtgtctttttcttttattggattccttccacttatatgcttctttgaaaaagggtttttgggattccattccaataaattcaaatgcttcttccataagcaataccttcattactctgcatttcctatctgggttttctctctctctttgaaaagaaaaaaactttcagagagagagactacagagtcattgctatgcttgttttcataatccatagcatgattcattagagctcacatattcaattcaactgtatattagaaataataacaccatgtacagaggaattgaattactctctccagccacttacctccaaaactcaaattggttgtttcaagagagcaaagcagccaaatggactccagaagagaacaaacgctttgaaaatgctctagcagtttatgacaaggacacaccagatcgttgggtgaaagttgctgaaatgattcctgggaaaactgttggggatgtgatgaaacagtacagagaattggaagaagatgtgagtgatattgaggctggtttgattcccattccgggctattccaccaccacaaactccttcaccttggagtgggttaacaaccagggctttgaagggttgaagcaattttacagtgttggtggaaagagaggagccaacactagaccatctgatcaagaaaggaagaaaggtgtaccttggactgaagaagaacacaggtatatatgtttatatattatattgaatagtacccattaaagctttggctagagtttgatttgttgggaggaaaggtagccttgaatcaagttctgtttgatagatctataagattattatatgtgagatgaacagttgatatatgaatttaaaacaaattgttcactattcatgtcttttaacttgaatatttgttggaatatgaatgaaattaaacaacaatagtttatatcccttttggggtttttagtaattgtttttgtttctttatagagtgttgtggagtctcatttttttttt

SEQ ID NO: 18427 - DNA, 4945 bp, Cannabis sativa
cgcatagatttgtctatgcattccctacaaaagcgatgtaggcattccatcactgttcttgttttccgaataatccctacacataaaaaaaatgcagtaatgtcattcatttagataaatgataaagctcaaaatgggttcaacatgaacctacagggtcctcttcatgtaacaattataagatttaaaacattgaaaataaaagataactaataaaattataagactttaaaatgcttatacgagtgtcacactacctgtcaattaaacttcaaatcgaatgaagtgatatactattccttacagaattacctgtagcattttggatggactgggcactaaaaacagagccccaacaaatacatatggaatgggaagaaaattcaagaagtagtttataactgttacagtacacctaaaattaagtactaaagaaatctataaagatagctaagaacaggattttgaacttcacggtttctattgaactactttcttcatcaatatacataacaaacaatgaacccttagttccaactagggttagaaccccatgactcattactcgaacccactcacccaaccacatgaacaacctaaccgtgcatcttcatatgtaaaggtaaagcaaggaggcaaaccttcacttaagcatgaagatggcatgttttggagacaaaacttactatttttagatcaatattctattcaatggtaccggtcttgattacaacaaaaacttcagccaaggaggttcagcagttcattcagaacttattagtgataaacacagtatatatcgccagcatatatctgaccgaggatgccactgaggagctaatataaataagttatgctccaccatttatgtacaagatggcacaatttcaaaagcaaatttaaatataacaacaactcctgaatatttaacgacaccatatatctaatataatgaagcagaaagatggtgttggacatgacactccaactgataaacagtcaaagtgcattacacatgtgtaccatatccactaaaacgaataatgatgtctagactcaaagggtacgttaaaccatttacacactcctataacacgataattctatatttacagtatattgaattccagaaaaggacaagccataatgcgtacttgaactttaatatgtttatgttaatataggtttgtttacagtttcatacctaaacagataggacattgaacctctttccggatttctgccaattttacaatgataaatctgcacataacccaagaacattagcatagagcagatattgagatacccaaatttatattataagaaactgaatggcattacgagcggatacagtaaccggttaatatatttcattgtacagacatataacaaacatattacacacacatatacatacatacattaagtatctgggtagcatataaattatgtaaaatgaacggtccacttacggttgacacttatttacacaaatcaatttagagaggaaaattcagtttaatttggacgattccaatgcaccaaacttcatcgatgaataacaaacacacaaaggaactctttcaagttcaacactcagatgagctaatatgcttgaagacgcagtttaaaccacgaactgaaggatatcttatcagaaactccatgcaagcatcatcaaagtactatgtatttacaggagctactaacagatcagaaaagcatcgacatgcttgagatattcatgcataacaaaacaaattagaccccgaatcaccataaaccaaaagatcgaaaacccatcacttcaaaatttcgaattattacgagcacaagaaaacggcaaagaaagatgaggaaagacaagtcaacaaaagccaataaaacacactcgaataccctataaatccacaaagctcgcccctaaactgcttgcgtattacactaaataaaaacttgcacgaaccaaaagatacggatcgcgaatcaacacccagcattggaaactatcaaaacacttgcagaaacaggaaagaaactgtttgaaattaagagagaaggagaagaagatgaagatgtccaagaaaaaaaaaagagagaacaataataagaaaaagaaaaggcaagctcactcgtctttgtcaccgctgctcgacgaaggacttcgatcggattctgagaaagaagaaggaacccatgagaactccatgaacaaccatacaagaatcagaaaaagtaaacaaagcaaaataaggagcatgaagaagaacactctgtcagagtaggacgaaatttggcgttggtatttgggtattgaccgaaataagacgtaccctcttcgtctccgggttgttcatggctgtcttcttggttgctctccataggatcatcttccgatgcatcgtgggaccgtttctgcgccggcattgctttcgttttaagtaaaaattcttagcgaggatcgaactcgatcgaacagccggcgagcttacacagcttcctaacaaatagttcctacggagttagctccgccccttaaggcggtgatcttctagaaaagaaaaaggaaaagggtcgaaggtggcgggcgagcgtggctgaccagcgcgagcgagggagcaagagagagagagagaggcggaggggtagaggttgagtttgagagagcctcgtctcgtggtcttaccgaatttctaattttcttttctttgattttttcttatttaaaatgaaaaagaaaagaaaagaaaaagttcacgcgaggttattcgtcgacacgtgtagcaattagggagttattcgtaatttcatcagttaagatatgtagttgtttgataatttgttaactaaaaacaggtgaatgaatgatttacttcctcgttttataacttcgttattacaatttgattttgactccagcttagttttttcaactcaaacacaatagaaataattcaaccattcgttattatattcgctccttccaagcattttcgtctttttagcacttgtatttttgtgaggatattttagctatataataataatttaaggagaagagttcctagcggtactgaaccagtatgattttagatcatcttcatctaattatgatactcgatgcagtagtatatattctgttgagtatttaaactaaattttaggcaacttgcttacatgacagtacggttgacagattaatatctgaatcggaggaacgagtgccgtttgtatggccagagtcatcactttgtaaaatcaatcaatatatataaagctcgttcttcacaaaagtcatgtaatgtatgtccattattccataacgagtgacaaacaacagctccacttgtgttgtagttaaaatcttttattagtgtttgataaattagtgttttgaataagaaatgatatatcagagtgctattatagtaaataatatttaactaaaatacggttaaatataaaagatccaaataaatgtaatacttattttgttttagtttatgaaaataaattacacacgtactaaaaaaaaaattgtatagataaaaattaaaatattaaagtataagacaccaataaaatgattatggagaaaaatgttatataatatgtaagagataaaaataatcctcaaggtaaataagtaattttaagaaattaataaaaataagaaaaaaagagcggatgttataacatttcagaccataaagagaaaagtattatttcactgaagaaaaaaaacagagctacaaactcaaaaacggaagagcagaactctaaataaaaagagatgtggagcagagctcaaataagaagagaaagacacaattaatagattcagatgatgagaagaggaggtgtgatgagcagcttatgacaattagcgcacgtggataaattagaatagaaaagaagaatgaagtaggcattcttgtccgctgataaatagaatatccacttactcaaaaagcagacagattcctaatcacgctagacttgctgaaactctatcggaatacacccttaaatccatactttagctctgaatgcaagtgaccgagactcgattaagagaattaagaggaaagttgtgtaaaacgattgagaatataattcgactagatcaaacctaatgtaaagaattcaaagtcttaataaaaaattattgttgagccaatttttgacatcaacagctggcgtcgtctgcgggaacctcttgaactaaaagctggagctaaggatatgaactaagatgaggacgaaaaaggtaagaaagcaatagtttcgagtgaaggagatacattgaatccaatcattgatctgactactgtgttagcattggaattgagaaaagtgaataagagaatgattgcaagagacaagcacaatgaagagatgtgacgtctcccagaggaaagattccagtaggaacaatgtacaggtgaagcaaaacttcaacaagtttaagacgaaaacagacagcatcaagaggatgttcatcgcacaatgaaaaaattcatggctgaaatggccgacatgcgaggtacaatggatagaactcaaattcattatgagcctaggaaaacgattgggtcagatcctcaacagacgactgatcaaatgcaacctattatgataccttagaactctgaaagggagatgagaaatctgttggaagtaattttatcaggatctaaatttactaacaagtatgttgattatattctgtaatctaacaccctaaacatgaatttcctaaaataataaattaaacacgtataaagctgtagaaaaccttacattggtggcaacgaaataatatggttcattccgctcagatctctaactcttgttcctttctatcgcagagtaataacaagatttgagtctggatctcctttgggtgttagaattcttcacaatcttccacactatgatt

SEQ ID NO: 18428 - DNA, 2983 bp, Cannabis sativa
aaaaaaaaagaattaataaataaatccagttcacctgtgttcagataaaagttatctgttttgttttggtaatcacagaagttcattctggaatttttaataatatataaaagtatgttttgtttaaactcaagaatattgtatgatataaactcgtaaatgtatttctttacaaacatgtagttgtttccattaagatgcatctgttctcttaaaatgtttgtactatctgtagtgaaaagaaaaatttaattacccatttatttttctatatgttaatatattgtttacttgtggattgtgaattgtgggaatatttgtggatttgtgaattgtgactaggtacataagaagaggcaagcctgacgccggatttgctctttttgagtctgaatctttgaagtggcctggctttgtagagtttgatgatgttaatgggaaggtgctaacttactctgcacaagataggtatctttacagaatgatttgtgcttcgcactttgtcattgccaattgcattcaaattcttacaagcttacgttttctttctttttcagcatatataaggtgtttgaccttaaaaactacactatgctatactctatatcagataaacacgtgcaagaaatcaaaattaggtaattttcttctctctaaagattaaactgtcttacttacttgttttgttctgattatgtgctctgccattattcattttctgtatctgtattgtatgggatgtgttcataacatgaatgttctggttgttggagtgacctgttaatctttttatatgtggtctcagtctaaccgtacactttggagctaaccatatgcgatgaccttgttgttgtagtaatctaaacaagtttacattacaattttagcttctcattgtatttgaattggtttgagttatttttgcttttcttttcttaaattgctaaataacctgaaaagactactttcctggttgccttgtccgattggaatgttgaaataaatttgctttattagctctacgagtttgatctgtgctgatttgtttattctgatgtacctgcactgataaatttgggtacaagatataccttttaaaaataattatgttcaccatgttttccaaacgaagaaatatctcacagtgaaacttacaaacagaataatgtattttactttagatatcacgagtgttcttgcgtcttgatgtttcttcgtttgttacagtccaggtatcatgctattgatcttcaatagagctaccagccatgttccccttaaaattctttcaattgaagatggcacagttctcaaatccttcaaccatctacttcatcgaaataaaaaggtagagttcatagaacagttcaatgagaaacttctcgtcaagcaagaaagtgagaatcttcagatccttgatgtaagtagtcattttttacctttttcctggcaattctctttagatttcttatcttattacatataagcatacttaaattaaaaattatataatgcctgtaggttcgcaatactgagttaatggaagttagcaaaactgagttcatgactccttcagcatttatttttttgtatgagaatcagttgtttctgacatttagaaatcgaactgtgtctgtttggaacttccgtggggagcgtgtaacttcattcgaggatcatatgttgtggcaccctgattgcaatacaaacaacatatatattacttgtgatcaggatcttataatatcctactgtaaggcttcatccgatgatcattgggcagaaggaaatggtatatttctctcaactgtattgttagctatagggaaaatactgatactagtctactagatatcttcttactctatataatattatgtactgaagattgattttctatgttatgaagctggatccattaatatcagcaatatcctgactggaaaatgcttggctaaaataaactctactaatcatcctctcgaagctgacgactgtggttgcagttctaactgctcaaagcagaaatactctccggtaagaagcacagttagtgaggccttggaagacataactgctcttttctatgatgaagaacgcaacgaaatatacacgggcaataggcatggtctcgttcatgtgtggtctaactaaagatccttttatgtttggatgcttttgagtctattctagtaggggcctcgttagagagaatgttctttcgttgatttttttttttttattattatttatttaatttgttaatgttgcattctttggcacaaaggccttctgagattgagacgtaatcctaggataatgatttgggggttcgcttacataatttgtacatgttttgctatatagtatatacagaatgtctacgttggtagtgtccaatgtgtataaaggaatcatttaattatagggataaaatggtagggttgtttgccagcataatagcttacagttcatcgaatatatcattttcatacctaatttgtttattttaaatagaaaatattgaaactcggccgtatatgagagaaaccgataaaaataaagagaaaaagaattgctttttatttctcagaattgaaattaaagagaatggtacagagccaagtgcttttatagcactaatattcaagaaccaagttggaaaaacaactaacagattagttggttaattaacagaataccaacttgtttaacagacttgtcagactaaataaaagtttttttttttttttaatcaatcaatcatgtatttcattacaccaaaacttaattacaaactattggtcccttcagagggagacccgagatttacctatacaatacaatataattacaactcttctttccttgtgtgttatatatatacattcacaactgcaacaatattaaaaaaaacaatcagctacagcacctataaaccagtcggcaagcaccaggcagcagcaacaacaatcagctgcta

SEQ ID NO: 18429 - DNA, 4406 bp, Cannabis sativa
  modified_base (73)..(83): a, c, t, g, unknown or other
agtcaagtactcaatcatagtgtgaaagactttggttaaccaaactggaggagagaagatccaggttcagatnnnnnnnnnnntctgctacagaaaggaatcaagagttatagatctgaatggaaggagtcattattattttgatgccatcaatttaaggttttctaaactttatatgtgtttatttcatcgtattagaaaatttatatttagagtgttagattatagaattataatcaacatacatgtaaataaatctagatcctggtaaaataacattcaacaactggcctcagagccatggtaataatttactttcataaaatatggatttaaaacgatgattttcttgatttggatgtgttcgtgttggtttatatgtaaattgatgattgattgtgaattacgaaattttctataaaaataattttattttcattctggaaatagtttatttggattccttgtaaaaaaattacgcagtaagtctttaattttggctaaaatatgtaggtgtgaaagaaccttggcaagtgtgtgagggacaggatggccaagtttagagtgccaaatattgatattgcttgaattttgtaaatgaaataactcaacaggttgtgaagcatttaaagtagacagaacatgcatatttttattaatagcaactgtaatacaatgatttgagtctgcaataacagactgcttattacaaacaagcaaacaagaaactgaattattagtactaggtgctgtggtaactagttgaaacatttaaagaggaaaagatgtgtgagagagagcaagtataggccatttttctcccttcctttaagcggcactttccctgtaattttttccttgacaaaacaacaagtagagtaaaattcaagatacactttgttatctttggttagtttagacacactaacaaggtttttagtaataacatgaacttttaaaatagatctaagttgtaaggattgagaagaaggggaagaaggtaaggaagtgttatcaatgcgggtgataggaagcttcttaccatcgcctacagccaaagatttagacccaaagtagggaaattcagtatcaagatgctccattccttgagcaacatgatttgtagctcctgtatcagcatacaagtcctgatcactatcaaattcaggcaaggtagtggaagaatgggcctgtggagtatctttgtcttcaatctcagttaggaaggctttggactcacccgtttttggagtgacaaagtctttgtcaaaccgataatggaaaactgctgtagtgtgacccagtttgtgacaaacttggcaaagaagatgagggatattgtatccagttctgcctctgccagagaatgtgtgaggtggtctggtggaggagtgaccatgattagtgaagccatttgagcgatttgtgctaggattagggattcttgaattgctaacagaaagattagcagccatctttgaagaaagatcgccaatattgtaatgtcgttcaagacgactttcatgagtgagtaacagggacagaatggcttcaaacaatagattgtcaacaagacttgtaacatgaacaacaactgggtcaaattcaaggcacaatccatcaagtagatgcattataagatcactttcgtctaaaggatgactaacagttgataaagaatcaaccaagacttttatcttatcaaagtaatcgaaaatagagagattacccttggtgattgtggataactgagatttgatttgaagaaggcaagcctccaattgacttgaatacctctattcaagagccttccaaactgtaaaggaggagtgatgttgggctaaagatccaagaattgtctcagacatagacgagcgaagtcagctgaggaggagtcgatccttacgtcgccagatcatgaattcaggattaacagctccattaatcaagtattccaccggagccacgctagtgaagagaatatcatcgaggccatgtccaatgacagtggggatgacttgagatttccatgtaagatagttcgtgcgatccaacttgacagtgagagatgaattgagggaattttgaaatggattccatggttgaggctgcgggacatggagtaggggcggcggtcagagcagcagtgggatgatcaagaatgccaagatccatgatagacgaagactccaaaggcaatttgataccatataagagtttatcaatacaaaacttaagagagcaaagaatgaagaagaaaacagagcatcaaaatcttgcaaaagctatagagctttgagcagaaggcctttatttatagacacaagatacaagaaaagagttgttacaacaaccctgtaactaactcaacgactaataagggcaaaaatggaaaaatataaaaaaaggaaataacagaaatattattctgtatcaaaatagaacaaaacatcataaaaataaatactaaatataaccaagtgttataaattaaaaaaaaaaaaaacaaataactactaaaactacatattttttttaatatttttattataaaaataaatattaaaatgttttttaatatataaatgtaattgaattgaattgatttttaattggattttgatatttactaataactgattcaattcaattaaaatctaacttttacatgcaatccaatacaataaaatttaatttttaccatcaaatttaatctaattataattaaataacaaaatttttataattaaattgaataaaatcagttctatttaattgtattagattaaatgttgccatacttaacccaaaaaaaaaaaataagctagctcctaaaagggagagcataatccagtacaagccttttagtttggggcattaaactcattttctagccaaaatcttatacaatatggtgaattgactgggagcgcattaaaagagagataagaaaagtcagagtttgtttatgtggaaaatgggggaaagaggccatagtgagagctaatacaaaacgacaagaggtagggtgaagatgatgggacccatgaaagtaacccaaacaggtcagaagcatttttgatgtcgttttcgttgggtggaaaagaggccattcatgctttttctctctccatcaccatcatattcataatactatgcaattgcaaccccttttgctttggtattggtatggttagattctcattaaaataatttgcagaggaaaaaaaattaaaattggacggcgtctatctttttggcctttcttatgtaatgttatataaacttacttttattttttattcatttgacaacgatccaacttaaatttcatcgatttgtctaaattattcccctaaagaaaacataaaaaagattattataaattggtggttttttttttatttctcttcttcttctttttctcccaaatcacattgcgggtcttattttgattagtggcttttttagaaatgacatgctagtggagtattttcttacatcagaagatagtgtgataattggtttgaccaacaagcaaaaaacaaatttgcttcatttttcaatttttgtgagtcacaagagcaatttaatgtgcccaattgtttttattttcacttttcattatacacagcactgtctttttttttctttctgttctttcgtgtgtgaaaaatatgtaactttcattgaattgttctaacaaattcactatctacttctaatgttttcaagagcgaactcagaagagaagagctcaaaagagagaaaagaaccaaaaccttttttttttgctatcttatgagcctgtctaggtacataagaaaaaacaatatgagggaataaaaaaatgaattgataatttcccttattacatcatataaaagagagagatcctcactaaaagacttaactctgttgacaattcaataatgggagctgctaaaccaacaactacatctcctttgtcatttctaacaactgccccccatagcctatcttgtccaattttgctgcacttgcagcatcaacatccagttggagttgaccacacaattgatcctgctaggccaacttgtattcttgcataaaagaagtaacctcatcatgtagatacagaagtgttatactctgatttgcaaaatgcatattcgatcgtatttaagaagaggtggtggagcgcactccaacgaatagccatcgaatatacattggtcacgactgcgaaggttcaattaaataattatttattttgattcatggcttaattttattaaattgagttaaataaacttaatttaattaaataaatcaatttacgttataaattaatgagtaatttgcggcaaaactcccccaactatcaatttacttgtaaaaaaccatccaacctcatattttggtgg

SEQ ID NO: 18430 - DNA, 5895 bp, Cannabis sativa
acctgggactcgaacccaggacctccaacactcacacacccacctatggccacttgagctagccctaagtggttgggatcagccctatttattatctattcttacttgggatcagccgtgtaattcttaggtattgtaattacttaagtagtaattttaccctattttaaaatatgtgtgtttggatatgggtaattggatataaattgttatttttatgtttgataaattagagcatttccagtgacattttttattttttagacaaattttatttaaatagctaaattgttaagatagtgaggtataatttttcttcatgttactcttattttaatagtttgtatgtaatgtgaatttattaaatataaattaatttaataaaataataaaaatgtagaagtgcttttttattaaaatattattaaaaatatttagaaaaaagtaggagagagttccctatagattgtttattatagggtcactttttatattaattgaagagtatttagagagtatgttgtacacagtttaatgatatcaatcagctaaaaataaaaatattttataattatatagtgtaattatatttaaattttacagagtttataagaattgaagagtaattgagactcatcaattacctctaattatataattttaaacaaacatatcaaaatttacaattactttaaattatactcaatttaaattgcacagtaacttttgaggtaaaccattaattttcttctccataaaagagagaagtctgaagtagtcaaaaaaaagtttttacttttttgaataagatatgaaattggtgctcaagaatcaattaataaagagtatgattattgaatgttgatgattaactctgtacagaaaaatttattgtgtaatgaccaaaaggtttaattttatttaatatatatctacgtttattttaaaaaaaatatatatatcatattacaattgattagtaataaagaaatattatattaaatttgatatttatacttagaaaaatgtctaatcccttatatagcatttctcattaataaattaaaaaaggcgattaaaaatccaatggcagggatcaagtgccgagaaccaccgacggtacagtaatctttaatgcaaatattaataaggtgatgaagtcttcattaaacaacaacactctccacgtgtcgtgactgtcgttgaccgcaagaaaaggaatcattggtcattggcgagaacagcgtgttcttcggtagtcagcgccgtaggtgagcactaccactaccactaccctatctcatctttcatttgctttggtgtaataaaactctgtctgcacgagttgactcttggcacgtgcgaatatatcatttcccattgaaatcagcaacagcaacacaaaactcactctctattcaatttcgttctttcatgaacaaaaagcttcttacttgtacagaagaaagaaactttccccaaaaccaccgtctctggcttcagatctcactctctccttcttcgtaaagatctttcttagattccctgagctagtgtcgctgttttggattggaactgtgagtttttctccatcgaattctttgaatctcttacttgtttaattagagtgaatatttatgttaaccgcggaggatggatgacctttgttttttgttctgttttgatcagttcttgcattgactttcttatctgtttggttactggaaaaatgccggagaacgatttgtactagttgtaagttcttgatacttgtagtttatagctaatttattctgttccatgagtgttttccgaactggtagttatgttgattatttagctcaattctgttgattgaatttgaatgtggtatttgcttcgttagttcgattttgttaatgcaagaaaaaatttgtttgccaaatgctgaatgccgatttaaatctgagtaaaatctcaaatgctgaatgctgatttaaattaattttagatttaagttaaaatttcaaacaaagtttcaatgttgatgctacaaaatcaaaaatatgaagcttcttgtttcgtgcaggactggaaactttgggggagctgttagagaattaacatggaaagtagatgaaactcaacaaggcaatgtaatatagttgtgcaaagatggaagaaggaaacaatttaggtgagcttaagtcattgaggatagggggtagttttaagtcttcattgtctggtagatcaactcctagaagttctccatcctttcgaaaaacacattcgggccgcactcctcgaagagaaggtaggggtagtgtgagtggggtacagtggttccgtagcaatcggttattgttttggttgttgttgattactctctgggcgtatcttggattttttgttcaatccaggtgggctcatgacaatgaagataagcataactttctgggatttggtaaaaaaccaaacaatgggaactcagaaactgaacaaaatcaacgacgagaattgagtgccactgatatttctgtggcagttaagaatgagactgttgaaaatcaggctacagatgataagaggatggatgtagttttggccatgaaagagaatgaagtttcatcacatcgaaagataaattcaaagaggaagaaaggtaaaagaagtggtaaaatgcgtggtaagcagaaggccaacactgaagttaaaagcctagatatagaggaacaggaacctgatattcccaagacaaatagctcttatggaatgttagttggtccatttggttcattagaagacagaattttggaatggagtcctgagaaacgtactggaacttgtaataggagaggggactttgcacgacttgtttggtctcggagatttgtgctaatattccatgaactttcgatgactggtgctcctctttcaatgatggaattggcaacagagcttttgagttgtggagcaactgtttctgctgtagctcttagcaaaaggggaggattgatgacagagctttctaggaggaaaatcaagatgctcgacgacaaaggcgagctcagtttcaaaactgcaatgaagtctgatcttgttattgctggatcagcagtctgtgcatcctggatcggtgagaagcaatcgaaaagcagttaatttaagttattgaatgtcttgatattactatagctacatagttggccgctcaaaatgcattgtttactctctcttgaaatttgtattctaaaagtaaaagtcatgcatctataatgtacattactgtctttcattctgaaattctacattctttcagctgaaggagaagcttctaagcttctttttgaggtttgaaatgttattgaattcatcatattaacaagccaactttgtttcagataaatatattgatcgttttccagccggtgcaagccaaattgcttggtggataatggaaaaccgccgagaatattttgacagggcaaaagttgttcttaacagagtgaagatggtagcttttctatcagaatcacagtcaaagcaatggctaaactggtctgaagaagaaaatattaagctgaggtctcgtcccattgttgttccattgtctattaatgatgagctggcttttgttgctggcattgcttctacccttaattctccatctttcagtaccgagaagatgatggagaagaagcaattgttaagagaatcagttagaaaggagattggcttgaaagataacgatatgcttgtgatatctctgagtagtataaaccctggaaagggtcagctattgcttcttgaatcagcacatttggcgacacagaaaaagcaagatgatcctaagattaaaattccagtgaataaaggccgaaaccagcctcgtttggcgaaaaagggtcgtttgagagctttattcagaaattcaaatgccactggtgaattatcaaattccttccaacatataattatttactgaatctcaaagaaaataattgtctaattagtttttacttatgatgtagggtctttgggctccgatggtgttagtaagaagttggataataaaggaatgcaagagcagtctgttaaaattcttataggctcagttggatctaagagcaataaggtaccctacgtcaaagagcttctaggattcttatctgagcattcaaacttttcaaaatcagttttatggactccagcaactacacgagttgctgcactttattctgctgcagatgtctatgtcattaattcccaggtaagctaactttttaaagtttacaaagtgtgatcacactatttatctgttcactctaattcttgtatgaaaacggcatatgttaattttgaaagggtttcacttttcagggagtaggagaaacatttgggagggtgacagttgaagccatggcatttggtcttccggtatgacattttaattttattccgctaattaaacaagttctcctaaacactgatggatttgacattgtcaatacaagctcttactttctctgtattaaacaaaacaggtgcttggaacagatgctggagggacaaaagagattgttgagaacaatgtaacaggtcttcttcatcctacaggaaggtctggtgcgccagtccttgccgagaaccttcggttcttgcttaagaaccctataacaaggaagcaaatggggatgaaaggtagagaaaaagtggagaggatgtacttaaagcagcacatgtacaagaaatttgtagacgttgtaaccaagtgcatgaaaaccaaataaggcttgtcattgtgtcattctcattctttgattgcttctaaagttttagggggccgccgccggtactgtgaatattgaaaccgattattgatccgattattgataaccctatgtttaatttgcttttctttctttaggaaatgaaatcccctttttagttgaattttgttcaaacaattcactcatttggggtagcttgaaagttcttagagtacagagaagttttttatctttcttcaaaaatgctaaaatattgtattgcattacaaatttgaccggatatgttttgagattacaaattaaggaattgggtaccaaaaatgaattagagttaatattaggttggattggagatgatgaagttatatgtgctagtaattttttcacatggcgaagactaactgaagacatagaaaaagtgtggattaactccaaattccaatgtttagtacttactactgttcaatttatttgacgtcttagcctttttttttttcttttttcttattaggttattgtctttgatttgactggtatttttttatttacaaataaatcattgataattattagagaatgaaaaagctgtcggtggtgagaactgagatttgataaaattagaactttggatctttactcataatctcagccgacgcatgctaactataaaaagttaaaaattaaaaaaaaacaagtgaaatcagagaatgaaaattgtgtagaaatacacacacacagctaattcatgttgtttgattggtattttgtttttgtctttagtaagtaaagctatgttttattattaatttattgtgtttgagcttcggtggtagatagcaccaaacaaatattgactccaatcgaattgtttctccaatggaagcttcaagcttcaagtttgggatcttcaagtttctgtggtaattgattgcttggataagtatacccaaccaaattcaattatattaacttctttttaacctaattttgtttaaattgcagagctcctgactcctgaggtagctgagatgagaaagaaaaaaggtttgttttttgtttatggtaaaagcaaagtgaaccaacccagattagtttattgaggattattattattttgtaatct

SEQ ID NO: 18431 - DNA, 3727 bp, Cannabis sativa
aaaaaaaagtatgcccaacccacccccattaaatgataatattttaaggaacataggcaaaaagcatgaaatccatatagaactaacacaagtcatttcctatcatgaacccaatcactactattccaatgataccatccagttttcgtaatgtatatctctattgggcatcgtgttagtgatgtccaagcttcgcttctatataagctataagcaaaattaagtttcacttgttgctagaattgagcaattttcccatacaatggcaaaaaaataaaaaaataaaataaaaaaaaacattgacaaacatttccaaagaaagtcgcgaaaagctctagtgagaaatctgacatcatcacggctttaaaaaaatcatataataaggccaaggctataatgattaaggacttaaaaaaatgaaaaattaaaggtgttctgatagaactgtaaattctttgccaggatgtaatgaaaaatatgatattattacaacaaatcacaaagttttgcaagcacctctctacttcataagcaaccttgcataaaaatggaaatattaatttctataggccaaatcaaacgagggtcatgatgaactggcacattgtaccatccacaacttaaccccatataaaaaaaatacatgacagagcatataaaaagcaaaataagagatgagatctctacctcaattgcataaattgcagctttaagtgactggagctgcgatgagaggacttttggaaacacatcagtaacttcatcatccctacatgtagctaaatggatagcgtatctctcttcttgatcaaaatcaacttcaaatgtggtatggcatactctgcagtgcttctcgtctctccaaaatagatcatgacagcattcacatctagtaagtgaatcaaaatatgaccttttaccatgttttacagcattaagacacaagtagaattcactccaggtccatgaatcaaatgcttgaagacggatccacttttgtttttgttcttctcccttatttccaacttcaataactatggccccagatgaaggcaaagaatcacacatgacatcagtcaaggtcagattgttatctacatcagataatggagaataactgtcttcccggatgatagtcaggtcagattgatcaaaatgtgtcaaatgtccactcccattactatttaccattctactagacattgtttcacacagacatgcttgccgtttttccaaagattcaatgagtagagcctctcgtttacctctgtcatccaaaacttctaacaaggcacacaaagcctgcacttgatagccatatgaagagatacaaaaattattgatcaattacattaatccatgtagatacaaccatgaaagatttcaaatatgtaaatatgtgtgaatctataaaatcaattttatttttttgtatgtgtgtggatgggaaaatgaagccacacacacacgagaaaaaagagctagaaatatcacctcttttgtgtcaatcacctcccaatgaccatccttaaaagattcgaaataaatcctcctatggcctggatcatttgcattacaggggcctaagaatagccagtatctattgtacctacgatcggaccccaaaaatacagactgcattggatgtagaccaacccacacttctgtatgttttgcaacattttccttataagagggtctctcgcaaagctttgagattgatgaaaatgaatctattgcatgacagttccagtatgcataagcttcttttatgccctgtaattgtccaagatgtccccaagatgaaccaagcaggttttgatgcttagctgatgacctcttaatctttgctcccgaagtagaatggtaggtgctaggaacacattcagcaatagtttctggaggttcctgttttcaattattttaaaaaaaaaaaggaaaaagtgataattggtttcctgcctgagccactgcttattcaaaatgatggagaaaaatagtacaaatcagctgtttttcctccatctgctagtaatggctaagctgatttaaaattatgagtccaatttgagaactaattaatttaaagaacttaaccaaaacaatcctactcggataattggaaaacctacgaagcaactaagttttcattgccaaattacttttaatcataattcataacaatcattgcatgttattcgtgggataacgatgcaagaagataaatgattacctccattctgatgctgaatcctgcacgaagcagatcaattaaagctaccatgacattcaacttttcttcaatgcttagatctgaatattcactttccatcagtcctaatagccatgactcaccaggatggctctcatcaatttcagtgtaattgtttgataagccattttgatttttcggtttgttcaatttcatcacttctataagagtggaatcttctgcatcacatcttgagtcttcatcactactatatgcatcactctcactggagccatcatcaactgctccagagtcttcggtatctgactgaagttcctctaccttcttaaggatagagtttatccgtagacgatatgtactcggtgagatcttttcaaataaagttatgtcacttgataacattgaacatattaaacactccaattcctcagtagtggtggccaattttaaatcgacaatcttcaagacaaaacaaaatccgttgctgatataagttgaatgttttcgtatttaatataattgattaaagatgaatggcggagaaagagcatgttcactttgctttcatcttcctcccaagaaaaaaagttggcatttgagtaacttactcgaaaagactttgccatgtcagaaactttcaatccactgtttccttgttcaagcaaaatttgaaataatacacccttcaaagtgccaggatgtagaccggacttcaccataagatgcacttcctatgaaaacatgggctgatattatgtagatgaaaaaagagtacaaaatttgtagaagataatagttctcatcttaggattaaaccgattcctatgtaagtcaggaaaagatataaaccttcaaaatcattacatcaagtactcatagaaccacctaatatacttggaacttattagaagttagaactagaaaatcaaaccattcgatgaaataatgaaaccttgcagtgaggattattgttgacataaatctattaaacattgtaggattaactgattctaaagcagttacttaactggataatagttatgtttcccaagtattaggttcgcatttatgaagcaaaaaagcagtaaataccatctaatgcaatgctatatcaattttaacagacgccatgcttgtttggcagaaaaattattcaagcttgaaaaatattaatataattatgcatttagtctactagatccaatgtgaagctttatcagtgccactatcattaaatgtttgaataccttatcaaaggtttcccttcgaatggaactttgtttagcaccaaaaccagatgcaaccaatatttgtcgcagtatctctgtccaggttagaggatttaatgatctcccccaaaactccaaggaaaaatcttgattttccacctgcaatattattaatcaagaagccaaaacattgaatacttccatttggtattatcaataaacaataaacttgcatgtggttgtaggcatagcctaatcattgcta

SEQ ID NO: 18432 - DNA, 1982 bp, Cannabis sativa
tatatgggacccgatacttagttagacaatagcgatattgacatataggaggatgctaggcactactggtgtcctttaacatttctcatatgtatattattttatgctatagcttgcgaatttttagattttaaattattaaaatatagcttaatgaagggatagtttgttgaatcttgtgtgagattttaattaattagtgaacattaataattttaactctctagaatcacagtcacacttaattaataaaaataaaaaaaaaaaaaaaccctagattagaacaaattaataatatttaattttttttcttaggaagaaagagtatagctaacaatttttcgtgtgtgtgggcaataaaaataaaaataaaaaattgtgggcgataaaagacaaaattagagagaaaatcttttgtgatcttagttcatttattggtttataatatgatatagttgattaattaattattaaattaagaaccttggatgaataatattataatattgctagaagctataacaattttgggcgataaagacaaaaatattttttacaaaattaataaatcttctgtagtgatcatagttgctggttaattatcgtattatatatagtaattaattattaattaatttagaaaccctataacaaaataatttaaaaaattaattaatctactttgatcataattaatcttatatagttattcatttatcagtaattatcttatatatattaaaataaataattttttatttattaattattaatggtataagtgttgtggtttaattagtagggaaaaaaagctatgttaatttcattaaattttcgattatattttgttttgttattaattacagcatgattattaatttttaaattttgataaaatccattaattagtatttacatacaatacatataatatatccaagattaattagtatctgtaaaacgtaaatttgaatgaaataataatatatagccttcatttctatatatatactgtatcttagttttattccttttattattattatttattattgtttttcaagaaaatattattacaataacaataattttccctctgttacgaccagtgatgtaatctctcttttaaaaaaaaataaatcataatcttaaaaaaaaaaaaaaaaaaaaattaaaaaatttatcattttaatcataaaaattctatacaagaaaatcatgatgtgcttaattagtaggataaataattaggcgagtgaaaatcacgcaaacaataaatcgcgtgggaataaacgttaaaagtatgccacgtaagcaaagcacatgcccgaatatgatacacgtcatcatttcatttcttctcctaaaagttaaaacccgtttccacatcccataacccgacccggatcctatttaacgggtcgtgtaattaattaggagagaagtactacgttgaccgtgaagaagactattaactaagaaataatgatgagtgtgtttttaattttaaagtaatagtaacacgtgggtgacgtaatctgacatgacagacacgtgtcattgtatgtgggcccaaacacttactgtgacgtagtgatctgaatctttgtcgggggtgagtttaggtatgggaggggtaatatggtaattatgtattaggctagataattaataaatgcattgattgttgatacgtcatcccttgatcttgtccacgctggcaaatcgtagggttgaatggtagtgatgatgatgaggattaaatcaacggttggatggaagaatagttgtgaaattattgtgatcaatgttgttgaatggatctatataagtaggactagattctaagcatagttcaattattattatcctttttattagactagttggaacaacacgtgctacgcacgtgtaatctttttgaaagtaaatatataatttttattaatgtgctaaatcagttaaaagataagattcttcct

SEQ ID NO: 18433 - DNA, 3193 bp, Cannabis sativa
ttagtacatgttagttttattattattagagtacttaattaggctcccctggtatcgtatatggtcggcacaaaactacaactagtgcttatcacgtacaaagtagttgcccatattaaaatttgcaactaatatatgagatcgatggttctagagctacacttaacaaaacaaaaattcaataggaaaataataagtctggataattttctattcaacttattgaaaaagatatagacgtgcacgaattataatacatacgtatttattataattacagaaaaaaaaaatcacaaaaattatttgaagtatcgaaaatataatcaaataatttattgttcacatgtataaataggcactcaaggaaagggcaacaaatgctcgttatagaagtttctcataaggaaaaatttatttatatgttgtgtttgtgacaagttttatatgttgttttcattaaaaaaaattaaataatagaaaagaagagtaattttttttttttttctaataatccatgagtccacaaataaataaattttatgtatgtgatctcccatgaaaactcaaaacggaaaatttgatacagatccaactccaatgaataaagaaagattaaaagaagagatataagagaagatatataattatatttaagacaatataaactcttaatataaatccattaatattattattttatgttaatttcaaatatctttgtacattactcgaaaatatcatgtttttttattttttggtattgtttagcatgactttagaagagcttttagggtgtaaaagtagctaataatatgtaagttggatcatatatctttaaggaagaagaagggtagtaaaaaaataatattatatttcttttctttttaaaataataataaaataggctgattttcaattcttcaccattaaaattgagaatggatgggagatgagcattgcatgaaattttacaagttgacttatcgaaaataaaatatagatcattttagcttaataaagtaatgaagatatagactagtctctagtgaggtgagaccatctaaaatcgtcctcagggcatgaccaataaatgttaaagaatcaaagatatgcttaattttaggagatagccactataggctattggtaaggcgagtttgatggagctgaatgcgactacatttgagttgcactattgcatctaacgattcgagttaagatctttcaagtatagataaaagaagctaagaaacaagaagattgtctttaacatctcaatcaaaaaactcatcaatgagacgaacagccgatctatatcttcagttgtcttgaaactatggtggagtaaaagtaggatcaagaaattttaaaggatgtttgcttttaatagttgcatacatacacttggtgtctctataaataaggaatgattgatgagggaggagaattggtagccaattggagccttaagctttggaggcttgagtcacccagaatgattaagaagctaatttcaatcctcccattaaaacaaaagggcatctaataccaaaaaaatttaaagaaactccaaatctacaaaagaaaatgaacacaaattagaatgggtatttaaacttttaagttttctaactctctagatggagttgctgaaatatagaaaaatgagcaacgatattggaatcaagattttttattaaaaagtagtgaatcatatcatgttaaatcaatttaattttggcaaattacttgtcttaatttatattaaatatgctaattatttttctgattcaatcaaaggtttaaatttttaataaataaaaaattaattgacgtgtcaaacttaaattagtttaacacagtatgcatagtacaccactttttaacacaggatcttgaatcacgaggttggggtcaatactatttatttatataggtaagactttttatcaatattgacatctgccacaattaattgtcaaattttttaaaaataattaaaaataaaattggtaattaacataaatataatattttttatattaatcaataaaaattgtgttaatatagtaatcctataatatatgattttgtatggtaatattctaacaaaaaaaagctcaactaaatgaaactaaatgaattgagcttttttattttaaattattatctaaatgaatgaatttacactgataaatagatggagtttttacaccacataaatttttaattttttttactgtgaggtagaattttttcaaaatattatatattttttaaaatactgtgtactgtattaagttttcactgtctgttttattattttacagttgttttaggatgttttatcaaaagatagtacttttgtaaaaaaaaattgtgtggcagtaaaattataaatttttactcaaaatctaatattttttataaaaacccttaaatagattagtccttatatactcaagggatctatttatagcccaattgtgagaaaattaaatcttgtaaatgggcttctaatatgcagtttgcctacaattcaatatatagctggactttaactttagcatgtattcatgggctttaataagcattctttataacaaaggctaattcattctttattttatttattctgtgtaaatttattagttaaaactaagcaccagccacaatttgtgggcaaatacaagagttgtcaatgcatatatgagaaatcatgttaaaaattagacaatgtggaaagtattatactcatattttaagcaagtaatctggttacgacacatgtaagaaagttggaaatgaaccagctcggactataaaaaaataaatacacacaatcacttgcctcaaaaaataaaattagtaaatataattaaacctctctttttaaaaataaaagcaagctgaaaataacaactactatcttataagaccagcgagatgaacaatcaatgtcgaaggtccatcttaggatacatagagtatacaatagaacgacagttagttggaaagagtaaataatgaattctttatgagttttcaacttaataacccacatacttgtgagtatgttgaaagactaaaggatgtacacaaaacgcgatttatctcagaataatcgcaaatgatacaggatgacagcatctcgctttgatatactcgatcagttacaacattacagaagagt

SEQ ID NO: 18434 - DNA, 5113 bp, Cannabis sativa
tggccggcctagtagcagcaatggaactgggtctggccggcctagtagcggcaatggaactgggcctggccggcctagtagcggtaatggaactgggcctggccggcctagtagcggcaatggaactgggcctggccggcctagtagcagcaatgggacagggcggcctatagtgacaaaaaatttgccgttgaggagtccagctcctgttgtcagaaaagttgccacaccagctgcgaagagttccatcccaagttctaagagttcaattccaagtactaagagttccattcctcgtaccaatagctcatctatgccaagtatgcagaaacccttttcttcaaagttgcagccctctatttctaggcagcagcagcagttaggacagagaagggaattacaggctcctgctaaggctaaattgtcgtccaaacagtcaacaggattatcaagacctcaggtttttattgttttcctatactcccattggtttcaagtttttactttgctgctgcagtcttattgaattgtaaaataacaatatctatttttcatgaaattggcagattaacaagccacaaagacaaagttcatcccaccttacatcacatgacaaccgccccaagaaaaagccgatgagacgatactctgatgatgagggtgatgagggtgaccaagccattagtatgatcagacaaatgttcgggtaaaaatacttgcttttttccccttctaatttctggtttaggtttatttactgccagagcctctatttgaaaatttcacttgctatcatggtagataagaccctttgaggcttagatgtcacctatcgctcattttactgcttttgtttatagtttttatattcatgtacaatattcctaataacaaaatctggaatcttttattccaggtataatcccaaaaaattcgccggtcgtgatgatgatgatgatagcgatatggaggccaactttgacgatattcagagagaagagaaaagaaggttgagtagcatgttccacttaatcctgttttaaatgattttatcctgttgttacattcaagagtttaaaagagaaaaatgaaggcccaatattgaattataaagtacttgaaatcaataatagcaaatttgggttttgatttctaatcaaattccaatagggacataatcaaaatgagtatatgaatttagctggttctttgttgttaatagaggaggtttttgtgttttttttttccttaatattttttgtattttgcagtgagataattgcaagaagagaagatgaagaagagcagcgtttgatagaggaagaagaaagaagagagagagaagctaagatgagaagattaaagaagcgaaagctggggcattagaagtattaatatttgatttgagtctttaggaagtgctcagtttctatttttatttaagttttgcccaagttgtacacaatcaatcaagtttcttgttaggtggaaaaatcttggtgttttctttttggggtggatggggtcaaatattgagttaattattcactagtttaggaagctgttggtggtgccaattgtacgtagagggtagtaataacatgaggtgatttttttgagtttcatcttgttattgccactcgcagccaagtaaactagttccacccacttaagtaaataatataatgtaaaaaagccagataacatttttttgtctatcccggacctcttacgtctaactaattttcataatccttccgtcaaataaaaactttaaagaccaattaaaaaaagtgtaatcatattaattatgaaagtcaaatgtatgtatatattaaaaaaataaagaaaataatattaataaaataaagatttccttctttttactataaaataatgaaaatataaacttaattgaagtttttctacgaggaaagaatgaacaataatgaaaatttaatttgtattgatattactataaaaatctatctggaattacattacttcaaaaattaaaatacaaccttctttataatcttttttttttgtcctttcaacaaagtagttggtttcttcttcaaaaaagtagttggtgaaaaataaaaacatttctatgtcttataatttcatgttttaatgaaggcataatgtcatgtttttaggaaggcataatttgacgtcttgtatacttttttatcaggaaaaataaataataataataataataataataaataaaaaaaaaagacagttctgcacggcctagattcaggaacaacaaaggtagagcaaattgggtaaacttccactaattactacctccacgtgcgttttcattttccattaatcgtttcccttatttttcaataaagaaaaatttaataatagaagtagagtctgggatcccgtgaatggtgattatttatttctatatttttttgttttttgttttttgtttttccaaaataatgaaatgaatgtttagtagaagaaaattgagttttgtgaatttgggtggagagtgagtgagagaatgaaagcgttgatgataaccaccaccactgcgattcaatggcaacgctctccttcttcctcaaagttcaaccgtgcttcgcccaaacctcctccattttcttcttgcttaaggtgacctcactctctacttcctttttttcttatcctcgtgatttttgatcaaaattctatgcttcctgggctggctgtataactctagttgtgctttttaaaggtctttacaaaatgtgcaattctacttgtttatctgtacattttatatagtattatcatatacgtactgttcgtatgcttgtaatatctatctacacgtaaatgtgtgaattctgaaactgaaattactagattcggtcatgctttagtcattggataaatgatcttctattatggtttcgaattattttatttattttatttatttagtttgtaaagttttctgtatttgtaagtctttaatcagaatttttttgtgtatgtgcgcatctttaggttggaaggtcctggaaatgcagaattttctgaggtatgctactaatacagttgttggttgatacttgctacgaaatacaaatcgatcaaattttatttttattattattattgttattatttcattgtagttatttttacaattatattttatatttagcttttgtttttctatttaatctttaatttggttcttgattttttccgtttcattgttcgatttgattgtgaagtcttcgaatggtgaggcgaagaagcatactgaggtttggcaacttttcaaagaagctcagcagagtaagtctttaatgcaactgagagtttactttgataaatatttcttcttgaaattgtgactcttaaacacaacattttattaagattaatgtatatggtacatttgcttttatgtatagatattttgtacttgaacaaacaacgcctaaaggccatgagggagctggacagaacaaacaaagagaagcagttgttgctggataagattgagcaattagagttggaaaggcagtctggtgctgtaaaaggtaatgctttcatagtatgaactgattaatttcgactagttctattatttgtggtacattttgttgagttgagagagaaagaaagagaaaaagagagagacacaaaggattctgttattgattaactaaggaaatcaatacaattgtttatatatgtacaacagagctaatagaacagttggaaagtgtaacagaaagttgttatacaatcagctaacaaccaaaactgaactaactaactaacaactgtcttaactaactaatcagtccttaacagtccccttcaaactcagggtgcttgatcacaacactctgagtttggtcctcaagttagcaaactgattactggaaataggtttagttaagccgtcaacaatttgatgttctgttggcacatgattgactctgatttccttgttgagaactttgtctcgaacaaagtatagatctatttcaatgtgttttgttggtgagatcacatggccaatggaagcaagaagatcaactaatctcttgattttgagcagataatcaccaagtgagttctgcatttttgcatttcgaagcaaagtacgatattgaccaatattagctttgttcaaagctgtgtagtaatcttggagagtgatccagatctgagaagttgtatcacaccctaccatacgcgtgaggatcttctcatacatggatgacaacagccaagatactaggatgttatcttgttgtttccagtcctcgaattcaggactgacattgttggcaatacgatctgcttcagtgaagaacttagaggagtaagatgaggatcaagaaagcgttgcaatcggcttcctttgattgctacaaatacttggtgtttccatggcaagtagttatgctcgttgagtctaacagagagagaatgtcaaaaagtaacaagagaggattttgaaagagtagagagactgccggtttgagacaaacctccattgccgccagggaagaaggtagtcattgcatcgaagaaggagatgaacgaatcagctctgataccatgttgagttgagagagaaagagagagagagacaaagaattctgttattgattaactaaggaaatcaatacaattgtttatatatgtataacagagctaatagagcagttgggaaagtgtaacagaaagttgttatacaatcagctaactaccaaaactgaactaacaactgtcttaactaactaatcagttcttaacacatttcagtttgaggtccttttaatttgcttctatcattctttatgcatagcaaagcatctatggcattctcatggtatagatttgtcaatgtggtcgtttcacatatggttcagcacatctaaatgattcttattttgattataacaaagatcgattgtaaatttaaattaatttttagttgtttacaatactagagttatatgagggtaaggaactactgagctgtatagttcttgtgacaagtaaaatatctttacctatcagttcagcccaatgcaaatttatttttctcaatttttgtttttttttt

SEQ ID NO: 18435 - DNA, 4701 bp, Cannabis sativa
  modified_base (74)..(74): a, c, t, g, unknown or other
  modified_base (2654)..(2655): a, c, t, g, unknown or other
cattctaattatgagaaggggtcattcgagcgtatctaaatagatactatgtttacatatggatccctacgtcnttacattccatttaggattaggaaatttgagggtatgcaacgcattgagtattctctcttgcatcacagggccctaaaggctcccatagttgtaaccttgtttgtctgttctaatagcaattttctactgttttattgattttcttgagtttggaatactcggttctgaagcaatttctactggatttctcaatccacgattgaacaattggtgaagcatttgagcagatgctcacatccctcagttatgctatgatgttagtagtctcaaagactcaacctaaagtagaatataatacactgactcttaataaactaaaagatcagctgaaagtaagtcaaaacaggaagagagcatacatttgtcaaaatcagcattagaagcacatgcttcaatgaactcgatattatgctcagtgcaccactccaaacatgatctcctaatctccaattccagttctggttcatcatctcctaacaaactgcttccttcagtttcagaaattccataattatcaaactccaatgcagagtcgttaaccttcattaggcttctcctgtattcagaatgaactggatgaccaggaacaagatccactttgttccctatgcacaacaaaatctcaaacttttcaagatcattacgagatacccaatcctgaagggcaactagagacgagagctgcacagaatgtcaaagaaagatactcatttccaccaaacctttctggttgcacaaagagcaatttcaaaatgtaatggggtagcgagtaaacagcacataaagtcatattgtaggaaaggaaaggacctacgtcattcatgttgaagaccatgaccagggcagctagcttggaatatgatggaagggtcgaaatggataatgtttcatgaagatgagccacatatacggaaacatcagcagtgtagtactttgtgttgatagtccatctgcttgggaaaacaacaagaaataagtcactaatagaaaaaaattcaagatctgtttgtcacttaggctaaccactgatgaagttgaaaatagtgattgcctacgggtaaaagaaaagtaaacctacccatgaagtagtagctcctgggatgaatcagaagcatcttcaaaatcaatcgaggttaatcctgcagtgaaaaagtgctctcaattttacaaaagttcggaaagtaacgatttatagctcaaaaaggagccattaaaaacgaaacgaaagcttacaattgatttaccatgtgagaaccaaacagaaaaactttgcaaaccataaagagaataagaaatgaaaagggaaaagtgacatacgtgagagaagagtgcgcttgccagcattaggggaaccaataaagatgatgccaggcctattatccagagattggtgaggattaatgtcaccattctcctcttgttgcatttttcctttttgtaaagctagcaataatcaccttcctgaaacacaaaccaacaacgttgaacgataaatatataaacaactttctgcaaaatgcaaactttgaatccttagccgttttggaaaaaaaggttaaaaaatttccaattttgagaggatcaagaaacataaaaatcttagaaaccagtgacacatgttaagaatgtgtgaaaagaaaatattcaaatgtgttctgccaaccaggaattacgaaaccaacatatatattagacaaactgtgatgatgaggtttgttacaaagagaaatttgaatcaatactgacaaaaacaaaagcacaaacttgaaatttttgcaaccataatgagaacacaaaatagaagatagaccagagaaatgtaattcatgaatgaataatcttatcttacctattatatatatggctatctaacgttatttgttgtgcatttaacagaatttttctcaaaaaaaaaaaaagaaatttaagagaagtgtgaattactcaaatagaaattattgagtgaacaattgcattctcctgactgaaagatgcaaccatttgcagactaaacaatacatactgaaaagtttcatcccacacagtttacaacaatttcatgtaaatgtcaaaataagaatctgttgtcaattagttagaatctgaaattaatttcaaaataacaaaaggtataaaatcccttatgattacagcagaataaaatgaaaacagtatatatatattagcatatttcaaaaccactaactaatgctcttcttttgaactattctttacagagggatactgatagtctcatctaaactcaaacacagattaatttcaattgcttcaacattgaaattataaccataggaaagaaaaaaaataaaaactttaggagagaaaccaaaaaattatgaaaagggaaaaactaaatctgtgtagaaaaggtaccaatcctgattaacagcatcaaagccgtacctgcgagtgagtgagtgaagtaattgtggtaatgaatgaagcggagttggacaacacaagggccaacgaaattcctcctctgctgtccgatcagttagtgaaggaggttgataatcattctagagtgagtacctgagagagagagagagagaganngagagagagagagagagatggatgaaatgaaatcagttgtagctttggatcgcttcctatttggcttctcatacatacccgcattctttctttttttttttttttttatgaaatgatctaatttcttttactttttattgtgaaattctcctatcttttaattatttgagaggagtgtattgttaaacttttattaaaattatttagttaacttatgtctttaaaaatacatgttagaaatatttttttctaattttttttatgaaggtatttagtgctactacatcgctatatgtataattaatttaaaaaaatattttttttttaatttaattttattgaattctcctaattattaattgatttttagtttaataatttttttaatgttaaattataaatgtagcactgatgtgacaattaactaaacaatgtcatcattttatttgtcacgtgtgacaaaattagaatgactaatttataatattgtaaatagttcaagaactatttataacaggctaaaaattttaagggcacaataatatatatagttcaataaaaatcaaatagtttataataacaaaaataatattcaaatattttttttttgaaagtaatgtctaaatttttttatttactacgagtgtaaaaaaaagtcaacaaaatatttttattttaattttattatggtaaactatttagaattttcttaaactttacaaataatactaaatatttacattacataatttacaaaactttcctagattccaaaaatttttatttacataaattttagtgtatgaggaatattaatttgcaaaagattttttttttcaaggtagtgcacatcctatcctcattccttcgatttaatagcaatcttggagactaccgagtagttaacgggagtttatacactgtccctaagatggttgacggtcaatgccctctcatatagaataatatagcccacctaatgagaaatgctaaaagataccaatagtacttagtacttttttcagtgtcatatcgggattgatacaattaagtattaggattcatataacttaaagtaataattttattgctaaccgatcttaaaaatgtcactttcaaatttcaaatggtactaaacactactaatacttaataacaataccagactcacaaatatccattaccccctaagaagggctaccacgaactccaccaagaatattaagtgaccaatttagtatttccatatttctgaaaagaaaaaaaaaaaaagaaaaaattcccactcacgtgcataatatcagtctttattttttgattcttggtagattccttttgtgctttatttgttctataatataataatagtatttatatattccaaaccaattccaatacgaactcttctctctatcctccatcaaaaacttaattacaatgacagcctcttcttcttctcctgaaaacaggtaatgaaatctttttatttaaatttgattgcaaatttcatctgggtttttcttcttttacaaacttcagctttagtttcattgcccgtaaccatattgtattgaatttattccaaaatggcatctttatataatgtgtatgtatatatataaatgtttagtggttcgcatgtcaggggcatactgataatttgatctgtataatatatatatattaatctcttaaaagggtttttggtttcatacccaattttcatcagatgtggctactcacgttgagctttaatttcttgtagatttagttgcactagactagtaagtgggtggaaagagttatagtatgtatgtataatgtatgacccagatgatagatttttgaattgagggttgagatcaattgatcaatgtctaatagttcttgtatctaatcagatttgatggtgtgtaggaccaaaaagatgtcaatacttgcaatcttaaatgagactttatactgcttgtttcatttataatataccttatgcctagattgatctttatttgtgattgtgccttaaaaatggtcataggataccaa

SEQ ID NO: 18436 - DNA, 8304 bp, Cannabis sativa
  modified_base (5529)..(5553): a, c, t, g, unknown or other
  modified_base (8063)..(8070): a, c, t, g, unknown or other
ccaatcgagatgaataccagatttgcctacaattcacatgatgtggattgtattttggtcagtttaataatatttgtattaaagaaagtgtaggttgttaaacaagttctatgactttttttttggatgagaaatgcaatgaacaagtttataataatgaaatttcttctttcatgtaccataatatgttgttaaataacatgattagttcaaatgactagaatgttgaaaaatatctctctatctattccttttatatggcaagttctaacacaactaaaagactgtacccaggtttaatattattcaaattacttggatttaataacttttcttatgttttaatttgtcaatttaaagttggaagatagaaaatttaccggacaagctttcccttagcgttccatttggcatatactcatataccaacatttgttctccttgatcaaaacaaaaaccaagaaggccaacaagatttttgtgatgaacacgagagagcaactcaatttcagtcttgaattcgagtccaccttgcattgatccttgttgagctcttttgacagccactacttgtccatcaggaagctgtcccctgtaaacctgtcaagagaaacaaaaaagatgaaaacaacaacttgagaaaaatcaaatgtgttgatgaaaggcatgaagcttgaacttttactttgccatagccaccagatccaatctcattacttgaagtaaaattactggtgcacttcttaagttcatcatatgaaaactgtcgtgctcccttgagttgtggtgcacctccactctctcgcccacttggtgcccaggaagctggaacaaagtgaagatttagtaatgtaagctaaccagttcaagccatgtctatgtgcgcataatgaagtttcaaatggtaaagaaaaacaatggctacatatgaatttcatttattaccgaaaggtctacttaatcttatggccttttcagcacgttttttctgacgaacggcatatactgctatggcaacaaggcctacaaccaaaactgcacagctagctgctatcccagtaattgctccagtgcctatagaatttcctttatgtgctcctgaaacaagatcatgtttttgttattgttaattcaattaacataagattaaaaagcttaaattcctactaaagattccccacaattaccttgaaaggaataaggagatgcaatgaaaatatatggtccaaattctggtggcggcttgtaaatttgtttattcaattgaaaactaatcctcagaatctcagatatatcaaaatactctactgtagatggaaagagagccaacccaatctgaagatagtcattagtatcgaaggtggggctttgaagagacactgaaccttgattaaggctaaggtttttccaaaggctctctgaaagattataaaacctatcatctgtaaattgcctgaaggaaggtcctctaaaaattaatgttccctcaaaaggatatttacattcacaactctgaggactgggcttttgatataaagggcatgatgtacgtccacaatcaaagcttgtcgaatatgtatctgtagatggctgctgatgtcggcagtaattgtaatctgcaatactagtagtctcacacactggattccctacaagtctataaacataaaattgatatttaggaagtgatgacctttaagagctggttagtttcatttaaaacaaagatgattggaaataaattatctcacactaatgtttctttgtaaagtccagctcttactgattgaatatcattattttccaagtcaactagctgcaattgggggctgatgttgtcacccatgttcaatgtgttattgaaattattatttttcagtttcctgcaggagttgataagcaaaattgtgagctgactatttcaataaatttcaactgtagtgatcaagtcttttagtcctcatatttctacttacacttgctgcaacagtgaagagttgaatagctcagttggaattcgccctagcagaggcccattttcaacgaacctggagtttaagaaatgttccaatttacaattataggacattttaatgaaggctacaatgacaaatttgtgtaacctccaaataacttacatagttgtgagttcttgcaatgatgaaaaccaagttggaggctctgttgcatcaaatgtgttgttactcaggtccctttagaaaagaagcaaaagatctttagtagaaagaaattacaaataatagattgaaagaacatgaaactatcgacttacaaataatttagcttattcattccggttaagtctggaaacgagccattcaatttgttaaaggccaaatttctgtcaaaaatatacaaaaatcaaatatttgtatctgcttataaacaacacttatatgctctttttgttcagaaaaaaataaaacattaaaataaaaaaataaatacttcatacactctttgataattttgtagtactcacaattcattcatatttataaggttgttgagatttgatgggacttccccggatagatcatttctatcaagccgactgtagacaaattgaaaataatgactattagatctatcaactttgcactgtcaataagttagaaagtagcaaaagtctaaaacgtaaatggtgaacaaaagaacacaagtcaagagggatgttacttacagaacctcaagagtggtaacatgtcctattgttgatgggatagttccagtaaattggtttccatcaaacaatctgtcaatgaacaagtagaggatgttagataagtaaacacaaacatcaaataattaaagatgaccaagatatatatgttaatttacttacatgtgtaacagtttcaccttagagctaaaaagtttttctggaatgggaccggaaagcttgttcttattgaaatgtctatcatttagataaagtttacgcaataagtctcacaaaatcaaaatataaatgtaaaagtatatcatatctttgatgccttggttgcagagtagggaactatattataactcacaagtgcttagccttaagaagttggtccaatcctggggtggtagaggttgaaacagggagagttccagtcaactcattttctcccaagtccagccaataaacgttcaaaagcttacccaaagaagcaggtatattgccagtgaagttatttaaattcagagctctataaagaacaagttatcaatcaaaacttcaagtaaccaaaccaaaaaaaaaaaataatgaataaattattcagctataatcatcatggtgtttcttacaagaaggtcagctccttaagattgcctatttcatctggaattttaccactaaagctacaaccaagtaggattctgaaatatttaaagaaaacaagcccttaaacaacatacataaatttttagtaggtaggaacttaaatacaaactgcttggttatttattcttacaaactattcaagtttttcaaatcgcctaaccggggagagagaggacctgtaaggtttctgttagaggataagtccctgcaataacattgaagcctaaataagcataaagtttaattaagcttggtctttagtaaaagttaacattgaaacatacaagagtaataatgtctcagtgagaataagaataaactcacaaggatcttaattcagtaaggcccccaatatcaccttcaagtctccctttgagtcctattgatggcaatgtcctgtaaattttgataaatcattataaagaagttgcaaattttagcagatcattgtaaagaagatttataatgaagtgaagagattaatcaatcattgcagcaatcttgttaacttattttattttctaacgggtactaaaagcaaaactcacaattcagtcactcttgagccttcacagctcaccccatcccattttaattttactccacagggatcttgagattctgaccagctactaggtaaattttcccaagccaccttcaatgactggagaaccgcaactaaaatgacaaaatttgaattagttaaaaggttgatcttgactgtctaacaaatgtctaaatttgaatggaactttttttttgatagaatttaaagcttctacttttgttttggggttatttcacaaatgcacaaaaaaaaaaaaaaaattacaaaaatatagtcgtaaaattttttaaatatttttacgatttttataattaaaaaatacaatcttgtgatgttttcatgttatttttatattttaattttgttattttgttgttaattttttattatttttatattattttaatgttgtttaaatgttattttttattactttcatgtaatttttttgttattttcgtattacttttataaagcaccttaaaaatatatataaaaaattaaacgtaaaaatataaaaattttatcaaaaatagtattttgtgtaaatttctaatttgtatttctttattataataattctacactacatctcccaaaaacgttatacatattctatctatctattttgttttctaacttcaaaatttaaacgtgtaatttctagttatttagaaaaccatataaatctttgggtaagttcatacactctgtttcagttgtttttatctgtttcggtatttaagagagttttttttttagtctaattttttcacagttgtgtacgttatagatatttaggaattttttaaaaaaatcaagtagtttacagtgtaaaaaataaatttcacatattttgttgcgtgtgcaattatttttcttataagcgtataattgtttaaactttatttcggcgccaaaattattcagaattttttaaaaatttataagtgttcctaaataattataacgtacacgatcataaaaaaaatatcagattaagaattttttctgaatgtcaaaataaataaaagatttaccgaataaaattttctaaatctttgaaaagttctataaattattcaaaatatttttctaatatatctctactaaataattgtttgaactcaaataaaacaacacatcattcctttaaatattttctttctttttttttcaaatgatttttttcttatatgtatattagataattatttaaattttatttttgatattataaattatttttaaaattctttgaaaatttactctaaatataactatatcatgcattataataaaaagaaatagacagaaaacctttcttaaatgacaaaacaaataaaaagtgtaagagatggatttttaaaaggcatactataaattttttcatttaagtaagggtaaatacttttttagaccctctgttttgcaaaagttacagattgaacattctatattgtgaaataacaaaatggactttgtattgtccaaatggtaaaaataggaccctgactttaaatttcaacaacttttttttaatataaccaatttgaagacaattcttaacatgaacagatacaaaaaatataaacagttttgtcannnnnnnnnnnnnnnnnnnnnnnnnttaaattttattttgacaaaaatcggttcagaatcctatttgtactgaccttaaaagttcaaggacataatttattacatgtcaaattcaggtggcgaaaattctaattagtctagctcaaaattgaaaattaatatgtttttttttatatcaaacagcttaagtaaactgaaatatttgcattgcttcatagaccttaattttttttttttttctttagcaaagaagcagatcaaaaaaccaaagttaagattggagaaaggttctgaagtgcttaccatcgctgggatcggtaaacgaagacatcgagtgaattagtacagagaagaaacccaaaaagagctgcaacgacctacctcccatagctgcagtccaagtccccccttaactcaactcaactctcaattatattaacaagcagttgatatactcgtttaacaaaaacgactacagaaacctaccaaatttcacaaaagcttaaacatttttccatgcatgccaacgtatagtcgattattacgtcaacaaaaagtagaagaaagtgtctatctaaaaaggtacctagggagatagagagagatagatagatagagtactgatgtgatctatttaacagagggagagagagagttaaatgattctgctgtttagttgtatttattatattatgttatgattagttctttgagttacgaaagtatataatatacacaattataatattatagttgttgatttcagaaaaaaaaatatgaaagttgtatcactcagtcataaccacttgaggttagttggtattggggtgtgtgtaggtgtcatggatccaatatttataaagacacttctaagaaaaaagaaagaaaaaaattgtctgtcaaaatgtcaatcaacgtttttattgaccatgtctcagcgtttccttggtctaccgcggattgtccaagtaagtctaaaatgatcccccacatgccaacttgtcttccattcagatgatacaaggcccaagcatacaaaaatctttcctaaacaaaaaaacatgaataaaataggctacttatatactaaaaaaagacccaaaattttaataaatactaggacacagtagagtttacatttatactgttccaatttattttttaacttttatactgtggaggagcgcccaaacaggactattcatcttcaacctcagcagccacgatcgacagccacccaacaatcacaaatgagccagaaaacaaccataatatccgacaatacaaggcgactttagaatgatgtgaatcaatatcacaaataaccttgacaacatgctaaaatcactcgaaaacaaaaaatagaaagaaaactcaaattcattaacactactataaaaattacttttcccaacgatttataactatcttttataaatctaaataatgaacaattaacaatgttaatcgattgttctgataaaaactaaatctaaacaactaatggaatcactgcagatctgatataaatagttggaggaaagtatcaatatataataattttggaattgacattttttgaaatcatgtcaaaattatggctattctttcttctatataaattatctcttgatccgggttgttttggtgttgtttgtgaataataaactaaaattcaatagaaattactaatataaaaaataatgagatatctcttgataacaaggaacgtatttttcaaaacaacactatagtgatagttgttctaatattattttgttgaaacaactttgttgaaattttgttgtattgttaaatttttatagggcatgcaatctatactagttctaataaagagcaaccgaaaattcatctctaaagattgcaaatatgaacagctggtatacatactaatgttatcattggcatgcgataccacaacaacatgttaacccaaaatatgttttcaagagggggtgaattagaaatataaactaatttcggtaaattaaaacttttaacacaaaactatgtaactaaacgcttaatcaaataaatgcaagtaatatagcaatcaataatgtatagcaaataattaaacttgtaaagcaaagagtttaagggtaagaaatcgcaaactctcaattttcacaaggttcggtagagttaagccacctacgtccttggtcttctaagctatagacctagctttgacttccaatatcgagccaaattaacgggcttgactaacccttacaactgggaaatttttaccaatgtatttctaaacttcttacaatagttttacgccaccaaggattattgtagtgacaatctcactctaaccccgttgtttacaaaatcgatgccaacctcaccacaatcacaatatgaaaatgtgtttgaaattacaagcaaattcactctagaagtatgtgttgggttttgtaccttaaaataaaactcatttcaatataataagatttactaattaatatgatatcagaaaacgcttttatgttgcatggttcacannnnnnnnttcatgattatgtttaatgtataaattctattaagttcagaacatatataaatatttatttattcaggattatagtgtcgatagcatagtgaaatataatcatgattacatgttcaaaagtttaatttttgtgatttatcagttcactggatttagactgacattaattggtgatgaggtatacttacaccttggataagtgttatgtcctttccagtgtattggcatagttta

SEQ ID NO: 18437 - DNA, 3708 bp, Cannabis sativa
acatcaaaataacattcttaattaggttcctattacatttaatcaccatcactattctcattccattgcaccaccattttcattccactacaccgaatcaaataccacttaaaataaagaaaaattggtaagaacattagtgtcataatatgatgttgtacatttatggtcttctccatctccctgacaaaaatgtttctaaatgggactattctcatagaaagtatattctaatacatgaaaaccaaggagaggaaaccatttagagaaaacgttggagaaaatccttaatttggtcaatataaggagatcgagtagggattatatggccagagtcatgttggattgtaacagcgcaaccatcgtcgaataacgaggctagttctctgcttgcttgatttgctatctgcctgtctttaccatggtcgctgccaaaaatatgaagagaggggcatttgactaatccgttgtctagcagctctggtaattttacagcaaagccagaacacaatatcacgaacctaaactccatttcacttttctgcatccctagttgggcacaaactgcagcagccatcgctgctccctgagaaaatcccaagattccatcaaatggcccttgttgagcatatacatcttttaagtatgccaatgatgcatcgaaaccacccgtttgctgctgatactgaagaacatcaaatgggcaatcagcaatcttccattctgtttcgctgctttggctaaagttgggtgccactaaccaagcaaacttcttcttgcaatgttgtgaaggtggaggggggccttcttgtggtgaaggtgttgtgcaatcgggatgtgtctcaattccacttggttggtaaatgaagggtaattcatgaggtgcatccacaaagacaagctcgacaaagcttttgagttttttggctaatgatgctgtccggcctttaaaactagatgcattctgtcgaaacccatgcaagcataagattctgagttttcttggatgtccaatatctgctgcatcaattaaccagtacacattaagaactgtagaaaaacagagggagaaaaaaaaaccagtgaaaacttagaacacaccagacttcaatatagtactattaagtctgagtggaaattttgattttttaactactctccacccaagagagataatcaataacaatcatggacatagaccacacatgcaaatacaactttcccaatcaagaataagtgaccagatacggaccttaccctgtctcggagacgtatgaggtaacagtttggcatctgaggaaagagcttttagctcacattgggctgaagtttcatctgacctgccattttcaactgatgatatcaatccaacatccttgccgtgtttcttgcatagctcacaaactgatgcaaagctttccttctgtggacggagattaaaaaatattagcaaagagtgcaaaatagatatgaagtaaaaaaaaaaaaaagaagagcaaaacaagttgagcagccaggtagaatgacagattggaagggttcagacaagataactgaaaagccaatattctaatttatacaccactgaatactgaagcatgtgatgattaaattaagtcagtaaataagacatacctggcaactataacaaaccaaaataagcattctacaataagtgcaccggaggcgcgaagagtaatcatcaaagggcaagcgacaaagaaggcatgtacccaatatatttgtatctgaactccctactgacatcctacagtcacagtgcaaataaaatgcaacttagttatttcactaccaaggataaacaacagttaaaagttaagtatcggggagtaagctatatagttctttcaacagtaagaagtaggtaagaaaactaaatcataccggtgatcaaaaacaaaattcttccctttgaaaaaaccgccatctggatattgttctaaataacgctgaattccaccaaataactgccatgaagccataaccagaatattaaaaaaagaatcaataaataaaaggtctgttgctattattaatcataaaagttagaatcaaaacaagaattaacttgctgcctaaattacagacttctcatgtaaaaaagacaagggaaaaaacaagatccaccaataaattccaatagagtctcataacaagctgaagtttgaaacaatattcaaacaaaaaaactgaactttttacaggaggaaacctcacctgaaacacattctcaaaaccagccccttttgacctaagataggctgatgccatctcacacctaatccctccagtgcaatacctgcaacacaatcacaattgatgatggatatcaatgcatccagataatagtctccatattccactgcaactcgtgcaaaataaaagcaagaattcaatgacaacaacttacattagtacagattttccacgcaggtcatcagtattttcatcaatccatgagggcaggtcactatactgtctaatgcctggatccaatgtctcaacatttggtgcatggaactttcctattctcgtctcgtacaaatttcgagcatccaacaaaacaagttgtttgctgtctgttaaagttggactatcatcatccaaactttgtcctagaaaagacaaaccaaattagcagatagccctagcaataacaagtttccattatcactaaattgcatcacattatatatttctaagagtttgaaggcataaagtctaagaaagtatattcaactcagaccctttagagaataacaaattatgaacagaaaaagagcataaaagaaaccaaaaaaggtggttaccaaccagctttttgaagagcggaatgaaactcagctgcagaaagatgcttccctgcatctgaaatttcaggtggtttgagctgaggattagagtgtaaggtaaccaattcctgttaacaacactcaaactgcatcaataaagggggtcgaatctcgaaagtgccatacacatttatatacatacaaggtttctgataattaatagtgttaaaagggtaaaattaccttaacaatgcgaattgagagtgaggtgaatccacattctttagcaaccttattgttcaatggacgaggacaagcagcaagcttgaaatcagtaccatggaatagactattggactcaacatcagaaatatgttttttcaaagagcacatttttccaccaacctaataagtcaaacaatcagaaaccctaaacaaacaagcaagcaaacaaaccaagagagaaagaatgtatagtacatacagtaacattgacgccgagtggagaaagtcggacacggccgagcaggtggagggaagtgcagttggagttgtagaaggcgagaaggtggtccaggtctgggatctgcgcatacttgtagtaaagtagaacgccatggtcttcttcttgttgtggttctggttcgactcttttgttgttggattccattgatgagagggagaggtggtcgtgagcttcaacttgaagttgcatgagcattaacaaaacacattatagccctaaactaaaccccaatctattcaattcaattcaattttgccatagattctaatatttttttttttttcattttttttcaaagggtaaacaatagatggagcatggttaattattatattaaattaatgaattgattgtttttttttttttttt

SEQ ID NO: 18438 - DNA, 2045 bp, Cannabis sativa
ttaattgatttgtttaatagttgaatcatgaagattctcttctctctctctctgctgattactgacccataaataagaaggaatttgttgttgtttaaaagaatctgataccttatattaaaaacagagttttaggggcaactagtctaaatttgaattacttgttcaaaatgaattgcatataaatgcatacatataaataattgaattcaatttggtttttgcagtatgtgatggaaccttctttccttcccttctcaaggaaatgtcagatgtagtggggttcttcaatgaacgtgctcagaaattgcttgagctacatctggcttctggtataagaaggtactatttctggtttaaaggcaagcttcaaggaaaccatgttgctttaactcaagaaggcaaggaacttgtcaattatgctcttatcaacgccattgcaatgcgtaaaatactaaagaaatacgataaggtaatgcaataattcaatactcttttgttttaggcttcttctctcttttgtttgatgtgttacttttcttttgagaacagattcattactcaaagcaaggacaggcttttaagtcacaagcccaaagtatgcacattgaaattcttcagagtccatggctttgtgaactaatggcttttcacatcaatttaagggaaaccaaggccaaatcaaagaccaaacttgcttttttcgagggatgttcccttgcattcaatgatgggaagccatctctcacttgtgaactctttgattctgtcaaaattgatattgatttaacttgttctatatgtttggtaagtcccccagattatttctcattagagacccttattacagatttcttgatatgttttcatttgttccaattccttttttgtgtttcataacaggacacagtttttgatccggttgctttgtcatgtgggcacatattctgctacatgtgttcttgctcagccgcatcagtaacgattgtagatggactcaaatccgcacagcctaaagcgaaatgccctctttgcagacaggtaagttatattttctagattgaaagaggtcagtttatgatataacaataagtgaacaaaaattatggcccaagtagagagttttcgagattgaaagaggtcagtttatgatatattgttttactcttttcagggacgagtgtatgaaggtgccgtacacttagaggagctatgtattttattaagccgaaagtatgtcttctgtcacaagccttttgtgttagattacttagtttgaagccatatttctgttttttttttcattctaattggtcctttattgaacagctgccatgaatactgggaggaacggcttcaaaccgaaagatctgagagggttcgacaaaccaaggagcactgggaatctcaatgtcgagctttcatgggtgtctaattggacccctctctctctatatatattcatttgatgctggcaattgtagaaagtgtttcacttaatttaaaacttgttattgttttggatgtttcgtgccttatacaggccttaatcttagaataaaatgcagtgtatgttgtagaacatagtgactctcgaggtttggtggagaaagactttagcaagggtagtgtacattttgttctaatatgctttattaaatttaatcatacgatttcatccatgtattcatgtgacccttctaacacgatgtcaaaatgatctttcaaaatgtttgtaatagtgtaagtgttcatgtcttcatgattagatgagtgccccattaaacctaaagctggtcaacagatagagttctttctatttttcttgaagtgattgtacaaggccacataaataatcaaagtccaaagatacatgaagttcgtgaagctcgtttttatttttcgtaatagccttttttataagctacgaattgtacatagaaatgttctaattttcattttatacattttttattttaatgtcaaaacgatattaagctatgttgatgtagtgttgcgttttattattgattaaatctcaagct

SEQ ID NO: 18439 - DNA, 10457 bp, Cannabis sativa
gacaacaatcttggaacagattgagaggtctctacttcctagttacaaaaaaagcactccttgccatggacaaaaacaagtttatttttggctggaagagcctcgctaagggtatgccacaacatcatctaattttggggtgaattgaaggcttccaaatcatctggggtgattgagaaaatgccattgcttcacctttcttgatcaacttatcttcttgttgattagggagccttcgtattttgctcatcctttctcccatattctctccaaatacttgtttaagtatactattccactcattctctgggttcgaggtcagggtccgagtctaagtacgggagcaggatctgggtttgagtttgggaaagggtacgggtctagggttaaggtccaagtcttggtctggatctgaatcttggtctaggttcgagttcgggtccaagatcttgagtcggggtttgggtcgaagatatatattttatataaaataaaaaattttaaaatgagatttacttataattatatttgtatgaggtgcaaataaattttttatttttactcaatttttcaattaagaagaaacgctccgtttttgctgtgaattcccaagcgatcaaaaaccagttgttttggttttgagcctccagactccggcgggcagtcctctttggttctggttcaggtccaggtcagttttcctccctctcatctcattctcattctcataatctcacccacaggttatggagaaaaacaaccaaaaacctccatgacattcttgtaatgaagaagtcttcgtactttgtaatagcacactcagataccctcaccgccgttacccactactcacccaccccctacccgtacttgattcttaaaccctaatttcatatactcttctctccactacaaaataacgtccctttcaactgtaacctacgttcaaatttctctctctcttttattttattttttttcttttaatgcctttgggaatcaatattcgattgcgtatcttagtttaggcttttataggaaatatgttttgactcatatcattattggcgtttcgcaggaatacatgttgtgattgtgttgtagaacccacgcaatggtaagttgggaaatggtttgttttcttgaaacctttatattattgtctgaaacactataatttggttttcccgaagtttgtgttttgaattttctttatctttcttttatgtgatggtcgtaattgtttttttttttttttctgtataaagtcacagtcagatattaggaagtggtttatgaagtcgcatgacaaggacaagggaaatggcgatgcggcagccaagccagcgaaatctgctcaacctccttctaaggcttctgagaaatcttctcaggttaaaacccagctagacaaggacaagcaggtgagttttgttgtttatcccatttgtgggtgtgaaggtttttgctgcattaccgtttattgttttgtaacttcgtatggaagtgttttagtttcctctggataatataagctagcttctttgggagatagttttggtgttgtatattctctattgtaagcaacgcagtctaaattaaaggggaatagactttttaatgttgatcctcttattattgggaagtgaaaatttgaattgcttggtctccaactgaagtgtcaaaatttacaattttattagtagccaaatcagttatgtgccagtggaattgtaatgaacatgttaacaagtttggtgggttcattagttcagttgacgacacttatgttgagtttgttaggagtgtagaatgtcacaatttagtcgaccagttactttttctttttttggtgaggaatgatttcccagtagtcagtttgtagtataatgtattaatattatttcaggtgccggtgagtgaagagaaagataatgcggggcggagaaagactagtaagtatttcgctgagaaagaaaaagagagagttgaggttccagccaaaagaaagtctcaaaatgatggcgatggctatgagaaaccctcgcctgcaaaaaaagttcataaaggcgatgacgacgatgacgacgactttgtattgcccgactctaagaaaaactcagttgatgccaccccaagaaagaaactaaagagtggatctggaaggggagctggacaaaagcctgtgaaaattgatgaaagcgatgatgacgatgatgtgaaagacgtactaccatcaaaatctggtggaagaggccgtggtgggagaggtgcctcggcaacatcatctggtggaaggggagctggacagaagcctgcaaatgttgttgaaagtgatggtgatgatgatgatattaaagatgtagtaaccccttctaaatctgccggaagaggccgtggtggaagaggtgcctctgcaacaccctctggtggaagaggcagaggtgctggacgaggtggctttatgaactttggagaaagaaaagatcctccaaacaaggggcaaaaggttaaatttgctttgtgaattgttgctgttaaaattgattcttctctaacattaaatcctattttctttatttcaggaagttcctgaaggtactccagattgtttaactggtttaacatttgtaattagtggcacacttgacaggtagatttttttttggaaatgtgacagactatatggcctttatgtgcattccgtagttttctgcttttttgtttaaaagtccgttatgcaaactgttatggggttgaagactagtttgtatttgtataaatatatatatttatatttataaatataacttgtgcacttgaatcagcactccttggcgctgtttcattttgtagaattcttgaaaataattatttctacagtagctgtattatctattaaactataacttatgcaggtcatttctatttttaaatggtatttcaaatagaatgttgctagatgggtgaaagtctttgctgttctatcatctgcagcttaattcatttttttgttctttctttctttagcttcagaatgtatttaagtttaacatctttctctgctaacagtttggaaagagaagaagcagaagacttgatcaaacgccatggtggccgtgttacaggatccgtcagcaagaaaacggtgaccttatttttcatttacatttgattgggtttgaattaaacagctaatgtttgattaacatagtatctctgcagaattatcttctatgtgatgaagatattgggggaagaaaatctgaaaaagctaaagagcttgggtttgttatcttgcattcatagacaacattatgcttttccatattcatagttatttgtatacctgctcatttctttttgcttgaccttatgtagtacggcatttctgactgaagatggattgtttgataagatacgtgcatcatataaatctaaggcacctcaacaagagtcaaagaaatctgtgaataatgctgccggtttgtcaccgaagaaaatcgtgcagaaaacagaaataaaaagtatgatcctttgtactcaatggcttataacacattttagttggtctcttcttgtcaccgatttaaagaaagtgaaggtatcgagatgtagctctctattgctggctagaactgattttgccattatttgtactatatctgagtgtcaattgtgctatttttaaattattttacttcaagataagaaagaccctcttgctttgttttctcttttgaaaaattgaatatagtacatacttttattgcttttgtttttgtcttcttgtcctatccactcatttatcatcacattttggattgcccttgtttgtgtgcgctcgtgcttgtttagggttgactgtcaattatttgatgtggtttttcaattgatcactgttatgttgaatttgagggataatatggactatggaggctttggactggcttttgtcttgcttcagttatatttgttagaaacttagttaaattgatgcatcatactttaggactcttataattttagaactttttattcctccagaagaatgccttagtacccctccatcagtaaatgtagccaagaaaggcttgacctcagctgtctccctcgataagaaaagagttcaaactactcagcattctgcattgacttggactgagaaatataagcccaagcttccaaatgacattattggaaatcagtcattggtatgttggttattgtactccaccaacatgatgtttgcatctaaaatattatataaattatatgttagcaaccatttcgcctttttttttaattatttttttaaaaatgttagcaactatttcttgctttacattttcatattaccatgtttgggagtgttgaaactaaaaagacgatgccttgcaggtcaaacaacttcatgagtggttgttacgttggcatgatcagtttcttgatactggaagtaagaaaaaggggaaaaaggcaagtgattctggtgcaaagaaggcagtactattaggtggaacgcctggcatagggaaaacaacatcagcaaagttggtcagtcagatgcttggcttccagatgattgaggtaacacctgttttattaaaatatgttggattgccgagggattataattttacctctatatatgattgactatgttggtctttaccttatgtatactacacaattcttgcttaggtaaatgctagcgacagtcgtgggaaagctgatgccaagattgaaaaagggattggtggaagcaatgctaattctataaaagagctcgtcagcaatgaggccttaagtgataacatggattggttgttttttttttttttttttaatatttttctcttgcgattttgtacgtactcaatttgagtttttagctgtagttaattagcaattgaaatgcaggtcaaagcatccgaaaactgtgctcattatggatgaagtggatggaatgtctgctggagatagggaattgctgatcttatttctagcatcaagatgtcaaagatccctattatctgtatatgtaatgaccgctacagtcagaaactgaaaagtcttgtgaactactgtcttcttctgagctttcgcaaacctactaaacaacaggttttgtgttaaattttacttttcatattataatatgcagggtaatgatatgtgcacccaaacattacacacagtagcgtgacaattttgttcaatcatattattcacatttatctaaactggaacccattgttaaaaaaaaatgccacgtcactaaatgtaatatttggttgcatattttaggtgcacatcattactctaaaaaatatttgtttttctctagtttcttgggtccttttcccacactcacttgtgcactgattggggtctctcatggctctaacctgttgtccgtgtttcttctgatttttgatgctccataattactttttaagtttgatagtagagcacccctcttgatggtaacatgaatatatatatatataaatatatatatatgtatcaatatgtatgtaatgtataaaaaataaagtgcatatgattagcaatattagagtgtgcttgtgtaatgtttataataataaggtaaaccccttctttctaaaatcaacttcgctgcttttcaaaatcagattccagaaagcaaattatttcttaatctggccaaagtagatttaccaatcatcaactgttagtctgttactgttctttctcagtctctaaaaacaatatcacactggccttgtatgtatggcaagtctgtatggccttgatatttccctcctttagttttagtgtttctcaactatataattttcgtaatatttatgttgctagtaaatactttaggctattgacagtgcacatggtttatgatagatggcaaagaggttaatgcaaattgcaaagactgaaggtcttcaggttaatgaggtaactgcttatcttcgtttatctttgaatttttttatggaatcaaattggaagtgtagtagcttttctaagataatgcaattgttcgtgttctgtttgaagtatacggctagttatggtgcaatacattcaatccaaaggattagactcttctctaagacagaacacctttcttttcccccccttgtttaccaaagttaatataccggcaactaatttaataatgaacttctgtattataaattgtatcattggaacctttgttcatcagttgtcaagttacatgccgtatggatatttaatggttctcattgtcaatttgtcatgtctgctctcgtttcctctctctcttcctctgggctcttattagacctaatttatctgcgcaagtagtgctctttctgatgatctataatgatccttggtatctaatttgtagattttgttaactttctttttttccttttcttctcatggtgtttaacatgatttattttcttatcttttaacgaagtagctttctcattgtttatttattcactttttccagattgctctagaggaacttgctgaacgagctaatggagacatgcgaatggcaataaatcagttgcattatatgagcctctcaatgtcagtaataaagtatgatgatgtgaggcaacgcttgcttatgagtgcaaaggacgaagatatttctccatttacagctgttgataagtatgattatcttaaattattaaatattgcataatgaataacgacctttgtattctaaagtgtcttgctatggagtcttagctgccctttatctttttctcccctcttccactgaccttatattagtttccattccatttcaagtttggttattgaacatgctttaggttaggtcttgcagctattcctaattcaacgcaaatttggattttaaactaaatgtgctgtgtggatgattttactactagtcaagtgaactttgagttcaaattattgaacacccccttaaaatgaaaagcatgaacttatcaacttctatttttcctgtcattttttgctttggtattagttgttgcttcttgtattataattgtggagaaaaatggaattttatataagatccaatgctgtactttattctcataagtatgttatccttgcaggttgtttaattttaattcaggaaagttgaggatggacgagaagatggattttagcatgagtgatcctgatctagttcctcttataattcaggtactttttgctagtacttatttttgtattgctgtcttatattttgtgccataagattatctactagctgtaaacaagctttttacctttttaaattacttggcaggaaaattatcttaattacaggccaagttctgttagtaaagataacgatggtataaagcgtatgaacttaattgctcgcgctgctgagtctattggtgatggagatattttcaatgtacagattagaaaatatcgtcaatggcagctatctcaaaattgcgctctttcatcctctataattccgtatgtttctgttcagctattggattggaagtaacttacttttttcttttgttaatttctaattcatgttcttgtttatattcttttttggttacaatcagttctgcttttttacatggacaaagggagacgtttgagcaggtaatgaatttacttgtaaatgattgctaatatggccacatcccttgaaattcatcccaaatgatcttttgcatgtagggggaaaggaacttcaacagatttggtggttggttgggaaagaactcaacacgaggaaaaaatctgagacttatggaggatttgcacgttcatattcttgcttctcgtgaatcgaattttggaaggtttactttttctctctttaaatttattgtttctctgcatttctcttttatacgcttagaatgcaatcgcaaacttggcctattatttttctcatgtcaaattgttattatccagggaaactgtgcgtattgaatgccttactctacttttgaaacgattgactgagccactcagggtgctgcctaaggtggggttcattttgctaataactctgccagtggcaaaagggttgaatgatttaaataatagttgcttgttcttcttttcactctcaactgattaacaggatgaagctgtccgggaagtagtggatttcatgaatacctactctattagtcaggaagactttgatactattgtcgagttatccaagtttaaggtacccttacctcaatcgaatagagctggttacttgcaaccttttctttaaatttataagctgttgtacatctgtattgaacagggatacccagatccactggaggggataccacctgcagttaaatcagctcttacaagagcatacaaagaaggaagcaagtcacggatggtacgagttgcagattttgtcacacttcctggaattaaaaaggcccccaaaaaacgggttgctgcaatgctggaaccatctgataatggggttggagaaatcaacgaagaagtgattgcagaaagtgatgaagaaaaatcttcagatacagaggacttgggtaagttttacgtttcaacaaaattagtgtcactttcaccttcattgacaggaatagcaattgtcgaaccaagcactaatgcctcattttcattcaaatgtagttccaatctcagaaagtgcttgaaacattagttgttacattagtcatttaacctagttattttgtctccccaagtgtttagttggagggttaatttaagttaaaaattcagatatctttgtatatctttgtacttgaggatgtatgaggctgagaagactgatttttctattgcaacatttcagatgattccgctgttggtgaaaagctgcagaaggagcttcaaagtttaaacaggaatggtatgtcaatactgtcttatgggttatggcacttgtactatcataactaatctttagtttgtgtcatttttattattgatattcttgatgactgaacactgggttctcaaatctttgaaggagtccaagtacaactggatttgaaagactcaggaaagtcaagtgccaagaaaacaccagcaagcagaggaaaaggtggttctggaaccgcagagaaaaaaggcgcacggggttcagggtctggtgccaagagaaagagatgaggagaaatgaagttcaagatacttctttgttttcacaatttggttttgtccatagaatctttctagttggcattgcccgcccctcggaattgatcatttttgttactaataggagggggacgttgacatcgcgaaatgttttcttgccctacctcggccttgccttgtttatgtagttatcggtgtatagttgattaatggaccaatttcttttttccctggctcagatttttggaatgcccccaccttatgatttaaaatcaatgaattgggagagaaatgggagtgaatcgatgctttaaaggcttactcgacaaagcaatataggattctaagataccatattaggttttaccaggagatcagtaacaaatcaggtgtaacttgtaagagcttttccataaccatattgtgagaactgaggaagttgatcaatttaagtttactcaagaaaggccaaagaaaaggattggtggtggctgataataaaatatgattctaagatttattctaaggggtaattgaattacattgaaatctgtcaatgccagtattcaatagatttattatatcatcatggcttttcctgtactccaaataactttattacatgaactactcaattttttgttacactatccagtccattataaaaaagaacagaataagaaactacttgagaaattgtgataacatctaccatcttattaaatatccctcaaacagcatagaaggacttattatggggaatgatgtagcattttttttttattaactcatacaatacaaacattagtaaaattaaactacaagaaactaaattagaataaaattcaattatttcaatattagctaaaacaatcaccgataacaatgtcaaaaacttattgcgaaaaatttaacacataagtatacgtatcgttttcaagtaataaactcacgtgagtaaggtcaatctcacaaaaattgtagctaaatagcaaataattaaatttttacttttatttggcaaacttataatttgaatgacgattgtaattggttaataaaaagaaagtaataaacaaagaggcaattaacaatgattagaaatataggacatttaatttcaattgcatcaacttcttatggcctaatacaaactagttacttcttcaattcaatgtaataacatattaacaattcaatttatatgttgtggtttcctaattctcatttgtcctcagtcacacttgagattgaaaagttcttatatggtgtgggaacttatgtatctattgatctggcaaccc

SEQ ID NO: 18440 - DNA, 5582 bp, Cannabis sativa
tctattacaacaatgtgtgaagttgttgtgatttcattagcttctttttctttgctgtgatcattgttaataccatgctcttcatgataatcatcctcttcatcatcactctcatcagtatcatcacaatctgcagttgaatcaccatcttttaccttttcaaattgcaaaaactgtgtctcatccatgctcatccagttcactaaacggttctctagaatttggtcattttggaccaagcattttgcttcttgattcttctctaaagagtcttcattttttatggtcttgtctgtatcagttccattactaactgcctctatcttctgctttttgaactttttgaagttggtttcccttggggtagcacaactgccctgaaatataatccaatgcaaaaacaccctttgatgaatagagactccaaataagtaaacaaaatattaaaataaataaataaagggtgattaattagcttacttgaagattagtgcaaagagagtactccttagttctttcctgtatttgagcttcaagaaaagatatcctcttcataagctctgcatttttctgtctttccttttgcaactcagctgaaatctgagctataacgttggcattttctcctttgacttcttgctctatagcacataatgctgatgtattgactaagctagcacaagattgaagctccaccattggatgaggcaccataaaatacaaacaaaattaattataaagaaacagaaaagagagcctttttctatatccactcaagcaagtaaggattgcccactaatcaaaaaacagaggctctcaagaataggatattgctaaaatggactgtctgatcagctacattacaagattgagaaaccatcattaaaggtgggaacttgaaaccagttcatgcaaagttgcttgaaagtagtgtgtataaaaagttgaatgagatatgatggagaagactataagattgatttaggtagagtggagtcaacctgtggtgttaaagaagaaaagtcaagaagaagaagaagcgaagtccctaggcaatgctgattttcttcagagattatggaatatggaaatgaagcctttctggttttactttcttctctggttcgttaaaggaagaaagagagagaaagagaggcatgcaagtccacgtgcacctctttctttctctgtctttggattctgagtctcaacattttcattttcctcacccaaatgaagaactttttcttttttcttttaataacattcgaaaatgactatgattcactgcaagatccaatatttgtagatagatgaataagtaaattatattagcatttcctttgttatgtttcttctgaaattttttttaggtccattgacacttagaaaaatgtgcctttaaggttttatcaatgtttgtgttaggaacacataaaattaaattttaaaacctcaaaattaattctttaacttgaaaagttcttagatcgatgctctcacgcatagtgtattttattttaaccattagtttttgaagtaaactcttaaaatatttgaatcccattatgttacatatgaaaatactaaaaggggtttgttcttttgattggtattaccaactcatcttctgataatatataaaaaaaaatcagcaacattgtcttcttatgtaagtggaaatgtcttaacccaaaattctactaagtgcgaggagcatcctaggcactgttgataatattagatattattaactgtgtgaaacctatatatataaatattttgtttaccaagttaaagaaacactgagagaatgtaatagcctcataggtcaacctaattttaccttagattccacttgagctgtttccatatagtaaattatgtttttattaaccaaaacatcattcatgggaacttggagtttgatggtttcctttaccccatttgtctgaattttgtcttcaagataagagtttggcatcttttaacttgattgaaattttgaattaaataaaaaagaaccccacaagagaagagtttgtagtatagtatagtatatagtccattgagttcaaaacaagattgcaccaattattaaataattgattcagaaatatatatatataaatcaaacttgagagaggtgttatgattactgcaaggggaaaaaaaaggttttatgtcttgagtggggagttcttcttgtgtcatgaatctgtagagtgaccacttttttcaaggtgaaaatgaataaagaaaatgtgtgcacacgtgcatataatataatatagtactaagtagtagtggggtacaatgcagaaccagagatacaacctcacgtggaatgggaacttaaatgcttgtctctttaatgcaatttgtgtcaggggaatatgaaactgaaaaccttggataccatccttcttctaatttttataaacaacatcttcttcacccatttgcccactctcttgcttttttcactattattacatattagcccattggaaaaagtatttgatatcactctaagcatggaggttttagtctttttacttgtaatgaggggtgccccaacaaaagctgtcttgtgagccaaggccttcaaaattaaagtcttcttgaggttctacaaagatttaactaataataataataataaggcggcaaagagtgacttataatgagtacaccacacccttcttgattcactgcctttctttctagggaaaattaatgtgttgctaaggaaaatataatatctttatattttatgaaagtggagagttgggatatcatgcaaatgtataactctttttccttttcctcttgtaaatcgtgtaaagaaaatttagggttgtttatatatatatatatatgtattttaaacattgttagctttaaactatgtgaaatttatggttttgtcatgaccaaggtgttaatttcagtgaacaaactgacgaaatggtttaagtttcagggagctttaatcttctggccctggccagaaagtagtaaatatagataattgattctccttcttgatattctacattgttgttattataacttaatatggctggattcattatcaacaaaggtgtttaaatttatgttgttctttagtgagtggaattattcaaataattaatacacatatgacatatgagattgcccaaatatggtgattactcaaaactgagagagacagagagagagagagcttgaaatgaaataataaaaattggtggccttgtttgggggtcacaaaaactcaggtgcagcaaacatgtcagacaagcaaggcagtcgaacaatagtcttgatttttttatttagttacagcaatagagaatctagaagggtaaaaaagaagggaaaaggaatctccaatgaatgcctttagtttgccaaatactttcctttaatgctgttgaattcacttatttatttaattctttttggactggtaatcacaataaatttagtaaacattttacaaatatggatattggtagagtatcccaaaaatacaaactaattcttctctcactcaatacatagtaattttaagatatccatccaggttaaggagcaagacaaatgatctcatgcataattcacaaagtgtaattgtcacacgtgtgcatataaactcaactttaatcaacaaaaggatctaagccaaaactctcaagctttgcatttccaaaactgctcattgtgaggttcaggatggcaaaaagggttcctaaagaaaatcatctcaattctcaataaatggtccaacctatatcacagaatccaacaacctatgttgaaaaaggtttcagctctgattcagcttggcacagccaaacccctcctagcagcttactttgaacatagcatgcatctctttgtgctcaaacactaactaatgagactaaaactgcttcgctgggtgcccacttctcatcattgcacaaaattccgagtagttaattctaccatcctgtttcgatagggtaccagtatcaaaacgacaacaagagaattgcatacagtttcaaaaagtagggagaaggaaaagaaaaaacttacattatcagtatcaacctctgagattatttctttgatattggcttcatcacctattccatgctctttcatggcattctctaattcatctcttgttatgaacctgtcatgaaaatgcaataatgagttagctttcacaactctttatgaagtgcaagtgttagtatagttcatatagccagcatcaacgtaaaaattgtactcacccactgttatccttatcgaaatactgaaatactttgtacagctgctcgtctctttctagtctgtgtctatgcattgtagcagatataaattcaatgtagtcaattgttccatttccatccacatcagcctgatatgaaaccatagttaattacaaaatgttccagttgcaaattgaaaggaaatgataattttcaacaataaagttaaagctcccaaaatgtcaattgcttacagcgtccataagttgcttgacttcagtctcagacagccttgaaccagtacgagccaaacccgatttcagttcttcatacgttattgtaccactcttatcagtatccatgttggtgaacaatgctttaaggcctttaatttcttcctcagacagattctcagcaattacctatagccaatttttcaaatgccaacgacaaatgttactaataggaaacaaaaataattctagacctgcccaagcttcaaagttaaagaataccatttcctgagataaaacctcaattagcccagctaatataaatgacttcaaatggaaaccttgaagattaaattaagtaaaaatagaggctttgaaataagggttacatatatgtacatcatacctttaaagcaagttgtttgagcttattcattgccctgaactgcttcattctggacagaaccgcactatctatagggtcatctgatgcttcaccctctctcagccaaggatgatctaaccattcagaaaagaatcattgttcactagttagaatataagcacataggacaattaaggtaggtgtaataggcacaaaataaccaaatgatatcaaatgtagacttatgtgcaattactattggataatataccaaataacaagagaaatagatttttatttttttaaaaaaaaaaaacaaggatgtctctttcctgtctcaagattgcttttcaaagcattttcaattttctttttttcttctttcgaaaaaaaaaagctttaaaaattgattatgacgtgaaggaaatatttaagcacatttccataaaaataaatgaaaatggttaaataccaagaacttgtaaagaagtaattctctttttggggtcttgggtcagcatccttttgattagatctttagcagtggtagagattgaaggccatggttgactttcaaaatcaatttccccttccaatatggcatcaaagattcccttttcagtttctggaatacaaaagagaggaatattattacactccacgttctaattgaagacgtcattaccaataaca

SEQ ID NO: 18441 - DNA, 7905 bp, Cannabis sativa
  modified_base (4958)..(4958): a, c, t, g, unknown or other
ttaggcaaaaattataattttattaatattaatacttatgccgttaaaaaaattatttatatctcttacaaactttaaattttaaatttacactaggtcttatcataaattattgcttgattataaaattgataatttgtgattaattttttgtgtgaccaacaataataatcctattattatcattttaaaaatggtaataactttttatttacttgcaatataatcgaataaatgagacctaaactaaaaaaatatcaaggtaatttacatgcaacaatatcatgttataaaataaatatttgcattatatagttatataattgttacttatttatacttgatctctcttacaaccaatcaatattcagccatggctcctttcaattctcaccataactcatttcttttcactacctttcttctcaccatactattgtattcaccatcatcattctcttcctttgcaaccaccaaaacttactccaatggaaatgagactgatagacaagccttactagccataaaagctcaaataatagatgacccttatggtgttatgaaatcatggaatgattcaatccatttctgcaattggattggtgtcatttgtggccaccttcatcaaagagtgaccactttaaacctcagttctcatgacttggttggttcactctcaccctccataggaaatctcacattcctttcaacaattgatcttactttcaaccattttcagaatcaaatcccacaacagcttggactcttattcaggctcaaacatttggacctttccaacaactcattttctggtgcaatcccagctaatctttcaggctgttctaagctcctaaggcttagattgggattcaacaacttaagtggaagaatcccaattgaacttggatcatttcaactacttgaaagagttcaacttcactacaacaatcttagtggaccattacctgactcattaggtaacctttcttctacaaaatctttgtcacttgctgtcaacaattttgatggaaaaataccagaatcttttgggaggttaaagaacttggaatttcttggacttggggttaaccgaatatccggtatgataccttcctctgtttacaatctttcatccatgacaaggtttactgtgccttataaccaattagaagggaatttgccttcagacttaggcttcactcttcctaatttgatagtctttaatgttggtcacaacttgtttagtggacaacttccatcatcattgtctaatgcttcaaatcttgttgaattggatactgaaggcagtaaattcactggaaaagttaccattgattttggcaactcacctaatctttggtggctagttctggcctctaattctcttgggacaggtgaagctgatgacttgaatttctttgagtctttagctaaatgtaaaaagttgggagtagttgatctaagtgacaatcaatttggagggatatttcctagttctatatacaaaatcccatcacttgttacattgagattagggagcaataaattgagtggtaacatcccaaaagggattggcagccttgttaacttgactgagctagttattgagaaaaataattttagtgggaaaattcctgcagatataggtgatctcaaaagactaagaagacttcatatgtctgaaaattcattttctggtcacataccatcatctctagctagcatttctcaattatactcactccatcttcaaaagaatcatttaacaggtcctatcccttctagccttggaagcctttcaactttgcaggagttagacctttctcataactatcttaatggctccatacctaaagaagttatgagtctttcttctttgacaatttcccttaatctagctcaaaatcaatttactagttctctcccttctgaagtgggaaagttacaaaatcttgggtactttgatgtatctgaaaataaactctctggcaaaattcctagtgagctaggaagttgtttgaaattagaacatcttcacatggagagtaatttatttgaaggaagtattccttcatcttttagctcattgagaggacttcaagacttggatctttcgcgcaacaacttgtctggcgaaattccaaactactttcaacacatgttgtttgaaaacttgaatctttctttcaaccgattccaaggacaggtaccatctaaaggggttttcaaaaatgcaagtggtatttccttagtaggaaatgaaaagctatgtggaggtataccagaattgcattttccagcttgcattgctcataagtctaagaatgagaatatatctcaaagacttaagtggattataccattgttttgtggactactgggatctgttttgatcatgtcaactctaattgtcttgaggttaaagaagctgaaaagggagccttcatctgcaccgaattcatcaactatagatcttttgttacatgtctcctatgcaagtcttctcaaagcaactgatgagttttcttctgccaatttgttaggcagtggtagctttggttctgtttataaagcaactcttcatccaaatgaattggttgttgcagtaaaggtacttcaactacacgaacgaggagcctcgaaaagcttcttggctgaatgtgaagccttgagaaacatcagacaccgaaatcttgtgaaattgttaacagtttgctcaagttctgattttcaaggcaatgaattcaaagctttagtctatgagtttatgcctaatggaagcttagagagttggttgcattcgttttcgagagaagatggagaattgaagatattaagtcttgttcaaagattaaacatagccattgatgtggcatctgctatggattacctccatcaccattgtcaacaaccaattgttcattgtgatttaaaaccaagtaacattcttcttgacaatgatatgattgctcatgttggtgattttgggttagcaaggttcattcaagaagccacagctcaacaaacaagttcatttgtattgaaaggaactattgggtatgctgcaccaggtaaaattaacataaatttttctttttttttatctaataaattctaaatttgttaaaaatgaaaacaacccttttaaccaatggaagttaagaacatgttagcatagtcactcacaacaattgttttctttttttggttataataaaaccttgcagaatatggaatgggaagtaaggtttcaacacatggtgatgtgtacagctatggaatactcttgctagagatttttacaggaaagagaccaactgatgaaatgtttaaagatgggttgagtcttcatgattatgttaagagggcattactaagaagacaaatctcagatgttttagatccaatatttgtggttggaggagaaagagaagaagaggcaccaaataacatagatatttctaataacaatgaagtgggttacagcaagaaagagcaaagagaggagtgtttaactgcaatcctaagagttggagttgcatgttctgtggaaacaccaagagaaagaatgaactttactgatgtcatcaaggaattgaagttggtcagaaaaattattggaaggttctcaagaaactaatctgtttttactagatagagctcctagcaccaagatatatatatataaatatatatagttgcttacatatatgaagatattgttcctcttttaggtagttcactctgttagttttaattattaatattagagtaattatactttattttaaaatataatatattttcgaatgaaataataattaaatataaattattatttttatatttagtaaataagtcagtaattacataatttaataatatttattatttgaaaatagtgatattttataattgcacccaatatctagagtgcatagtgtaattgagacatctcaattacctcaagttatataataatcgtataattatttgattaaataaatacgtcaaattttataactactctaaattacataatcaccttctaaccgcgccactgattagattaggaggtcacacaacaagccgtttcatgaaacaaagagataagagttaaatttttttttgaaagaaagataagagttaagtttatgtactagaaatagtctagtggttgcctcaagtatgatgatccatccactagctccacctatacatatctctactatataataagaatgaaaaatgatttgttttattgtttttgtactatattttttttataattgatttttttgtactattattgctatgtagtacattaagatactcaataccatactgatgtgatacacaatatttggttagcaattttttaaaccttttatcaaattaaaatttgtaagaactgatattgaaatgcaccaatgacagtatgctaccttttgtggtgcttgacacctttatgtgtgctccttaacattttcgttattaatgtgctcaataccatatcgatgtggtatccaatgatttgttaacagttttctaagatatttatcaaattaaaatttgtgggagatgatattaaaatacaccaataatagtatgctactttttgtggtgcttgacaccttaatgtgtctcttattaacatttttgttagaataattagtaatttttctcactgaactttcgacaatgctgattttggcccctaaaatatacggcttgttaagaattcccactgaactattacatttacataaatttagtccttctgttaggttctgtctaattattttgttcaaatgatgacatgtctttgtcaattagcaactttgccccctaaattttgacaactatcaaatcgtatcccctcaaaataaaaatgagaaagattcaacatttttttgcaaatttaatttaaatcttaaaaaaaaaaatcattttgaatnattaagaaaattaaaaaaaaaatatataattttaaaaccaattacgtgatataaaagattatttattttttattaaaaaattcatttacatattaaaataatatattaaaaatttaatttgtaaaaactaaattttaaaggaacaaacttgaatatattttatttttaccaaaaaaattagatttatttaattaaacaaaatattttttttagtttaatttataactttttcaaaaaaaaattatatttttattgaatttttaattattttctttatttgttaaggtatgattttataaatataaagaaattttattttttctttgaaaaatcttagttcatttaaattatttattagaatctcaataattttgttttgatttttcaaaatacgtgttgataaataaaataaaatttgaaaatattttttaagtaaaattaatatttttttattaatttaatatttttatccaattttttaataatttttattatttttacgaatatttgttatttacaatacacttatttttacttaaataaaaaatctaatgagacctttcattttttatttgggcttcccaaaattgtaaaccgtaagcacaaacctaacccgcctatgtctaaaatcgaccctgtcaatcttactcgtcctttgagtcttgtacccagagggtgtccttggccattgcataatttgcattggcatgctctctagccacttaaaaatatttctaagtggttttatatcaagggagtgagccgttcgtaggtgaggctcttcggtgaacaccaaaggtcaagcccatcaatggcatttctcactaagcaagaacctcaaccagtcatagcagatgagccaaaaggcttgataagtgagcgagtggggctagactcgacttaaggggtgggcgactagggcagttgcctaaagcccctttagccaagaaggcctctcctgttttttcttttcttattacgaatatatagttatatatttgtatatgacaacctaagtctaaaagctctccacaatatggattgaatttgacatttctcttcccaccaaatctaacaccgtttttcattttttttttcttctctaccctcgaaccttcaacctcgaagcagtgtcaagcactctaccagtctaccgtcaaggacggtagagagttgtaaatctaacaccgttaatatgtcagtttgccttctatttcaatcttaataaatggtttaagaaaatttagaatttttctttttttaatttactttatgaagaacaaaagaatagtgtcaagacaaacaacatcaagtgactgcatccccaagaaatatcagatcacaaatccctttctcaatgggaatggtgtcctgagactggacctgaagctgtagtctcttcttttcctttctaaaatattcaagttcactaactctactttcacttcttgaaagaccagctaatattacattgtatgttcctaaagaaggaataatcccatttctctgcatgttcttataaacttccagtcctttatcaaaattaccaacagagaaatagactcctataagagcagtgtaagttgcagtgcacttgtgatcaatgggcaataaactaaaaagtttagcagcacatttgggcttaccaccactcccaagcttatatataattaccgaagcaaggtatattccaatagaatatccagctttgatcatttcctgaacaacttttaccaccttgggtgacatttctgatcttatcaaacctcctatcaaagctagatatgagtttcttgtaatatttatacctcttttaacactgtactcaaaggccaacaaagcgccggcaggcctacaacgactggagtttacctcaatgatggttgagatgatttcagaatccaattgtgtgcttttatcatcaatttgaccaagtaagctatcaacagcaataagattttccttttccaatagagtaaatatgagccactcgtctatcgtagaattgatttcagcagctcttgttctaccaaaatctttactgactcgttcagtggaacaatgaggattcacttgcctaagtaggaggtcactctcgccggcaacttttaaagcttgtaatgcatcactgaaaacaggataacgaagaacaatatgattttctttcatgtattggaggatttgggacatgacccacgtttcccctgatttgcttaatttctcaaccagaatattgcatgcagctttgtcaggctgttccccagcttcttgcattttactaaaaatctcaagagcttctttgcaattacctgttgatcatcacaagttcaccaaaaattaacaagaattcaaaataacaaaggaaaaaaatgaaaataatgaccttagacactaggtgtacactggttattcgtaagtttgcaacacaaaagcaaattgtatagtatactgtttcagtgctcattaaaaatggggaaacacatgcaagtgtaaactttaacagttatacaaataacaagcttattatcctcaagttgttgatgggtagcaacaagtggaacataattcgcttttggtaaccgtacattatggggggtacaataaccatgttgaaagtaccttggaccagggattactgtacaagagatgattagtccttgtctatgactcggtttatatgccatcattgctctagaagtaccatacaagtactgcagttggacattctagagtccgtaagatatcgatcggtggtagttgatctacattagattaggttaaagaaaagcatactagctagcagattacaatcctcaacttgatcttcactcagcctattccagtatggacaatataccaatgaatttcataaaaggaattgccacacaccaatggttttgatacttttggttgggataaatcaactgagcatttatgaacacccccc

SEQ ID NO: 18442 - DNA, 6877 bp, Cannabis sativa
taaaattaaaattctatcaacaatattaatattatagtggaaaatttataagtatttattcaatatatacaaaattatgatttaaataagaaaaataatatatgaaaaaagcagcttaagataactaattacctttgatgaagtaattggtataagagtagctccaatgctacattttcaactgttgcccatcaggttgtgttagaactagaagtatactataggaaggggtaactgatgcattggagtataaatatttgactcctctaactacttgccaggggcaacggtcatgggtcaactttttgtttttctattttaaaataaaagtaaaaactgaatataaatatatgaattatgaatagcggtaagaaattttaaaaactatgcattagagagaaaatatgtaaaaactataagaggggtatttttagaacaataaagaatattagcatatttttaaatataatgtataaaaaaaacacacacacacaaagggagaggaagaaagagagagaatttttggattaggaagccactttataaaactcaaagttgcttgctaaaataccaatcctatttataaatatttaaccaatttatgagctataacattaaagttaccccttgttgtaaataatcacctaatcaagaacataaattccaagacaaactcagtagtatagtatcaactagtaattaactaaaatctctaacacctcaatcttaatcttttcatttgaatctctctccagatcgacacctaaacaaggattccaaagaagtgagaaaatcgagctaaaatactaactaactaactgtcaaaacaattaggatagttaactaaccaattaactaaaatctctaacaccactaacatgagagtatgacctaaagcttgataagttgacaataaaactttaattactagttaaaaaaaaatactataaaatttaccttaaaataaaataggggtaatattggaacatatcaataaatatataccaacctatattttttcaaactgggcaaaaaaaaatatggatcgtgttgtgctgtgccataaaaaatatagttcatgtcgtgtcgtgcaataattttataggatatgcccgatacaacttacaagttcggtaatttcgtgctcaaatttgtatcgtgctttatttaggtcaacttatttttcttaaatagatcaaaccattttcttttacgagctcaaatttgtgctccatattcttatatttttattacaattgatgagctaaatactaaaatacatgtgtattttatagttttaattaattttatatatttttttgagtaattgacagcgaaactatttatgttttaatttttatacacttaattttcttatttttttgtggcaaaatttctttatatttacttttctttctaaatttgaggcgtcagttaaatatcaccgttaaatatcaactggatgactattgtgtacacttgtatatacgtgaaagtaaaacttctaagttaatgcagtaataattcaattagtatttaacagtgatatccagttgatacctcaaatttgcaaagaaaggtaaagataaagagattttgataaaaaaaaataagagagttaagtgtataaaatcaaaatatagcagggtttcgcttttaccgtaaacccatcttttttaataatagttataaacatataaaaaataattataattattataatttgaatatttgatagataaatttttttatcattgttattattataataaaattattgaactttttaatgtgtcatgctttagaattaatttatccgtgcttaagtgataaatttttgggcttgttgtgtcgtgtttaagtatatattttttcgttacgtgcttaagtttatattttttcgtgccgcgttatgtcgtgtatcaatatatatttttttttttagaattgctaaaaggcactactcgtgccaactacactcattagtgtaattaaaattttaaaaaatattcgtgccgattggtgtgtcaaaaaaagtactgttttggtaaaagagtctaaagacgttttctttccgtagaaacgtgaagaaatcatcaatggaggttgtgtcgtcctcttctgagttttctctttcctctctcaaccttttccttctacgcccacttctcgctattgcatttgttctttccttgattattctcggtaagcaattattctgacttttccaactcaattcaactctctcccgatcaaaatcaaaatcaaaatcaaatttatatacatgtgaatttgcagggtggttcttggcatggaagctagttctggttcacgttccattggtacaagaaattttcggtctacgaaagaaaaccttcaaaccaaaacccaaaacaactggtcgcttttcaaagatttacagtaatattgagtctgaagcccttaaatcttcatcttcctaatcgtataataattatttcgttatattaattgcgaatttcattagcgttttatttcacatattcaataatggggtttggtcaagagcgacagaagtcaattgctcccatgaattgcagaatgttccatatgatccgaaaatatgtttctttggatgtgttggactaagcatcagcaggctctgacattgttgatactgacaatcaggtttgatttcactttaaaccatgggcttcactttccatgattcaaatttaattttgaccctgtaacccaatccaatgtatgtatttcattcttgtaatatatgtttctatctctctcttatttggatttagttacagagcttgaattgtatctctttctctgtcattagattcggtatgctagtcagttgtgtattatattatatacacaagtcaaatgggatggttgtgtaattgttgcaattgcagagtctttaaacttgaaagaaataaatttggagattattaggtgatgatatcatttattgagtctggaacttttatgcattctcattgtgaatttgtgaggtaggcagtatatattatacgatattgggccaaaaatattgtatcaattatcaaatcaatggcctgatacctttgctttcacatttgtatagtttaaacacatttaaattccattatgtataatctacctctgaaaatcccataaaatttagcttgatcacctcaaacccccaccaagaaaccttactagagatcactctgcagcttttgtataatttaagtatatacattgcatttgtatatgcctttaggcaaaccaatgttatcagagttcagtgtggacgatatcattctgattgatcggtggaaggttcttgtcatcatgagtgctaaggcagtcagctgaagggtgaatattcccgtatccaaagccttgagcagagttgcaataggtctcgactgtcccgtctttcttctctaagttaacattcctcaggactatgttgctgcatgggactgtatcgctgcaagcgaatttcatggcctttttgctcgttgtggttccacttatattcttgtagatgatcttgcttatgctcactgcagaagtctggcaaatcaagtaaataaaagacagctcgagtgttgttataagaatttgagtgcataatatggtaaaaacaagaaacttggaggagggaggggtccggggtacctacctggttttcgcaactttttggagaatcacagtagaactggtcaataataatggggttggctacatctatcatcttcacattttggaaacgtacagcttgaacataaccagaacctccctgcacataaaaccccacaaagaaaggaacaaacacatataagagattttgtttctctcaatttctttgagaactcataggtgttactgtaagagaatgtacctgccaagtcttgatcctgagaccattagtagtttccttgaggactgccgtatccaagaccactcgagtaactatgcctatggaattgtcctttccaagacttccaatgctttgtagtagagttttaatttgcaccaaaagaaaaaagaagttttagaattacttatttacactgtccacgatcatgactgatcattgttcttgatttttagaaatcaaatgtctaagaaggattgaaaaaagtgtaactcaagggttgatgataccttatcccatgtcctggtccacaatagattctcttcatcttgatgttggagctagcattgacaattgagacacaatcatcccctgaaatcaaattccaataaaaaccccgtagaaaacccacttaggatatgtgtaatgaaatttaattaaacctgttccgattctgctgtcttgtagaaccacattagttgattgagtgatatgtattccatcagtgttgggactgtctcctggagctgtaacttttacaccagtaattcgcacaacattggaccgagcaatgacaaaattcatctgttggctgttctgtatggtgagaccttttacctttataccattgcttgaatctatagttaatgcctgcaaaatcaaactctttatttttactgtttatcattgtatctacaattataactaagagaaagatccttaccgttggtgcccctttgcatggctgtaataaaaggaaagagagctcatgttagttcatgttcataaacttgtttacaaaagtaaataaggaaagattcagacatttgtcttgttccttttgcaggatgctgcccaccatttgctacccgagccatcaataactccctgcccttggaatatgactccctcaagtttggtgaaatcaagccattgccgtgcaaactttggattccagttctttggctcatctggtgccacaattgttccatcaatctgcagagtagtataacaagtcattgtcaccatcacaactgtgagaataagacacaggagaacggttgcaaagatttcatatcatagtctgttgagatcattacaggtggttttacctggataactaacttttctgcacatggcccttgaaatttcgttgcattgacaagataacggcgatcttgaggtactaaaagaaccgctctcgatgttgaacaggcggtatcccaagccttttggaaagcctaattcaatcacccaatatagaagaataaatataaatgattctttataatgaatagtgatactttttgacatcatccagtatcttctcaccagtcttcttagactacactacttaaagtgcatttggttatataaaacaaaatatgaaaagtacagttagttatacaatgtgttgttgttcatcatcacctgtgtatcatcagcaacgccgtctccaactgcgccaaagctatctacattcacaagaatcttgctaccacgaacgcttgtccacgaagggatatcaaagaaatcgaaatcgttttcttcctcaattatgtccaggctttctagctcatcatcaaacatggcaatattgtcattatgcagcagcatgttcccagcagcaactgttatcattaacaaagaaagaaaagaaagattaaataaattatccatgatgctttgttggtagattagttttgattattgatttgtataaaattccaataatgaaataacaatgtgctataatttatatacatatgatgcatattaattacttttggaaatgaagtgaattaaagacaatactatatggcacttggcttgaaagtaaacaaaaatattgttacatttttaacgtgtccatacttaaagtacaagatttttttcttcttttctttgagctgattgctttactcctcaactagctagtgaaaccaaacaaaaatgctcagcaatagttttaatggcatgggctgtatttctactatttcactttcctccaagagaaaccatgcaagttggtttggctctcattgggttgggtttaaacgtccttatcttcattacaagagaagtgacagcaatgtagacttggtaaactttcaaagtaaagcactggctttgcttgaattttatttttgagattacccatttaaagatatttgtttctagagggaagtctacagtctttgtactaaaaatggtctttgtttttcactctttttgaagtttttgttggaatggtttagtgtccacgtacaagttttgggttgagaatagccaaaacttgaccatgcatttgtggaactgttggagctcattttcttttagtttgttctggttttatgaatatgcatttcttagttggtagtgtaggatttgcaatcctaattctacgatcttatctctgctgacattcgaaaacaaatatggcagaagtgttaacaaaaccagaaaactaaatcgagagcaatagctctcttaacacaaggaataattgaatgctttctttcattgatctgaatgtgtattataagacttagttgtattgtacgagaggcaacctatttatagacttgtaggttgattacaatgaataggacaagacagttaagttagttggaataacttacttaactgtgaaaacagtaaaagacaaatacaacctattatacaatgtgaagtcacactagattttacaattctccaccttgacttcaattgtattttaatttaacacatttgaaagcaaagcagattcctaaaaaacatcagttagaaatctgtaacagttcgagacaatgctgaaacttgtctctagatagggctttggtgagcatgtctgatgggttatctttggtggagactttcaaaagtttaatttttccatatgatatagtgtttcgaatgaagtgatacctcacatctatatgtttggttcgttcatgaaacacttggttcttgctgagatgaagagcactctggctatcacagaagatt

SEQ ID NO: 18443 - DNA, 2732 bp, Cannabis sativa
aagagtgaaaacaggatttcaattagttttttgaaaagttttagtatgtttatactagacttagtttcctattctatatagttcctgactcattctaaaatgtacatgttcttccactttctgcctatactactctactcgcctaactgtataaaatcttcctgactcattctaaaatgtatacatgttcttccactttctgcctctactctactcgcttctctttgaaccccaatctacagcagtgatgcataacaaaatcttaattggagatccacattttttcgagtgactgaatcctgatatacctcagccacgcatgatgatcatcatcaggcctcagaccctcatttcaaaagcttcattacattcttccagaataaaaaataaataatcctatatacaacagtacaaattatcccccaagggcaactatcaacaagaaataatccccaaaagcaattaccacaatgtcacagcaacttttaatgcaaagttcatcacactacatagtctcactccaaaaaatcagtttccattcttgttgcagactaaaaataaataaataaattttcttatagggcaactacaaataactttaagaacaatcataaccccattccaatggcataacaagcaacattacatgatacattatgaattatgaagactcaatttagacaacaaatgagaagaaaagactaaatgaaattattattcaacaacaaagctaacctggagagaaagtactgcacgatcggtgaattgctttacagaatcaggagcccttacggggagagttttagcaaccctttctaattcttcttgttgtctcttcgcagtcaccctatttggtccactgtagtgatcaacaatctccttcaacaatggcactgtctccattgtctctttcatgatttcctaataaaatgaagaattaaggtcagaaaagacatggacaaaacaacttaattcttaaaactatgtgtccaccatgagtccatgacaaaaactataaaagagaccaaggtgccattgcatctttattctttaccaaaagccaatcatgtaaaaaattaaacatcaactcttacctcccactcttcttggctttcaatgccctcataagccatcaagaatggcttcgccttctcgagtgcatctcgaagagaaataggtggcttctcgtctatatctgggttattctcaaaatctcccatcatatattccggttcaaactctatctgcaatccaaaaaaacaaatacaagcaaagcccaaaactgagtaaattgtaataaaccctgttaaacaaaaaacaaaaaaaaaaaatcaagttaccaagaaatcatcaaatgacccaagaattgccaagtaatcctaaaccttattaaacagttcagttcaacaatcttacaattataacatggttggttataccctaaactacaaaaaaagatttaatttcaacagaggtaattgctgttcttatcacttaacgaaactaaacaaatccagcaacaccaccaaatacaaaatgttagtcatctcttatctacctgaaaaaccaaataaagcaaatgcatcatcatttggcccaaattcttaccttataattcacatctagagcatccagataggcgtcatccgttggagaaggcagtaccctatcacccatctcttcaaacccttcagtaaatttggtcataacttcagttccaaacttctcggccaacttctcttgcattttctccgcttcaacactgtcaccgaacaacgctgtctcattctcatcttccgaatcctgatacctacccctccctcttccagtccctcttccccggccacggccacggccgcgcccgcctcttcctctcatccctctacctccacctcttccaccttctccaacatcagcaccgtccgaatcccgccccaatacccccaatgcatgctgccgcgcctcttccggactcattttcggcactgctcgcctttcagttgccggaccctgagcctttgggggccgaatatgccggttcacttccttagtttggatctctggacccggtggttgcctcctgatttgtcccctacctgcaccactcaacatcgacgcaatattctccgggagacgactctttccagcgtccgaaacgccgccatctacaacacttgattgcagagaatccctaacctcttcccttctgaagaaaatgggtttcttcggttcagaatcactgaactcctccggtggcctctgttcggcgccaggtgggctcggaactgaatcggagggtgctccccgaccagcagctgaaggaggcttgaacgaggaaacgaaagaggtataggaggggagaattggggaagaagcgaggggtttaccacggccacgtcctaaagaggacggagattcgtcggggtcgggtttgacggcatcgggctgtggctgacccggagctcgcggtgcgttaaagtcaaagcgaggaatggtacctcggcctcgtcctcggccatctccaccgccggcggaggaagtagagtaggggagtagggtttgtttgggtgttgcattggataggttaatggagtaagggaggtttcttccgatagtagagcttcgtctcattttggcattggaaaaccagtaaaaccactatgagttgggttttaggggttttcttcaatgtgtttttgattgagaaagaggagacacagttttctaaattt

SEQ ID NO: 18444 - DNA, 14445 bp, Cannabis sativa
ggtattttaggtacaatacatataaaaagaggtatatttcaattaaatataaaattaaagataaatttgattaataaaagtggtatttttcaacttaccccatcaattttgtgttggagcccaatggaagcttcacttagtggtcttgcgatttaggttgtaattggagcatgggtaagattatgatatggtttgatggtggttggtcatttgggttgtgatattagttgtgacttaagttttgttttgaaaatcaatagaagcttcacgtgttggccagtctcgaatattaacagagaggatgacttagagaaagaggaaagagactaagattgtaatatggtttaataatgatttagagatgccatatatgttgcaagttcaattgtgattttgaaagaaaccaagctttattttctatggtggagactgaataagaggaagaagaagagctagcaccaaaagatgtgagataatagattaaagtgaaaatgaattaaaaaaatatataaatttgatgaaaaataataaaagataaaatagaaaaataaaaaaaaaatgaaaaaaaaaatcgtgaaagtgaattagtttcatttgaattatgaggaaatacttaagcaataaaaaaggtgagatgttggtttttataaacgactattgactaactaaatagtaaagaaaaaaaaaacatacaaaaagtccaataaaactacgatgaaaaaaattgctaatttataaaaaaaaaaaatactaatacgacaaattattcaatcaaactaataatttaaattggagaaattctagtaggccaccaaggatgtaggagaggaacggctcttataatcttccattcatgtaaaaagaagtaggaaacattcgaaatatgacaaagtgttttaatacgaaagtaattcctataaagaattcgacactgaaaaatctcaatctcaattttatcattgaaatgtgaatagaagaacacatcttcatcatcgggatggaaagcgagtatatcgcaaccgaacttccaaataattctattatgaaattggacaactttccaagaaatcattttatcatctctatcctcatgatcaaccaattcccacacaattaaaccatacaattgttttttctcatcaaagcacttagagtgtgccactcgcactctccctcgaaccaaccctattatcattggattttgaaatctcgggtccttagaaggcaaactaatcatacgacattgttgcgaataaatattcaatgcaagaataccttgaatttccaatgttccatattggaaatatatagttccgttacttccaactacagaactgtgatgataccatacattcacaggaatttgaaatttgatagttgaatgattccattgttcagtctcagaagaaaaaatacttaatcgaaaatcatgaaatattattgatttgagtatgggattttctatatcgacactaattttaaccactttatacttaattgatgtcacaatattactactagtattaacatcacctcttaataccactaaagcatatctacgacatatttgggaagttggtgtctctggaagcttaatatactcctttgtaaaagggttgcaaatatacaaacttctttccttacaaagttcaattagtaacaagtcttcgaaccacgtccataaaacacaaaatttattatcattccaaggtaaaaactctaatgtcttttcttgtccgtatccaaaaacttttgatctttcagagaaaaattcatatgaaaaagcagaagaacctatcgtataatgaatatctgtaattagtagagtaaaaggacaaggagatgacgaagacttattatcaagtcttttttgacggtgatattgattaaatttgtgactaaaataagtctttgaactacgaattgtcgagaaccatcgcttggaaacgcaagcacactgtactatggatctaaaatcaggaagtctgagaagtatttccaatagtaaatcatcactaatagttgacattaaggagctcattattctctttatctcttctaatcattccctttctcgctcatatacaatatagattttttttggtgaatctcatatacaatatcgatagttatatattttaatactctacgtttgtttttgaaattaatatctgacgttttaaaatagatattgttattttttgaaaaaaaaaatcagttacaaacttaaacagaaacgccaaaaaaataataataataataataataataatcagacgagactaaacataagaaaagatcctaagcaccaaattctcggcataggcttttttataggggaaatttcataaaccatgcatttggacaaggataaataataaaattatttggacaaattatctgattgtgtatgaaaatatttggttaaattcaaatagtgtgtttggaaaataatttatagggcttatttatacagtaggttcttgatattgtttgcatgtttattttaaacaaattaaattttaagcagctttttaaagttgttaaaaaaaattactcttaccgtagttcgtggccataaataaattatgtttaaagttataaaaataaaaaagtaccataaataaattatgtttaaaaataattaaaatttaattgtggtttttattcttacacttcaaaaataatttttttaaactatctaaaaactaaacaataaatttgaaaaaaaaattaaaaatagtatgtcgaataatttttatcctttattttaaaatttattatctttacttctttttttttatttattctaccaattttactcctatcaatttacaataatttttatttttctctaataataattttgcccaaactaaaaaaaaaaaaaaagtattcttcaacttcttcccatatttattaccatttgtatagttgggggagaaaaattcgaggcaaaattgtttaatttaaaacttttgaggattatattacaaaagattgtagaatgcaaggactaaaatgcgaatccctcaaaaaaaaaaaaagaaaaagaaaaaggactaaaatgcgaaataccttttaataatcataaaataaaaaactcctttggtttggtttgtttcaatcagttcctccttgctcaagcaaagcacaaagccccagccccaaactcggtaacctaactcactgaaaatcgccatggaaggacaggagggaactcagcaagctcacctcgttctagccaacaagctatttcttctctctcactctgatgtacaagacatcgagaaggttcgcctaagggacgaggtcttgacctccgtcaaagctgatggtaactcatcatttccaatgattctctgcttattgttgtttcttattcttcaatttcatgtaaatgtctctgtgggtcgataatgtaggtatggctccgttgtacgaaaccctagttgcggattcggtgctggaattggatcaggctctattggatttgatgcgcgcaaagatcgaggaggagcttaagaagcttgacgagaagtgagttggcgtctttttttttctttaagacattgcttgacgagaagattgggaatagaacttcaattttaaatttttaggttttgaaattttgtggatggcttttgaaatttacttatttgcgtttgttggcattgattttgagatcccgagctattaaaaaggtttaacatttaattttcttcttctataaatctgaatgtggttcttctatgctagtactaattgtttaatttgatagttggggaagggctcccaaaattccttgcttacatgcttaaagatgttttcttaactggccaattcgaccctggagtttcactatcataagagcaaaagcgatcttagatttgcgataagcttaggaagttgttaaacaaggggcattaagtattctattggccgtcacttactattatatatctgcctatactgtgataattggtgttcggtttcaagttttaatagaaatgatttggtgggcacgtttaagtggattctgtgtctgctttaataggttttagagtggtttcgggcctctggttaagaaagagaatgtagactagagtagttaaaaagtatcagtaatcagtagcatagcatctatgtaaatgtgtgcaatgattttttttttcttttttgttgaaattctcccaaactcgcatatgtagctgacccgactttgcaatggtttcttaaccaatgttttgcctagtgctctaatgttgtagttatgtacccaagaggagtagttgaaatggttagacatgtggtttgcttacagaaggtttgaggtttgagtccctcctaggcacctttgctatagttttctggtccccaaatattgcagggttaggtggggatcccagttttataaaaaatattgttggagttatgtactttgttttgaaaacacgagtggtcatgattcacgattatcgcatgataggaatagcgagtgcgctcaaagtaatttctagtgtattagcattgttcttaaatttagatcaattttatatctattgtttgcttgcatggtatatataatagtattccattgttctcaatctcaaatcattttcatgcattggttgcgtctagaattgctgatgcggaagagaacttgggtgaaagtgaagttagagaagctcatttagccaaatcgttgttctttatccaagttggtgacaaggtatattggttatataattttttttttttaaaaggtgtatcaatctcattatgctgtcttgtgtcttattctgcataaatttactctcttgtgaacccaggaaaaagcattagaacaactcaaggtgacagaaagcaaaactgttgcagttggacaaaagatggacttagtttttcatactttgcagctcggtttcttttacatggattttgacctcatttctaaaagtatagataaggcaaagaagtaagtggagacgtgaattatcacaatcctgtgtttatttttagtgactctttgttaatttaacatttgctgcatgatgacagcttgtttgaagagggaggtgattgggagaggaagaatcgattgaaggtgtatgaaggcctgttttatatgtctactcggaattttaagaaggcagctactctgttcttggattccatttcaacattcactacttatgaaattttcccatacgacactttcatattttacaccgtccttacaagtatcatatcattggatagagtttctctaaaacaaaaggtattcacaatctttttgacctttatttatttttattaagtaattggcacatgctagctactgttactaactctatttgaaaatatgataggtggtagatgcaccagagatactgacagtgattgggaagatcccatatctttctgatttcttgaactccctatacgattgtcaatacaaatcgtttttcacagcattcggtaagtgtgtgtgaatctacattacttattttctagtaatctgaaaaaaggctagaaatattgattttgtcagtaaacttcatctattttgtagtcttactcagctgagcttttgtttgtgatttttatcccattttattggtctatggatgatgttgcgacataagttatatactaaattattccttgttacttcagccggtctgacagaacaaattaaattggaccgctaccttcatccccacttccggtattacatgcgggaagtcagaaccgtcgtttattctcagtttttggaatcgtacaagagtgtcaccattgaagcaatggcaaaggcttttggtgttacagtagaattcattgatgtgtaagttttctttacattactttttgtttataaggctgttgtagtgcaaatgttttcgggttgaaccatgaattaatatataaactttcgacggttacagggagctgtctcgattcatcgcagcaggaaagctacactgcaagatcgacaaagttgccggtgttcttgaaactaaccggcctgatgcaaagaacgctttgtaccaagcaaccatcaagcagggagacttcttgttgaaccggatccagaaactatcacgagtgatagatttgtaggtagagagagtcatcatcacatgagttcttattcaatgataatggaatgttggagtgtcatttccttttcatgcttctcatcaattaaaaatatccgtttatattgttttacaaggatattgttttctcagaatttttttggggtagtgagggtggggtttggttggaaaaggcccaaaatgttcaccatttatggccaccttctttaaatgccaaatttctttccaagtttgtcctacttctcactaccctctcttacatctatctaaagatttgatgcgtatctagtagatcatttccatttcaggctttatttatttgcttttctttttcttttcatgataaaagaaagaacaatccaagcttagttaaggacaatgctatagtattggtgaccccactttcaacaagaatggaaactttgctttgtttactttcaatttgtatgtttgggcaattttggcttacttgcatgagacatcctatctaggaaattagatggtatacctcttttaagttgtgtttaatatttacctcctctttttatagttttcatttttacctttttttttaacaactctaccaattatgcccctatcatctaacgatactctaactcttcattcaactctaacagtaacttgtgtagttgtgagggtataatcggtaatggagttataaaagtgagcacatttcaattgaatttaaaataaaattatttttgttaactaagaaaaaaaataggtatatttcaacttactcccactctatccctatagctttggcccttactatgagaattgagtaaggcgtattagaaaaagaggaacctaagcacattaaatagtaatacgacttgagatatgttattattgtgaacttataactgtattgatgtaatgttttcaaattttagtttacttattaataaaatattatttaaattatgcaaaattgaaaactttggtataacttttaggcatctatcaaatgtaagtacatttttctttttaataaatataattattgggctagtatgtagttgtcacaccaaaatatcttactggttggtatgcaaattgaggcactaaacagcactttatatatttcttccaaaaaaaaattgcaatactttttatacataatttttataatggtatttattataattataattgatttctttttttaaattggaaaacattttgttgtacgaaaaaatatatatttttttaacatgtattataaattaggagaattactttatatattatttttcttaaaaaaatttacagtttgagttgtttcggtggtttctccggtttttatatgtgttgctatacggatttcgattgcgatttaagttgctcggtttattgctatgtgaaattttgtgtgaaattctgtaaaattctatattaatacaaaaaaaaaaaaaaactaatttaaaatataaaaataaaaaaacctctaaaaatttcttcaacaaaaaaaaaaaaaaatattcgaaattagaggcatgttgtgactacactacatatacccacccaccccaaaatcataatacataggtataatcaatgtgaaacaccaatgttggtaaagaaaaagtaaaagataaaaaaaaaaaaaaagaaattaaagaaaaagaaaaagaaaaagaagagaatataatttttctttagtgagtcaaaaaataagtaaataaaaaaagaaaaattgtcaatctccattcaactcactgaagttagtagaatctaatctaatctagtaaactagtgttgtagtagtttgagtttaaggaggttttaaagccttttgtcgatacatacagtaatatacacattacaagccttacaagccacgcatttaaacacaagaaagttccacactttggctatgctatcctatgccccatcatcaccatgggacactactctgttctgtagtagtattctctctacactcctatgcacgacacaacacaacaacctctctctctctctctctccttcttcctgtggctgtcattttcattgttgcctctgcctctgatattactgctttcgattctttgcttctcttcttcaattcaacaccacattttctttcttcccacatatccattccctcctttctctgtcgttttcccccacttctctatgtcttcaggttgtacctttttaatatcaatacgacaataacgaactccaacgacgtaccccaaatgcttcccctccccattctcgatttcaaggattttcaggacaacctcgtcacccgtttcaggccttggcaacgctcctttcagttttggattcgagccgttgatatctatactggctacaaggtctctctatctctgtgtgtatttttgattgcgtactctgttgttttggatttgtggtagtttatggattggtgggttttgttttgtttcgtttgtgtaggtttttcaggttcgagtgagtttggttaaagatgcaagaaagcagcatgaaatgtgggagaggcagcatgaatttgcggcggagaagatatattctatgtgtgctgacctcggcggcttctttctcaaagtactttgcttattttcctttatgctctgcatctgaattttaattcaatggaaagggaattgtgaatttgaaatgggttttgatccatttccttgcatgtgtttttgtttttattgtgtcagctttgattattttagtcgagtaaaatgtatcaaattataaaatggggatctcaatttgttgacttggtgtatggagtatgatggaaatggtcaataaactttgtagtatttgttttagaaattatgctttataatcaccttgccttacctgttctgtttttaatctgtttcttttagacatttcttacctggtttgaatgaagagttgtgaagttttttcattttttatttggggttttggtttttatagtttttgagcttgatatcaacatgtcttggggcggggtttaaattaggttgctcaaattgttgggaaacccgacttggctccagctgcgtgggtgagaaggctagttacactgtgtgatcaagctcctgcaacttcatttgatgtagtcagacatgagctggagaaggagtttggtcgaaatgtttgggatctgtttgaaacatttgacgagtaccctcttggttcagcctcaattgcacaggtatttggaccgaatttgaaaatagattcttttttcatgatatttgtgcttactttacattttatggtcaaattaggtccaccgagcaagattgaaaggcgataaaagcgatgttgttgtcaaggtgaggagagcaggtctggtgtcaggatagtatgctctaagtgtccataaaattctaaaatctctctggtctataataggtgcaacaccctggagttcaggacctgatgatgacagatatccataacttacaagcttttgcattatatatgcaaaaaacagatatcaaatttgatctcttttctgtgaccaaggaaatggagaaacaggtatcacattgtttcctttctgacttgttttccattgagattaaatgtgaaatatgaatcagatcatgaatgttggattgtaatttttctgtacttatgtcatgtaagattggatacgaatttgacttcgtgagggaggctaatgctatggaaaaaattggaaggtttctgcgtgaaagcaacaaaaagactcctgttgtggtgcctagagtagtgaaagacatggttactaggtttgtaatgcctcatcccaatctatctctcggttaggattttctaatggggaataagatgatatatcaatttatctcattcatacatagatattagatatatgtggtaaatggctaactgtctttccaggaaaatatgcactggggacctggggtgtttatttatttgataattttttttattaatcgttagttttataaatttctctcttagattctcaacactgtatgtggttttgcagaaggtgtagttggtaaatatgtattttatttctcataacatgtttctgcttttgtattagtcattctaataaaacaaaacattctagccactctgcctatatgattctcaccatatattgggctatgctataccttttgtgcaaagacaaattaatcttatgactctcgttaactgaaaagctggatgtttttctttttttcttctttgcccctttcttttcgtgattattattttgtccatgttacacagtttcattgtttgttttgaagtatatgtgagaaaaacatttcagtgatatcctctctctctctctctcttctttgggtttgagcaggacagttttagtcatggaatatatagacggagtcccaatcctcaatcttggtgatgaaatagcaaaaagaggaataaatcctgatggtaacgttgcagcagcagcaaagcagtaaggctctgatcttcattgagcattggtgtggtttttgttttattggctcttcctataggcttgcgaatttctatttacttgcgtttaatctgtctatgcctttctattacttgaaggtttgaagccagataatgagggatccatctttcattcttttgtttagatgccattttgtttttcttcctccctagcttattgctgagtgtgcttttctccatttgaagggcctatttcctcaatctattacttattccttttactcaattatcattgaatagtgctgaacataccttagattgagcaatatggttttgatgtaacaagtttattcctataagcattttgttttaggcttagatcaaacagaggagaacaaatttcttccatcagtctaatagttatgcacagacagagcttattattttttttttgaaagtgcaggaaaattctcaagagtttaacactagcatatggacaaatgattctgaagagcggtttcttccatgcagatcctcaccctggaaatatcttgatatgcaaaggttcagaggcgagtgaaaaccccatttatgctcccataacacttcattccttttctaatctagttgtgacatcagagattttgtattttgttactactaccattaacttgaacttttcagttagtaatttgctttgtagagatattgataatagggaaatttgaaaatgtgtgcgaaagataattagattctggtgctacttatacagtttgtgcataagatcaatttatgtactaacatcagataatttttcatatcaggttgccctactagactatgggcaagtaaaggatctcccagatgcgttgaggtttggatatgctaatcttgttcttgccatagcagataatgaccctaaaagggcggcagaaagctacaggtagcattctgtaaacaaattggttcatatgtctcttgtcaagtaaccaaaagtataccatatgagaatagataatagggaacaatgagctaaaaaccaacagagaagaaaatgacactcatgatctctctgcagatattctgcatttaacattgaatttaattttgtaacttctttaataattaatagataggttgaccaatgtgtttaaccgagtttttttttttgaaaaaaaaataatagtgtaaatataaagggctatttttcttttttgatttctcttgtatttcatacctttctgagatgcgattggcttgacatatatcatagggaacttggcataggcaccttaagcaaatgtgagaacgagcagcaggaaatgttcaggctggcagagacaatgtttgacacaaaattaccccctggagtgacaatgctgcaacctttctctgaggattcttctattaaaaaaattgctgttcaggtgggccttcgcatcccaagcatacttagtgatttacttacgtatttccaggaccttagtatctgttttatcagcttatcagctaggatatatatattgcattgctcttatttcttgttctaatcttcttatagaagagtttcttttcgtttttctgttaaacaaagtaggtgcaccattcttctatactttctcagaacagcacttgatggaattcaatccttttgaaaggcttagtgcaaaagttactataatgataaatgagtaacaaaaaatgcataaaaacataaatttgttctcaaggattttgagacatgagttgttgtggtgttacctatgaacgatggatatgtttattgtttctttaaaacgatgatgtttccagggtttacctagtaaatatttgtttcgaattctgtttaatattatgagaagaaaatagtatgttaattgaatttaagttgatgatggatgaagaaacaataaacagcagtgaaagttttactcttttcaactacaatctaattttctttatgtgctgtgcttgtggtagtcttttccagaggagctgttttcggtgttaaggacggtgcatctattgagaggacttagtgttggtctgggaattaactactcatgtgccgaacagtggagacccatcgcagaagaagctttgtaccaagctggaagattgaaaggtgacccttttaatctcatgaactgaataaaatctaggcaatttacaatcacatggcaataatgtatctatatctatctattcacatgctatatcatgtataaattaaatcttgatcattttcatttcttaccaagttcttttttcttatttatattcataaaaaattaagatttaatttctcaaacagaatctgagaacacactatgttctttctttcttttttttcttcttctatgcttctcatgatgattttggaaattggaatatttcagccgaggatatagaacgtagatctcgtcgccgcggtttactaagaagattattttggagagactgattggcttcatgaaaaacttcttcttttccttattttcatattacttatataagaagagtaggaaataccatttaattgctgcatatacttgtattcagaaaccacagcaagctcttaagatttaattaagtgatgccttttgtttaagacactctatagagttcgtggacaaggttcagagcagagccctttaatttggctggtataaaatataatttattgtaatttttacttctatcttcatattgatattgttattgagctattgtttattattgtttatcattagtgatatcttatttctggcttagtcaaatagaccatcaaagagaactgttaagaataatctgttaagaataatgtgtaaagggtacgttgcacctccgatattgcagctgcatccaatcattgtcaatgattggttgtcctctctttgtattccagaatattcttttgttaccaaaatttgttatgccttgatttttgttatttccaagtggcattgcctaagtggccattcatgtatttacttttgctatataatgaacattcaacatttagtctggttgagttgataattttattttgtctaaattttctatcttggtatcatagcaaaataccagatctccaccatgttattggacaatctcaaacttctctcactccgttacctgaaaatcaaaaccctactataaataatttatcagaatgatagagttgaactgtaaataatttattttctattttataaaatatatttgtattttttttttattattttataaaaatactattatttgtgtgatggctaatattgaataaattaaccacctatataaaatagaaaatattagttttgatacaattacaaatagtaaaagaaatcctttatttataccttacataacatcacaatagtttctaaaaaaaatacaaaattgtgaaaaaaataatatagaaagaaatgtttttaacgtgacacctcaccttaatatatagatagattcttataaatggacttttcaaatgcattttaacaaatgtgtataagatctttatttttcttggtaaggtgaaatcttatcctaagatgcaacttgcaccaaatttagtgagactcttacttgtccttggagtggattaatgctctaaaaaattaggagatttgacaaatttgtggtgaatattttgattttaatataatttgatattctgcaactgctattactacaagtgttaatgttgtgaagtcaaattaagtaataaatactatgagatttatccaaaaataaaagacttgtatgcatatatttcgttgatttgtgagatttatattacacttataaattataattgtcaagtcataatttcacagagttactaaattttagtaaataaataaatagtgattctacaatgcatcccctt

SEQ ID NO: 18445 - DNA, 8389 bp, Cannabis sativa
caacaaaattttgaaaaaaaaaaaaaaattttatttaaaaaaaaaaaaaaaaaaaaaaaacccaatccgaatattaacagatatctcaacggaagaagttgcttctgcaacgaccctaagctccaactctcctccaatggcgacagtgaaccacctctcttcaattcacacttcgaccacgccttctcttcgcctattttctcctcattcttcaagaaataaccctaacctctcattctatacacaacccaaacccttctgcttcaccttcccatccatttctctgaaccctgccaccaaacccagaccccgggcttcgctcatcgccttggctctcaagactctttccgacacggagatagtcgccgtcccggaggattccgatcaagttaccgggaaattcccctccgataccggcgtttatgccgtttatgacggtaacggcgaccttcaattcgtcggtctatcgaggaatatagcggcgagtgttcttgctcatcggaaatctgtcccggagctctgccactctgtcaaggtacggaacccctttggtgttgaaaaaaattcattatgattgtactctttggaagctattttggaatttcattgcttggatttgaagacactttgctttgtagaattacaactatttgctaagcaagacaaaaacaaaatttcgagtcttatacggcaagaaagtagttatagaaattgatcaaaattgtagcaaaaggtcaatcatgaaatcatgttgttacttgcattatagtttaaattgattgattgattgattctgtgattagcttaactttaatcataattatcttcttaattagtgagtgttgaacagtctagtaagtattactttgtttatataagtttatgtgttcatgtgttcatgtttccttaaaggcttgttcttttttttattccttcaaattcagaaacccccaccacccaaaataataagagtcatgtcgtgtttgcatctatgagggaacaattttgtagtggttaactatttagcattgtctgtctttaaagattgaaaggtttagaggtgaagcatgataaaaacaatagaaaattgttaaccaaattggtgagtgataaacaatgggggtgttcagtaaaggatgctccatgttctgtggaactcttttgtttcctaggattgatctcgacgcagtattatttcctaggtagatcccaagaatgggccgaatttcgaatctcatggaagcaaactatagactcgattaatcgagctatcacaataccttatgagttcagtgggatcatattctatgcattctgtacagtaccaaccatataactaaatatttgtaaggtagatgtgttttcttatcttttcttctgttaagagcacatggaattaggttagaccaataagaatgatgttgggtgattgaatgttttggttaaaacttaaaaagagagtataatatttgcatttcaaaataagaaagagtagcagttaagttatccatttgttaaattagtccagctgaattttaatcccagtcctcttacacacaacacacatacaatcctcaagtggcgtgatgatagaaataatgagtcaaaactcagttaataatggtcctgttcgactttgttatataggttggcgttgtggatgaaccagatagggaatctctaacccaagcttggaaatcatggatggaggagcacatcaaaaccactggaaaggtacctccaggcaatgaatccggtaatgccacttgggctcgtcaagccccaaagaagaaggctgatctacggctaacaccaggccgccatgttcaattgacagtcccgctagaggacctcatcgatcggttggtaaaggagaacaaagtggtggcttttattaaaggttcaagaagtgcaccactttgtggattctcacagagagttgttggcatccttgaaaatcaaggtgtggattacgagagcgtcgatgtacttgacgatgaacataatcccggattaagggagacactaaaaagttacagtaactggcctacattccctcagatctttgttaatggtgaattgattgggggttgtgatattctgagctcaatgtatgaaaagggtgacctatctgatttgttcaagaagtagtaccaagtttttgagctgtttaggtagtaattaatgctcattaatatgacttaatgagctcgaaaaaaaaagaaacattgagtcttaggcttgtaatttaatttgtgagctttatttaaatgaatggagaaaataaatgggtttgttagagatatgactcacatttcgaattttatttatcaacttgtgttatatggaatagggtaaatagcggcataaatactgaaagttttaagtttgtaagtcacataaatctaatgtttatattttagcagtataagtattttgtaaaactgtaataaaaatatgtgaaagtaatcgatactacatgtttttgtctaaatctaataatttaaaatttagattttatatgtagtctgtttaagaaaataataaagtttgtactgataaaattaaaaaaaaaaattataattttataaatattagatatttatatcgctaaaaataaattgaatttatgcgatttagaaacttaaaattttaattatttatatcgctaatatatataaacggttaaattatcattatttatatttattaatttaactttttaattaattaatttattatgtaagaaatgagtcaattagaaattagctttatttaacataaataaatgtcaacattttattgaaggtaaaacctctatttataaaagtcaaacttcttgttgggaggagcaaactgatggggcctaattgtaataatatgtttgtaatttaactaacgataaggtcggttgtacaaatatataataacgtgtttgtacaaaaagacaaaaatgccatcgcattaggtcggggaaataatacttaatagttttttttgcataataattccaaataattaggggcaataacgtcagtcaataataaaagggggcattttagcaaaatctaggaaattggattatctgtaagttaggccattttttttttctatgtttggtcaatttgatcaacgcagtaatcaacttcttttcgccattgaaaccttgaagaaccttcgcttctcttctcttcgattctatttccttctttcgctcgtatgttgttgtgaattgtgatttcgatcatggaggaggtcgttgaaatggaaagtgaatcgaatgatggaggaggaggtgctaggtcgttcaagctctacgacaagttggaattgcaggagtttcaccacaaatttgttatcaaatccctacaatctcctactcgaggcttctccattagtcgccttgacgggaatattgagccacttgatggtaaagcttttttcctcttggtgtaagaaacatcggtaccagaaagaaaccactgaaagggttttgttttcaaattttatataattgcaataaattatcacaaaataatatatttatttcactaaatgcattgtgtataacagctgattcttgttcttcaaggccgtcaaaaatttctaccatatatggggttgttgggacaattagattgttggcaggtatgtgattactcacattatgctcttactattatttgtattgttcaatttccttttttagtttcattggtattgagtattgcatagagaaaataagaactctctttcttttaccttttttgtttcacttaatatattttccatatactcattttgaagccttgctatgttcaaatttacatggcataagcaggaataacagaatattgcgtttgtatgttattgttagatgttagaattcagaacttttgtggctaattctttgtatttcggtgtaggaacgtatattatcgtgatcacttctcagaaggaagttggtcattttcttggctttccagtatttagggtaatgtctatgaagtttttgtcctgtaatgaggcgttgaagcaatctaattctcaagaagtaagttttcttattttggtgtctctagaatttaatgtgaggctattgggtgttggctaaaccttcttgtaatgtatttgacagaaaaaagatgaggcatacttcttgagtctcttgaaaacagtagaatcaactccagggctttactattcttacgaaacagatgtaacgttgaagtatattcttttgcctaaatttattttacaaaatgttgtttaagtaactgattgatttcccctgttattggaatgcttcttcaaaatttatcactgtttactcttgacctttctattgatttgatgtactttgtgatcattgtcagcctgcagagaagatggaaattagctgaaggttgggcggccaaacccatttggaagcaggtcagttagtatatttttggatttcttttggaaataaatttttctagatgataaattggaaatgctttgagattttacattagaagcaaagttaaggcctattacactaaaccttgtgtgcaacttgcttggtctcatctgtcctagaagtaaatgaacaaatgaggttgcattagagatttgatatgttaattttaatgctattcgaccatcttgtcattgtcatcctctcctgcacatgttctatatgttttttggcatgttgcttagtgaaatcctgagctatcagttttccttctgtatttcaggctgatcctcgatttgtctggaacaagaatcttttggatgaacttattgagcacaaggttagatatttcttcaattatatttggatgttacttttactctcatcacaccatttctttatccactaattctgaaatttaatttttgggtggcagcttgatgaattcatcattcctataatacaaggaaatatccttttatgcttaaaatcactgtataaatgttgcaatctgtacttctgtgtcgtttgtggatgtatgatattcaagaaaaggacatattcagtttgagaactgcatgttattttccgttaacctagtcttaagcttccagacagcacagctaaaacttaaagagtcgcctgtaacactcacacttatttctaggcggtgtaccaggcgtttaggtaaaattctttgtcagttatttgtgcttattataaagtaagtttcagaaggtcttactgtggtataatatggtaattagggacaagaatgtggagaagaggagccaaccttgaaggagatgtagctaattttattgaaactgagcaattggtggaaactaatgggctgagttcttcatttatgcaggtatgtctagtgaatctgatgaactatcagataaatgctttcacacattgtgtaagcagtagtgcaattagttacttaagcattatttttctgagtatttatattatatatagatattttgagttaaacacaagtatgcatgtattccaagtgtatctgatgtaacattagaaaaataattatgtgcactgtcttgacattatgagttacgtttctgttattttcatgggtgattgttctttttctattttttggactaataatattgcatggtatttgtctacatgtccactatatctctcattatggagttagattcaatgcttaaaaggcagtggtaatgattcaatacccagtccatatggatgtaaaagtttgttcaatactttttttttttgcagattcgaggttcaataccccttctttgggaacaaattgttgatttgagctataaaccacaactgaaaattatcaatcatgaacagacggtaaattttaactgaagtttttggtcatattattattattattattattctttgtgttgttttagtgattctattattgttgttattgccattgctattattttaatcactagtgttatctaatagtgcgatgagttcctttccatcgattgaattgtactttctatttgaccttttattcctggatttcctctccttcccagtcagaagttgtggagcgccattttcatgatctcacccaaagatatggagatacaatagcactagatctatgtgacaaagtacgttctctttttcttttaatttgcatgttagacccatcttgtactattatgctcttttttttttttgaacaatcgtactattatgttctgatcatatactgtttctctgaattggaggtcttggaaatatggcctcttttttcaagtcattttgcactctggcctggtttttttccttcctatatatacctatatatattcttcaaatgggagcatgtagccaggagaaattgactgaaatctattttttcttacttctattttaaccattcaaataccattttggctctgagatttgttaaaactcttaatagttgcatgtgccttaaagcaagtataacgcttgattatgtaataattataactatcatcaagttttaacttacgagtaagtaacattttcaattatagaaaggacccgaaggacagctaagcgctgcatatgcttccgaaatggaaaagctggcagatgtgaggtgataattcattactgttttacagttatacatcataccaatcctaagtttgtttccattttttatatttccatcccatagtgtctgttattttgttacgtcagtagaatttattgctttgttgttgtcttttaccacatttacttagttgtcttattctattattctaaactaaataggccactgcattttaattgtgatttacagaagtattgattattaatttaatgcaatactggtcttactgaactttcttgttattttattcatttccccatgttttcttctttaatcctctattcttctatctggtattgcatattctatgaaccaatttaatagaaaaatcaaaggtttacattgttcttatatgactattgtaaaattgaatacctactgagattatcatgtacctaagtataggtgattaaatttcaagtgctactacataatattgagcagttgatatttgaattctcatgagtggctattcgatattttaccgtaaatattactgctttttattaaaacattgacgcagtacagttccagctattgctattactttgtcttcgacatgatagaaagagtggttttattgcagatatatctcgtttgactttcacaatgtatgtggaaactcaaactttgataatctacaagttctgtttgatcaaatttcagaggaattcgaaaagcaagggtaataaaaaaaccgttgaatcttttgtataaatttgtacgggataagtatgccaaagtttaggtatacaatcatttgtagtactacttttaatcattactattctagttgagcagatacttcctcatggacgcagaaggaaaaatactagtggagcagaaagggattattagatctaattgcattgattgccttgatcgaacaaatgttactcaggtttgttataagtttttcatctaccattacttctatggatatttctgtaaagcaaagcaatgcagtgtccttgtttttatgttcaagtattttcctgctaaattaaataataaacttattaaagctgaatccttattgtatgcagagttatttggcccagaagtctttaaatttacaattgcagaaaatcggagtactagattcttctgactgcatttctacgtttggtgaagattatgtgaagttcaaaacatgtatgactgacttcttcatttaataatgtcttcttgctcagtttttattttcttggtgaatttgttgccctaaactctttgttggctgcttaggttgggctgagcaaggggatgagttaagtcttgaatatgctgggactcatgccttgaagggggacctagttaggtaaatcttattaacaaaagttaatgccaacatcaaataacattctccctcaaaattaataaataacattttcttgatttgtgatatttattggatccttcatattgcagatatggaaagcaaactctaggaggactaattaaagatggcatgagtgcactttcaagatattacttgaataatttccatgatggaattcggcaggcaagacgatttttatgatttcaaatattagttattactcatttcagtataatgtgttgtttgattaaatgtggattctgtttcttttcaggatgcaatggatctagtcagtggacggtacactattaacagaaacggtccttcacccttccagctgaatggttttgaatcattgtctgtaagtattctttcttcttagatcatttacatttattatgagaaatgttgtcaagaaatttagagaagaggcctataggtacaatgc

SEQ ID NO: 18446 - DNA, 7929 bp, Cannabis sativa
  modified_base (7781)..(7797): a, c, t, g, unknown or other
  modified_base (7872)..(7873): a, c, t, g, unknown or other
taataatttcaaaaccaaaaggggtaattttaaaaagaaaatgtggaagtaaaaatgacaatattaaaatagcaacccttaatgtttttgatcatatccgccatacatatttttcctatttatagaacctcatagatccgagatgaggtaattttttagaattttcataaaaagattaaagtttttggaatttgaacagtaattgagtgatttcttttttagaagatttttacttaagaaaatggagtatccattccaaaataaataaccatgatataaatcatatgatcttaaaaaaagccaaaatctagtttttcagagggaggaaagtacgaaccatggccagtcaaagaattcacgggaccgtccttagatggtacttgttgctttggattgagtccactttgagttgccaattcaccattatttccattgggaccgtctccaagcctaagagatatccaatcctcctcgccgatgctatttgacacatctggatgatctctaaaatcgggctgcaatgaggaatcagaaggcttggatggaagaaataactaaagaggtgggtcatcaccacccgcaaatgccaatggattatcaactaaactatcattcatatcattatctaatcgacgggtgaatctcatggacgctgcgtgaggtgatcgagagggtgagactcgaggctgtgacatttgggaggaaatgaatggcctccgtttgggttgtcgatggcctgagagagccctggggccggctggtcagaagtaaagcgagaggaaagtcgagaaagagaaaattgaagagatggagaagagagagaagaaagaaaaaacatattttattttatttatttttcattttaaaattattttaataatttttaataataatatatcaattggaaattgacatgtggtataacgttaaaataggtactaaaggaaataatagaaattgaagatttaggtacttttgctattatttttaaattttaggatatttaatagcaacaaattaaacaaaataagtatttaagctgtaaattttccaattataactgaccaaaatgtttgttatttaacacacaaattggtttagaattgttttcggttggtagggtagttatctctaaaacgaccgttagaaaccactcctactactactagctgcttttgataaattttctgactgaaaagtagagctcaggacctgagcggagtgggagttggaactaggaagaaatggcgattgcatttgcggtggctgtgggaaggcccacctcttctatgctcatgacaagatgtagagctaagtgggtctctactccttcggctctttcgtattcctcttcctcttcttcttctcctccccctcctcgaaagctcgtcctttactcaaagcccgggtgctgtttgtgcgacggtctcaaagaaaaacttcaggctgccttcttattgtctggtccagattctctcaacgacatcgatttgcaggtaccattcctatccatcctttctgggttataatccttttgtctaattaacttgaaattgagtgtttttggatgtttgatcagataagggatattaccagtaatcctgagtgggagaaagcttaccagtatgagatacccgtgttagctaaacttctccctgatggaacggaggttagtttattcattttgagatttatgtttttttggggatttggctttttttccttttttagtgttggaaagtttcaattgggttcattgtagtctgtgtgtgtgtgtgtctatatattcctcaagtttcccttaaaagtaatttagaaacagaaacagtatgactcataaaaacaagttttacaacctggaatgttttagggagaatggaagcaaaataatctctttttcttttgtttaagaatttaagaattgtataggttagtgcctataaaatgaccaatatagtgttaggacattttaaacttttggagggatgtaaccttgagctttgaggaattcaaatatagctcatttctagataaatctaaccagtgaagagatgtttagatgctcttcaacaggacaagtgttggttagttatcatcaaatgcacatatatatatatatatatatatatatctaatattggactaacgtctaagtctaatactgagctttctgcctttctgttccacagacatgcttgagtactcacataataaatatttgaagaccttttgcaggaacatatgtgaaaatagtaaactgttagccataccggctctcaaattccttgagaaactgctctaacctttccttcaacactgcttttggctaatactaactatttcttgctcctccaacttactgaaagagtgctcctttccctacagtctctttgaagtattttaaaatagggtagcaatttcatatgcatttacatggtgaatgcatagacagacttgctacgccaaccataaaatcaatatttgggacatgaaaaagataaataagctttcccaatcgatgttgatctctcctataccaattggactaccatccacacacactcccagttcatatttggatcaagtagctgctctggttaccaatttgaccaaatataagagttagagtgctcaaaacaaagttaaatttttccacagatgcaaatttttgacattgggtaaaagcttgctttttatcccgaaaagagaaaataaaataaagaatgatgaatgaagtacagccaaaaccttgattaagttgggaaagaatttgattaggtatgtgccaatggggaagctgagagtgtttaaatggttatgtttgcttttctattctgttaactttaataaaacatgggagaaggcagggagaatgttagacattgtttttagaagaatttgtaacaactgaaaaagagaggcctagctcttgattacctattagaccaccaattacaattacctactggagtgcacaaatgtctgattatagtaagcctagcttttacatgtgttatgtgttatttctaattggccgagttgtattagttattggtgagggaattatttgtattagaatctaattgggtgactgagcctataaataccccagcagccccatttattcgggtgttgatagtttgtaaaattgagaagagttaaactcttcggggagatactagctttcacatgtgttatttctaattggccgagttgtattagttgttggagagggaattatttgtattagaatctagttgggtgactgagcctataaatacctcaacagccccttttattagggtatgatagtttgtaaagttgagaagagttaaactcttcggggagatatcaagctgtctcgaaaagcttggaaactttgtattggatgacttagtttgacctctgacagttagttacagttaactgttatttcagttatttgctattcattgttttgtttctccttttgtaaaaatcagttagttgttaggctttgctatctttcagttgttggtttttattctctgttcaaggttgtaacaaactctcatatatataaatatcagctcacttgatcatattcatcgatcaagcttttctttcttcacagtcctgttttctaaactaactgttcaagacattttcatggtattagagctcgtgactcatgtccatggaaacgacttcatccgatccagcacaaggtcatggttctaccatgtacgacaacaacaacacaactccggcaagctctgctataccggcaaccacaaactcatcttggaatccattttcgaattcccttacatcatctctaaccatcaaacttgatcgaacaaattacctggcctggaaatcacaagttgtgccaacagttattggacatgagcttgatgagatcttgttcagtaatgttcgtccaccgactactctaatcactagagaaataaatcctggtttcaatcaatggaagaaacgtgaccaactcttgttgtcatggctaagatcctcaatgagcgaaggcattcttggatctgttgccgcttactccacatccttcgaagtttggaagtcccttgaacaaaagttcccaggtcaatcaaaagctcgattgctgcagttgaaaagtcaattaatgaacattcagaaaggtaatatgtctatatcagattatgttgataaaataaaatccatttgtgacaatcttgctatagctgggtgcatcatcaatgatcaagacattgagctgcaacttctcaatggtcttggacctgagtatgactctgtagtttctggtattacctccaacaatgaatctaaaagccttgaggaaattcaagccctattgatggcccatgaatgtcgtttagaaagacatcatgttgtcttagacattaccaacaaaatggccgcaaatcttgctgtttgaaattcaagaaccggcttcaacaacagcagtaacggaaacggaaatttcagaccctactatcaacaaaattgattcaacgaggcagcaagaaattccaacaattttcccccaagatatcccaattccaattcaagacccatctgtcaagtttgcctaaaaattggacatactgcctctgtttgtcactataggtttgacaaaaattgtcactccaaagaacaactcacaatctcctaaggcttaccttgctgaacaagaggcatctgaagcaaatgatcctcaagtttattcaactactacagtaccggattttggtgatgacatgagatggtatgtggacactggggctacgaatcatgttgctcttggcatggaacatctcgacagtgccactccatatcacggttcagagaccttggctgttggagatggtaagcaacttctaatatcacatattggtaaaaaatgcattcactctaattcttcccctccactgaaattaaactctgttttaagtgttcctgctattactaaaaatttgattagtgtgtctaaactcactcatgacaataatatttttcttgaatttcacaagaattgttgctttgtgaaggacaaggacacggggaaggtcttagttcgagggaaacttaaaagtggcctatatgttcttgatgagaactcctccaagttttctcaagccaccctacaatgccatccacagtttcaaaattaaatagttcaatagacaattcttcccgcagtgtctttcattcatgtaacaatgattgtacttcaaattctgtgaacattagttcacctatcaattgtacaaatcactctattaataaagattcaacagcttcaaattttcaatgtcaagtattgatatctactgctggttatgatatcaatctgtggcatagaaaacttggtcaccatggaccaaataccttaaaacaaattctatctcatctatcattacctaactcattaaaagaattaaaattccgtgatgcttgtcaaaatggcaaaagtcataaattaccttttcccttgtcaaatagcagggcaacacagccattagaactccttcacactgatgtgtggggaccctcacacacaccttctatagatgggtttaggtattacatacatttcatagacgactatagtagatttacatggatttttcccctcactcttagatctcaggcatatgatgtattcaccacttttaaaacacttgttgaaaaacaattttctttacctattaaatcggttcaatctgataggggaggagaatatagagtgtttgctaattttttgcagggaccaggcattacatttcaacatcattgcccacattcacatgagcaaaatggtcgtgcagagaggaaacatcgacatatcacagaaacaggtcttaccctattagcagaagccaatcttgatatgtcatactggggcatgcctttcagtgtggagtgtacacaattaacagattgcctaccaaaattcttgacaacaacagtttattcaataaaataaactgtctgattacaagtctttaaaaatatttggcagcatctgctatccacatcttcggccatatcaccctcacaaactaagttttagatctgaaccatgcaggttcattggctattctcccaatcacaaaggatatatctgtgaaagtgtgcatggtaaaagatacattgccagggatgtcacattcaatgagcaacaatttattttccctactcccactctacagaacaaccatcatcaacaactatgccctcaactcagttttatccacaacaggttgtctctaacaatgactctcctttacctactgctactcatacacatattccagaccttgtcacttcaccacaacctgatacttcctcaccaaacactcgtgactcctctctgtccataaccgaatcaaattcttcccatattgcagacacaaacactgatcccacatccatacagccttccttgaatactgctcctgaaccccagcccatcattcgcacccacccgatgaccacaaggtctcaaagaggtatttttaaaccaaaatcttacttagctaccaaacacaaactaatttctattgcttgtccgagtattgcttttgcttttgaggctcattgccgtttgggtcatcaatcccttcctttgctcaagaaagtttgtccccagtatagtaagttgtctttattggattgtgagtcatgtcagtttgccaaacatcatcgtgttagtttgagtcctagagtcaataaacgtgctagtgttccttgtgagctagttcattttgatgtttaaggtcctcctattttgttctcagcctagattcaggtgttttgttatttttgtatatgattattctcgtgtaacttggttatatttgatgaaaaatcgctctaagttttctataatctgtgctttttgtgctgagatttaaaatttatttaatgtgtctgttaggggtgttcaccaaattgctcaaaccgcccgcaccgctgttaaaatgcggtttgaaattttttacagtacggttgcgatttttttcctaaaccgcgcggtgcggtacggtttgcgattttgaattgttaatacaccattccagctggatacaagctgcttactcctcctcgaatcaggttagtctggagtcatgaagtgtgggccaggttgaatactccaaagcatagtgtaatactatggttggcaatgctcaatacattaaaaatcaatgatagattggttaaatatggtatacaagatgaaaggtgcagcctttgtaatgttcaaaatgaaaatgggcagcctttattctttgaatgtagtgttgctgattactgcctgatggagattaagagatggttggattggaatgcaagaaccagcagtcttcctcaattggtgagatggattggcaagggaaaaatgaccaaattcaggaagcaagtttatgctgtagcaactactgcactggtttataacatttggagttatttggcaagagaatcatttaaattccaccaggctgatcgaggatattaagtggagtttaaagtttcggattgctatgtttttgccaaagaaaatcaagattgtagataaaaattggttttatgctttataaatgtaaaaaaaaagtatagaaagaggcaattgactttgtatagatttcctcaggccctgtctatagggtgctagtaggatgtaaagattggtttgtgcaatacaattctctgatttataaaaaaaaaaaaaaatatgcagttcaaaccgcaccgcactgcacattataaaaataccaattttnnnnnnnnnnnnnnnnnaatatgtgaatgtccaacccaaaacccgctaattaatgtattgttgattttttttatatttattttcaagtcttnnggtatttttgacaagtgttgctcaaactttgttatatttgtgatagtttaattatt

SEQ ID NO: 18447 - DNA, 2593 bp, Cannabis sativa
aagcaacacacatataaaaaaaaatattagaaagaaactaaaaatatacaccataaaaaaatacacaaaaataaaagaacaactaaaaaataattattgaataaaaaaatattctgaaaatcagttgaataacataaaaattacaaaacaaaacacatatatacaaaaaaaaaaaaaaaaaattgtgtgaaataaactaagaatatgcaccataaaaaatggacataaactacacaacaactatactaaaaaaatacataaaaataacgaaaaaataactataaaatagttaaataacaacataaaaataactataaaacaactataaaataacacaaaaatagctacaaatcaatagaaaaataacaagacatcaaccttataaaaatatacaaatcattcataaatcaacgccaaataaactacaaaatattaaagaaggcactactttttttagaagaattgtatctttcaataaaataaaagaaaagtacaagttacagtgcaagcatgagtggaagtgaaccgttccacactaattccttatcaagccccaaagcttttcttgcaatataatgagcatcaacattattattcctagaaacaaagctaaccgaaactttagggaaatttgataaggagttacaaatatttctcactaaatttgatagagcaaagagttcatctttacaattcattattttattcacaagaatttttgagtctaaaaccaccttggaaattgagagtttcactactaaacacaagctcaaggcaaagttgagagccaaagcctcaacatgagttgaatccagcaaccctggaattggaatggccaacccagcaatgatattatcatcatcaactttgacaacttctcccaaccctagtttgcttcttttgtaatatgttgctacatcggtacaaagtttgaaagaacccgacctacaacaatagaatcctgatcccccatggaagaatgttgagtggcagcaagggtcttcaattgagcattcctgtaatcttcaagataagaacttaaccacacaacaatgttagatgcagaaagacaaatttaccaaaaagattcttattcctattatcccaggttacccataaaagccctaacacaatacctaaatcatccttattcggactcaaaagaattaagaataaagtctctaatatcacaaagcttattattcatgtagaaacttttaaggggagactggctccaaatttaactaactctggaacaatctagcaaggagtgtgtcacagtttccattggacaactactaaaagaataacctggactagaagtaatatgtttagaaaaaatattagaggcagtgggaagaacatgataaaaggcacgccatataaagtgcttaattttaggagggatgtgcaaactccagatagtagtccaccaatttttgacaaaagggagattcgatggggacgggaaaagagaagcaactttagcataatgataggcaaatttgataaaaaaacactctcgaggtatgaaggttccaaataacacaatcaggcttagaggagtcaccaattggcacttgaagaatttgagaaatggtgtcatcatcagagttatctttgagtttgtccaaatcccaattccctaagtggttaatgaaataactaactgtatttaagggaggatgaagattattcttgtaacgaacaaatttattattaggaatccaaaaatcctccaaagttctaatagtgttcccattacaaactttccacacaagaccctttttaagaagatctcttccccatagtaaacttctctaggtataggaaggggaatgtcctagagaagtgtaatgaccgttatacttagatattggattagtgggacacttagcactaattaatctgactatgtgattatttatgtattttatgctttttagaccatattttcatgaaaatatgtgttatgattattatttctcaattttggagattttattgaattataggtgtgatatgcatgctatatgtgaattttcatatttttacatttttatgcttggtaacaatggaaatgggtcgaatggcaattttagtcacatggatacaaattgtgatcaagttttttatgggacaatattattagatatcttagaatgtcgaggtttaataaaataacagaattggactattttacccctagggttacgagataactttttggggaagtaagggcattttagtctttttaccctaagagagtagtcactctttttggaagggataggtggttgtggctcatccttttgaagatggccagctacttaggaagcaaacagaaaggaaaaacaaagtaaaaaggaacaaaaaacaaaaagcaaagtcaaaagcaaaaagaaaagtaaaaaaacaccaatcaccttctccttccccctctacttcgtggcttctgaaccagggccaaaacacagtgttttctaccattttcaagcctcttcttagcttaaattcatcaaggagttcaacccctagctcctccaaacttctaaggtaaacctaacctaaaatttattggttttctagggtt

SEQ ID NO: 18448 - DNA, 3912 bp, Cannabis sativa
aaaaaaaaatactttcaaaattttttaaataattttttaattaatattttagactccgactccaattttgatattggaaatcgaactcagacctggccccagacttagacccactctcgatcccgacctcggacccaaattaaataaaatcaacaaataaaaataaaaaataaaattttcagaacacatttttattttttgtttttaaaattgaaaaataaaagtagttatggaacacatttttatttttcaaaaataaaattttaaaaataaaaattttactttaatttttatgattaaaaaattaaaaaaaaagtattactaaacagccagttatatttataaaaaaattccttttaatagaaagggaaaaaagtagctttgtatagaagtaattatttaaagaaaaagaaaaaattgtatagaaaggatgagagttagctaattaagtaaaagacaaaaatattaaggatgacacaaaatgacaattcataaagatatccttgattctataaaatagtatcgatatagacataattagattgtgagttttaaggcaattatattatgccagccgaagcaaacagtacgtagcagaccaaaagttgagtaagtcatttccgtaattaaataaaatttgatataaaaatcttaattatatatgtgcaacttttctgggcaattgcttagacatcacaaaataattggcagtattcagaatgagaaattatgaatttatgagtcatcagtcaatggagaaaagtcttttgttattaggctcattagacataaaaaaaatgttatccattaagtgtgttaggtttgtgtttatatatgccgttaatatataattaataattctatatatgtatgaaatgcaattatataaagaatatttcaaatctcatactgaagtcttccacaacttatcaactcatcattcttcattaccaaaaatggagaatcgttggttcttcctcaatactctcatgttaatcttcttcatcctttcttgttgttcttttccaacacaacaacaacaacaacaacaacaacattctgatctgaatgcatttaataacacttcctctccaataagatgccttcctcacataaaatctgctttattgcaactaaagcatgaacttttctctgataaggatctttcttattactcaaagatgagattttggaaggaaggaaaagattgttgtgactgggatggtgtcacttgcagcaccaaaacaagacaactaataggccttgatctgactgaaagttcgcttaaagggcctctgacatccaatagcagcctattcagcttcactcaacttcaacgactcaaccttgcctacaatgatttcagttcttccaagattccatcaagctttgctcaactttcaaggttaacccatctcaacctttctaaatcggtattttctggtcaggtcccttctgaaattgctttgttgtctaatctaatttctcttgatctatccactgattattactacgatgatgatggtaactcaataggtgacattagtctttcatatagtacaacaacaaaacttgcccaaaacatgaccaagttagaagaacttcacttggactttgtgaatctttcttcaccactacctaaagccatggcaaatctatcctccttgatatctctatctcttcaagattgcaatttgtatggtgaatttccacaaaatatttttcatctaccaaatattcaagtcattgatgtgtcgtacaatgaaaaactctatggttttcttcccactaattttcattttggtagtaaactaaagtcgttgaatcttggtttcagtagtttttttggaagattaccatattcagttaagaatttgtcacgtctctcatttcttgacctgagtgacagcaactttaatggtcaaattccttcggctttgttcgaaattcctagtttactatatctagatcttcgttataatcagtttgcaggacctctaaccatcccacatgtctcgttgtcatcccaattgatggatctctatttgcttgggaacaagttaacgggacaaattccgaggtcaatttttgaaatggaaagactaagaactctcgatcttagtgtaaataacttgagtggcacaattgagatgaacatgttttcgaagctaagtcaacttcaaaatctttatctttcacataatagtctatctatagtaaccaatacaacaacaaattccactctaatcttcaaacttaatgaattgggtttggcttcatgcaacattacagaatttcctaagttcctgaaaacccaaaataagctacaaggtttagatctttccaaaaacaaaattgaaggcaatatccccaaatggttcttctcaataggggcaaagaccttttatgcattaaatatgtctacaaatttcatcacaggttggggggaacaagggttgaaagtgcttccacaaaaagtgttgtcgatgttagatttaagctacaacagatttcgttacccattaccagctgttctaccattttctttagatcgactcttcatttcgaataacaacattagtgggaaaattcatccattcttgtgcaacttgactactcttgaatctcttgatatgtctaataacaatttaggtggtgagattcttccatgtttaggttccattagctccctttcatggttgaaattatctaacaacaaacttgaaggcactatcccatcatctcttgggaacttgacttccctttattatttggacctctctaaaaataggttatctggtagaattcctcaactggaaaataactcaatgttccaaaatttaagagaactccaaattcttgatgtctcaaataatcacttaagcggctctattccacaatgcttgggtagttttaactataaacttgaagtggtgaacatgaaaaagaacaattttagcggaaagatgcctcaaaaatttctagatggaaataggctagttacactagatctcagtcataatcaactagaaggaatggttccacagtctttatccaaatgcaacaaattagaaattctaaatctcggatacaatcgactgagtggcatattccccttttggttacaaaatttggcaagtttgcaagttcttgtattgcgttccaacaaattttccggtccaatatggggtcaaaagaagtatacgggctttaagaatctacagattgtcgacctatctttcaatcatttcagtggaactttgtcatccgattacttcaccaattggagtgccattgctacaattaagacaagttcagataaatcaaggtctatatatatggatgaaaatgaggataattactaccaagagtcagtaactgtgactaataaaggttatgaaatggaatttgtcaggatcttaaccatcttctcctttattgatctctcaaacaataatttccatggggaaattccgaaatctattggggatcttcagtcattaattgtgctgaatctatcaagtaataattttgaaggccacattccactattgtttggaaatctaaaacaacttgaatcaatggatctctccaacaacacgctctccggaagaatccctcaagaattggcaacactcacatttcttgcgtatctcaaccttagtaataaccaacttactgggatgataccacaaggcacacaaatgagtacattcccaaattcttcattttatggaaatgaagaattatgtggttttccattgtcgaaagagtgtgaaagtagtgatgagacacgaagtacgacacttgatcatgaatctgaattttggagtggttttagttggaaagcagtggctataggatatgcatgtggttttcttggtggactgttgggtggatatctcttcattt

SEQ ID NO: 18449 - DNA, 5610 bp, Cannabis sativa
ggtacgattttagttatgaactcaagatcgatcttatgttgtttatggatgaagctttttttattcattaatggagtttttttggtggaaaataatttttgatttgtgatttattattttacgagaagtaaatttataagttttcattttggttggtgtttcatgcactgattcaaagtcttgctattgtaattaatggagaagatagtatgctcttggtgcgaagtgactgatttgtatttttcattacagtaagtaattttttttttatatacggtatatattgcttacgtgtcacgttatataattctatttaattgatggaagttatttatgttattaaaatatatattacgtatatatataaaaatttctcaaaaaaaaattgagaaaaaaattattaaatattttttgataattaatacattagaatgatgatttttttttattttattttaaaatagaatagtcattatgctattttagtggaaatattatttcattaaaataatattttaatctaaaactaaacaaatgaatgaaataaaaattattttcttttgtacaatctacattttattaccaccaatcaaacactaatctaatgttcatatataatattatgttcatgtataatatttatttgaatcaatataacatagaagtctagtttttgcatatgactcttttaatatagtgtgttagacttcagatgtagttcatgtatatatgtttatgatttcttatacgaggcctctgggtcaaagcacattcaaatatgcctatatattgcttatatagaattcaagttttcttttgaatttcatagatttacttggtttatatatacgttatatataaaaatattggttggcacattatttgtttattgtattaatttcttttctatttggaattgatgtcttgttatatattgagataaagccaaatttatttagataaaatttggtttaaatttactaaacactagttgactttcattctacatgggttaattggatcatgatgtggccaaaagtaatctctctgtaaattgttcatgaggaatattaaatggttgtgtgtgtttttcatgtgagtattgatcgtgaggaatattaaatggttgtgtgtgtttttcatgtgagtattgatcgaccaaaagattaatatttattttaattacagatatatttgtggtaataaatatgtgacaattataaaatttctatataaacaatatgtacagtccaaagattaattaattatttaacatgatttgttttcaatatttaattactacaacatgagtaccggttccagttaatattattgttcaaagaattaatattaatgatgagtttgctatcttgagagtatttgtcataatttcaacttattgcgttatatgaattcttttgtgaacctcatttattttgttatattttaagtgcatgttttcgttataactaccaacataaattttaatgtcatgccaaatgagacaaactttaaagaaattaaagacaaacatgcttctttaactatctcgcttcaatagaggatgaagataaagataatactcaagaaatttcataaagaatactactaaagaaagtgcaaactatattagatatggaatcattaatgacttttgtaagatgaaatgaaaataaaataagtgttccaagtgtacatgtcttagacatatataaagcaaatgagtttttcactatggtttgttttgtaaaattgtttaatttattgtatctaaatatactttgtaaacaaaattttgtgacattacttatgtaagtgtaattatgtgttgtcacccgttattaaaccttcttgggctgccaccccaccttaactcgcacattgccattatgatatttttcgctttgggactaagccctcaagatgttatttttgggcactttctcaaaattcctcataccaatggagtagcttaaacatttatattcaaggaatatcttgcttattcttccgatgtgggacttgggttgataccctgataatggtcccatgaaacgaaggaccgcatactcgtggtctcccttcttatagaaccaccttgtgtcgctgctatcaccagcaaaattcacagcctcactatcaactttgtgtggaagactttcggaacaagccccaaacaccaatcttaatcttgtactttcataattatcaacggaacacgctgcctgaccaccataatatcagaaaaacaaatttattttaaattaagatgttatttaaaacaaatagcgaaaatccaatgggacctaattcatgtgataggcggccaataattgagtttttggtctaatttactttttatttatttgattaattaatttaacaaaggtttattagaaaaagagaaacctaaaacctaaggcttggctatgtagaggaagatatgagaacataactaagaagaaaactcaccaccccaaaaagtctctctctctctaagtttcagctcctctctctctagtagccatgactacaacacacacacacacacacattctctctctttctctctctgtgtcggtctgtttgtctgtttctctctcttatttttgccagagcctaggttgacatattattaatccggggtgcttccagccacaatattaaagaagtatctcgagaatttttttcgtcttcatccaaaacaagaaaaaaagttcttttggtacagaaacgggtcgacatagaggccgaaacagggacgcccagcgcccaggctttcactttgtgaaccagggccacttccatcagtagttcaaatgacgtcttccaagaatgttttctgttttcatcaataattaatatttgaggcttttgggaaacaaatggagccatctaggggtcagaactgggacctagcgctcaggttgaaactttgttaacttgggccatgtccaaggagtttctgagaagtcttccgggcatattttctatttttgccaaagattaagatacaagtattttcagaacaagatggctcagaggtcatatttggttggcctatcgatcatcacgttatacgaagacttggtgtccaccactatgaaaaattccataatggtattctgcttcgaggcagtactaaaagtcagtgacaatatgatcttaccatagggaacaactccatccccactaaagccatacatgagctggtcgcagtgctccaggtcttttaaggacaaacccatttgctccactgtttgtttgaacaagatgtttgacgatgctctatcatcaatcataactttagacatcatcatgtttcctatttgtacctcaacaataagaggatcgttgtgagaattataaaaatatagtttgagttggattctctgaatgtaattggatcacactcgaagcatagagatttcggaggcctctccgtagcatcgaacatttccatccttggcttatgtcacacagatcttgcatacatctccaatgccttcttgaattactaagaaggtgtggacctttaactaccacttcaagccgacctgccactgctataggttagaggggagagttacctcctattagcgtctctagccttacatactgctggaggacagcatgcttttgtcgaatcaagaattctatctcattttcgcaactgattacacttatttattgcagaagtgacataatttgttcatgtctctcttccctgactctttgaaggaaagaggcttgcggtatagaactatattgacaaagtcgccgcaaaataattcctctcttggggctataagaatagagtaggttgtaaatcaagacttacactccttttcgggcctattcccagttcaggctttcatttcaccagagaagttggcatgtataccaccattgttttgtctctttttcccgttctttcctccttttccactgccccttgcgtgtctgggttaggtgcagggcagtatgttgatttcttctttttgttttttgagtccttaactagagaaataactttttcatatttgataaacccatctgctctatccaggaagtcgttcatggtgtagcctggtttaagatgaaggtctgaccacagaggactcatctccttcagccctgctgcgagttccataaccctcgcatcttcgctaagtattttgttcttagttactgcctctaattactgctggatgtagtccttgagggatttgtcatcttgttgctttacttcaccaagatcattgggttcaatctggcgttgtttggatgaagcgaattaacttccaaaagcctgcacaagctctttccaagaatcaatagttttaggagcaagcttgaggtaccatcaatgagctatgtttgtcagcgtagcagggaagattctacacaagacgtcatctcgtatacctattggatattggtctgcacttcaaagtaatagatgtgagacaacgagccttctttcctggtgtattgacgctaggtaggattcttaaacttaggagaaatctccaaagccttgattcgatctaagagcggtgagcatcaccctcgatccaattcaaactctgacaactttttggagatgtaatccctttcaatatagcagctaatgaatcaaactcagccttgctgattccatgggtggcggtctgcgtcctagttagaacttcagctgctaggttaacgtggtcaccactagaagctctcgtatccaccaaccatttcttgtttaggagtcatccatgtctttctatttcccaagacgatcaaaaatatttgtcgactgggatttggccacaccctcctgaccatggggtcgtgatggttgtgttagggatttttctcgtatgatgacaacatcatctttggactggttgctgtcagagcgtttgtccgaagcactataataattattcccctcaaaatagtcttttgtagggttataagtgcgaaaagagctatattgattactcaggtttaactcaaaatagtctacacataaatgaatttccaaaatttggtctcaaatgtgttttagaccggaaaacctaacctaaagaagtggcatattattttttaaataaatagtaaaatgtagcacataaattttaattttcttctattactgattatttgattaaaatttcatttttataaattaatttttttttttaaatttacatttaattatatttatttttaaaaattttccttaagtagtattgaaaaataatctctatgtatataccttcaaacacttttcctgttggttgttgcgtacaaataatacaaatagaatattgatgcagatattatgtattaataatgatattacatatcttaaaccaccaatcaaccttaattaaaagcatccaaggaaataacatttctctcaagttgtgatgagatgaggattagagagaacatatatagtactagttacgtggattcatatagtccactagcttatttctaggtttggagtttactaattaattataataatatttacaaccctatactatttttttttttttaatttacatttatattttagtaataaaatttttaaatttatattttttt

SEQ ID NO: 18450 - DNA, 3492 bp, Cannabis sativa
aactcaaaattttgtgctaaatttggcgcaaaaaaaaaaatttgtggcccaatatttacaatcgtagtccaatgcataatatgtgaaaaaaaaaagttaattattattgatggttatagaaattgggagaaaatattttgtatataatttttgtgcgtagaactgaacaatgtatagactttacctaataaactgcataaatatacataattgatcctaattgattctattcctacaaataagggaaaaataattacaaatcaactgttactgctattcacaatatacaaaaattattattctttttattgtcaaaattaaagtaacatggcaaataaagaatctagtgttttataataataatgaatcataataagtaatggcactatactaaataaaagagcaaaattcattgtgggccaaatttggcaaaacttatagcatgtaccaaattagacacatatattagaacaccactggagttgtgttttttgaagtgtgctaaaatataatacaccacctttttagcacttagagtaagatatgctctaagcaattactttaattaaatctaatatacacctagacacaactaaaacacatactaacatgttgacaaaggaaaaaaaaaaatatgatatagcaaatctcactgcatatcaggatattcttgtgaaatgatgctgataaatttgaaaagttcaaattattgaagagtttttatagaacatttcaatataatataactacgttcgttgggtaagtagtaataattatgtaatattaaaaaaaaaacacctgttcattactgggcatcgaaccatgacatgctagcagcaataccctgctaggatctcccaagagaggatgtgactgaagctgatccttcaaagagttaatgtcatcccagccagtcataaaaactaaaatagcaccaggcctttctttccggataatgtgacaaagcacgcactcaataaggttaaatccaattgagtcaggattccaaacagataaggactctcgagtctttggattatagtccctaaaatcagcagcttcaagtgcgtcctgctcacaagcatataaacaattatacctaagaaccgaaatgaaaactagccagagtttaaaatttattatacctcaaccgaagacgcaatctggctctttctttttcctacagattgagcctgcttttgcattttccacgacttttcttgcccataatcatcaatttgattatattgagttaaccgatatcccgtaatttccaaaatgttctccagaaaaagtgctcgaaccgggtacgtaaaaccctaaaaaaatatgacaaacatccccatataaagaattcaatcttcctgttttaattcattgcatggcaatcaaaatttgatggaagggaggaataaaatcaacaaaaggtcctaagttggggctcactggcatgcacaaaaaaactgccaggaaaacaaaaactttgaacgagaaaaaacaattgcagacaaacaatagcaagcaagtcttggacattgaaggtactctactttttatgataatattatacttgggaacttcatcagtctggtctataataaaaaattgagtcacaaatccctaactacaaaattacagaaaatggcataaaatctttaaaacttacaggaatatgcattgtaggagcaccaccaaagaaagaagagaaaagctccgcattaagagttgcactcatcaaaattaatcttagctctggtcgacgaggaagaagttctttcagaacaataagaagaaaatctggaaaattgaaaaattataataataaatcacgtgaaaaaataccagtacacaaaaaccttacatttggttagagtaacgacaatgaactagaaatgcgagtatgaatagaaataggaatggaataaaatttgatatgagtaaaaaaattaacaaaaaagtttttaagaaaataatattgtacttgggaatggtctcttttacccattttcggaacgaatagacattccactgaaatggtgcccattcagttagaatagcattttaatgccttagattgaaaccaaacaaaggaatggattgaaagggattcctttccattcctttctccacaaccaaccacataaatgaattctaaaactaccttcattcattccacgttcatgaatttcatcaacaattacatgtgtaacgcctttcaaggttctatcaacaagcaatctcctcaacaatatgccagttgtgcagaaaagaagtcgagtgtccctgcctttcattccttccagacgaactttataacccacctttttcaagagagagagaacatataaatatatgtgtgtatacatacatatatatttgataagagtacataaatattaaatatatatatatacatagtacacagtatgtataaaaacaaagactataacgaaaagtaaatcataagaaaaccaaaaaaaaatatatctaatgaaactttgagaacagattctgttatatttataagggaggttatgaaactcacagattcccccaatgcctctcctctttctgcagcaactctttcagagacagacatggctgatatccgccgaggttgtgtacatataatattacagaaagcaccgtgagcagcttcaatctcagattctaaaatgtactgaggaagctgtgtagttttaccgcagccagtttcacctgaaacaacaacaacctacccaaaacaaaaatcagaaagagctttctctattttgtatggatttagccacatttaagctacacacacacttcacagacctaacaatttcagaatggaaagaaacctcttactaagatctacatgtttgagatgttgatttacttggttaacaagaaaattaaccagtctctataaaatatttgggcatgcgaaatgacacagaaagaaaagaacctctcttaaagatgatgaaaaagaatgaccaaaatgttagagagttgataatgataattattacttggaacctaagataagtcccctccagtgaaaagagattatttttgcaaaacacagaagtcaattggctgtaatctaaaagcctctccaaaatatccttggctcaagcctcccgttcctacaaacttgctcttggcctcccattaataaaaagttaaatacgaaacagacttcaagcaccccataatccatttcctccacttcctctcaaaattaacaaagtgcagtaacctccactccaaaaaaaaaaaaaaaacgcacgcctattcaaaatacacttttaataccaccctgcatatttaaaatccactttgaataccaccccccttctttttccagcgtctatattcctctaccacttcattggcaatcaatggcacatccattatttgttttcccagcagaaaagcacattgtgtttctgaaattgtctcactcaaaacatatcttaatctcatggaaagggctttggatat

SEQ ID NO: 18451 - DNA, 3976 bp, Cannabis sativa
aaagccattgaaaatatgtcacatatacacaggtgcactcagtggcaatccagttagtatttaatggtgaaatttagctggcgccttaaatttgtaaagaaaagtaaaattaagggggttttgccactacagaaagatcaagaggttaagtgttataaagtttaaacataaggatgtttcgctgataataaccctaaagtataataataataataaaaaaaaacatatttgagtgtaaaacatagtctcatgatgaatcataataataactaaatccaatcagagaacttgagtgtcttattcaaatatgctactagaattttctccaatatgtgatttaacaattatctaattaaatattagtgagacacaaaatttcaaccttcatattttatttgatcatgaccctcttttttttctctgaactgctacgtgttcagtgtttgaatttgattagtgtttgattgaacaaagtcaaaagagtcttaaaatgtgtgttagttatcttctttttgatttagttacattatcaccaggttactccactgtacttgagtttggtctttgattagttgaacacaaatttagagaccaaaatcataagtagttactgagttgaatgtaaagacaacaacaatggctttatcttctcatcttgttttcttttctttgctcttttttctatcaccaaaccgagttttcgctcaaaccagtaatggcagagttaacttaggagcttccctttttgcagcagagaattcttcaccttggctctctcagaatggggagtttgctttcggttttcgccagcttagaaaccaagatgatatcttcttcttgctatgcatatggtatgccaagatacctgacaaaaccataatttggtgtgctaatggagataagccggctgcagcaagatcaaacgtggtgttaactcccgaaacaggacttgctcttacaactcctcaaggcgaagagctatggaaatctgagtcagttgatgaaagtgttgctaatggtgttatgagtaatgaagggaactttatccttgaaggtagcaattcgaaaaagttatgggaaagctttgaaaatccaacagataccattttgccaagtcaagtaatggacataggacaggtattgtcatctcatcaatcagagactaactattccaaaggaaggttccaatttcggttaagggaagatgggaatgttgtgctcaacacaataaacttgccttctgactatcctaatgagccttactatgcaactaacctcactgatgaacagtctaattcggtgactacaaccacaaccactcagataatcttcaacgaaacgggctacttgtatgtttcgagaggaaatggcgaaaggttcaatttaacacaaggaagagtagtgtcaacaagggattactatgttcgagcttcaattagtttcgatggagttttcacacactatttttatcccaagaactttagtagcaatgtgagttggacacctctttggtctataccgaataacatttgtttctcaacctttgtttcagcaggtattggagtttgtgggtacaatgccatttgcagcctcaagaaagataagagaccgaagtgtgaatgcttagaagggtactctctactcaaccaaaatgacagttatggaagttgtaaaccagatttcattcaaggctgcaaagaagatgaggtaactagttatgggaaagatgcatatgatgttgttgagctcaagaatgttgattggcccggatcagatttcattagaataacaccttccaccaaagaaatgtgcaaagaatcttgcttggatgattgtttatgtgctgttgctattcttagaaatggaacctgttggaagaagaggtttcctttatcaaatgggagagtgaataacagcaatccaactattgctttgatcaaaactcgaaagggtaactctaccactactactttatctaagaatccttttacagaagtgatcaagaaaaaccagaatggtttggtgagagttacattgggtgtattaagtgcttcggtatgtgttaactttatgttacttgctgcaatgtctatggggtttttcatcatttacaagaagaggaataaaaggtcttttgctccacaagaagttcccgagtcaaatttgcgttgctttacctacaaggaactcgaaaaagccaccgacggttttaaagatgaactcggacgtggagcttttggcattgtttttaaaggctttctcgtacaaactaatgctagcagtgccgtggctgtgaagaaactaagtccaacgctaatagatggcgaaagagaattcaaggcggaactgaaagccattggccagacacatcacaagaatcttgttcggttacttggatattgtgatgatggagaaaatcgtttgttggtctacgagttcttgagcaatggcactctagcaaactttcttttcggtgacacaaagcctagttggactcaaagatgtgaacttgctttaggaattgcaaacgggcttttatatttacacgaggagtgcaacactcagatcatacattgtgatataaagcctcaaaacatacttctcgacgagtacaacattcccaagatatcagatttcggtttggccaaacttctgatgatgaatcagagccatacacatacagccattagagggacaaaagggtatgttgcaccggagtggtttaggaacatagccattacttcgaaagtcgatgtgtatagctttggagtggtgttacttgagattgtttgttgtagaagaaatgtggatatggaagttggtgaggaaaggaaagcgatattgacagattgggcttatgattgcttcagagaagggtcattggatgttcttgtggattatgaagatgatgttttgggtgataagaagaggttagagatatatgtgatgatttccatgtggtgtgttcaagaaaatccatctcttagaccaaatatgaggagagttgttcagatgcttgaaggtgttgttgaagtgagtgctccaccatgcccctcaccattttaaagataggccaaaaatttacttaacaaaattaaattagtgtcaattttacacttgtcttatgtttgtccatatagttgaaactactttcaacatgttatcattggtatttgtaatgttatatgtataaacatgttttgattcaaaatatgaaaaggagcataagtgaggtctttctttttcttttttgagtaatatattcatatatgagtaatgctttacacctgtaattaataataaccgttaacatatgttttccatccatgtagatgaagttgacagatacaaataattatacatgaagacaaagtctaatgatgaatcatataaattaaacgagcattgctattaagcaccagtatcagtgatgtttaacattactatgaagtgtcgtcttgcaaatagtaattaatgattaatgctaaaaggtactagtggtatctagcacctttttaaatattatactgttatttgtataattaaatatcgaaataaataaattaaataatttttagggaatattactaataattgtaaggtgttgttagataccactgttactaataacaatattctaaattaattcatatgagactgaatatgactaattaagtagtgttacacaccgcgcttatagtatttctcaatgaagagcatccaatcatagaacttgttgtcgtattcatatttaccactagaacactatcctaacatatgaatttattatcttaatcaagactagtaaaacaccaaaattcaaccttcactttatgaccatgacccccttttttcctttttcaactgctacaaatttgagcagacagcacctgtttactgatttgaaattgaaattgaattaatggagttttgcagttaatttttctcttcattttgatttgtgtttggaccaaaa

SEQ ID NO: 18452 - DNA, 6822 bp, Cannabis sativa
tgatcaagataacaagtggaaatgcaaaaataaaggaggcattataggctttgttcttccaaactttgtcattccttgcaccccaaattgcgcaacataaaatgcaaaatagcctccaggtttctgtgcttactgtgctgaacacagtcacgcaccagtccaagaaactggtttcttgctgcactggtgtgataataacagctttctcccaacattgtgctgcaataggacagaaagcaagaacatgcatgattgtttcattatgcagaccacagacaggacatgggctattaacatcaaccctttttataatcagttggacttttgttgaaagacaattggtaccccctctccatattaagttcttaactttggggggtatttttaaccgctagagttcattccagaaatccgaagcttcaacattattccaggccgcctttgctttttgaattaagttaaaagcacttttaaccgaatagagtgagttgagttctagaactcaaaaactcactcaataatgatgaaattgtgattttgaggtaattatttattttgaatgtttaaatttgttgtttggatgttattgaactattctgggaagtttgattaagtttggaggagttttggtttggttttagtgtaaaaaccaactttttatcgcttatgcaaaaaacggttaaccgttttacaaggtactataaaaacgatgaaccttttttcccaattagttggaagccaaaaaacagtgagccttttggggtattttttagcacttaggttcttgtattttatcgatatttagggtattatcatgctatttattgataaggaattgtccgattttgagttaaagtcctagaacatgattaatttagttatctaccaatttactattgtcattacatagggcatgagatcgtcgagtgttgttccactcaagttggcatgcacacttaaatttggattcgagataagaaaattcaattgtatcgtatctcatggctaatttagatacgataattgccgttaatacgaaagagttataactctaacctgaaaccgatattaggtttcttacttataggttaccttattaggcaacgatagttacattagttgactcattggaaacgagggttgatggatacttaataaagtatcgagaatagtttgtcttattagacaaataattgatttgttagtattgtgatgtattgtaatgttttgtatgattatatgtttaaagcatgtagctgttattgattaatattttgttatactcatgaatgtgtatttctgctttcttgttgagtgtttgtgactcacgtgtgctttgtgttgcagataagaaaaagaaaaatagatcagccatgagttagaggtttttcggtgaatgtacatatcagtctcatcatcttttgcgcttagtatcatgttttaaagtattttgaacatgtatgaatattttataattaaatgaaatgctgttactttagagaagtttataataaggggatccccaactcagtaatattttggaaaggaatttaaattgtattttaagaaataattactaaagtttttaattaatacacatttttcttaaactggtagtttattattataaactaattataaaagtacacacgtggcgtccttatgggttatggcattacaaaatggaatcagagtgacaaaggtttaaagatcctgaagacaggctgaatatgtacattggctgtgaagaatcgttcgactcatggcatagtaagtgttttaattatttatttgctaattaattgaaatatttatttatgtaaaattcacgtgttgttagaaaagcatgatagggttatagatagcaatgttatatatatgagtgcggaaatgcttattagcattagaattggttcgattattccaaattttagaaagtctacggtcacaggtatagtaggttatgtacctgaggtgatccgataaggttaaccgcgagctttttaggcttgcggctggcagtgaggatgcgaatcctctaccactacaaaattaggaacacgtgtatgctgcaatgcaagagatcatacgacggcaaggagattagatcagagaattaagagagcagcaagttcggtctactcatgttcctatccctccggcacctttggttgtgtcacaggatgtgggaaattagttggagttgttgtatgaatggttcatgaagaaaatgccaccagtgtttgtggatggttctgatccactaaaggcggatagtggatgagcatgataacatctatctttgactttatgcgagtcaagggtaatgatcgggttggttatgttgtattcatgttgctggaggacacctgtatttggtgggagattgtgtcccaaggtcatgacctgaataacatgacatgggatacattccggactttggtctatgagaagtactataatgaatccattcacactactaaggtgaaagagttcatacgaatgacttaggacagtatgacggtgactgagtatgccaccaaatttgaccggttggctaagtttgcttctaatgaagtggccaatgagactgctagaaaggccaagtttatccgaggtttggaagaacacattgctcgagatgtggttgtagctgctaaataactaggagtttcttgatcctatgctcaagtggttgggttagcccttaatgttaagggtgttgaagatcaaattcagaagaagagtaatatgagaagatattcttggaggccatcttccaatgttggtctgggtatggatgttaaccctaatgatcgcaagaaaagacccaatgatccactagccacgggtcttaataataagtttcaaggtaaccaaggtttttgccaaggcgagaacgaaaattggagaacttatcccaagtgtcctagatgtaagaggcaccatcagtgcaaatgtcaagctcgagcctaattctagtgtggggtaatagggcatctatagaggaattggccacagtattgaaaccaaaatagaagaaagaagatgctctagttcctactcgagttcttgctttgactcaagtggaggccgacgctagccatttcactatgacaagtcagatttccattaatggtattatgctgtctgctttaattgattcttgtgctacggatgttagggtttataccctaaaaagtctgtaaagatatttttgattattaataaagagttgaatattttgatatatgtatgaatgttaaattattattatttattattgaataatttatattaaatatcagaaaattccttattcaaatatgaggttgtagcttgtagttgtacagataactaagaccacttagctatgaataaaatagtcagcaacatattaaagttatgaaatctttaatcaatggttgctagtatggttcactgatacccgttcttcggtgcaagtaatctcaatttggattacggatgtagtatggcatcaaagtgaaaatgttgtatataatagagattatatatgataaggaccgatatgaatgaagatgtctttatctaacatgtcgtttactataaagatctaatttatattataacgatgatcaatagtggtaggtcatgagactgcaggatgtctcataactgcctgttgttgacatgccccatttgggcctgtcgaatagctttctttgagttcgataaagccatcagctctatcaaggaactcctccatgttgttagttgagatccttcgaatgtctttctagaagtcactcaatgggagaatgcccccagtatggtcgtatatcgaccttcttttgtaaggcctttgacttttgtagcctcggtcatgaacatctagatttaatcctttaaaggttctccttgccattgtttgacttcgacaaggtctcttagctgcgatggtataagtctcgaggacgagaattgtgtgtaaaattcttgagagaaccaagagttgaattttttggggtgagtttgaagtaccattgttgagttgtttccgacaaagtggctgggaatatgcaacatcgcacgtcagcagtaaccttttggagatcgagttgcatctcaaagtattggatgtgagccaactagtcttctcgtctggtatacattttccatatcggcatcttgaatttgggcaagggtaaggcatttatgtatgccgagaatggtggtccccttgattggtctagtttaaggtctaaaggctttggaccagttgtgccttgaatcatgtccctgagttggtccaattgtgcttgcacagaaggatctgttgctgtagggacttgattaactagccctccttagtggggttgtagattctggtgcgacagggtctggccgaccatactctgagagagtgtaccgtggaggtcggccagacctgtgttgaattatagaccctggtcggccactccaaggtatgggtgttggctttggccggccaggcctacactaggctgctgtacatggccagctagacctacattgggcagggtttggctgcccataactcttctatggggggccagacctggaaagggcaagttctggcttcccgtgactcctcaattgactgatgacgacaatgtgtcgataggtggtagattacaccagttgttggaacttggcagatctaggtgtctgaagtgattaattttacttctcaaatcatcgtttttggtgtttccacccgctcttagtccttgtcggttgaagattgacctttgggtgcctcactctcctttggccgcccaagggaactcctgcatatggctggccagccaaaggctggatgatggggttgttgctgagccaaagatccttggccgaccccccatgccgttggttgccgagatctggctgttcttgctattagacttctgcggcaaggtctgtcattcctctagcaagggaagatatgtcctagtctatgagggaccaggttgatcatcttgtcgatagacctccttaatctatcaactagtcttccttggagtggatctttgatgagatcctggcctcttccatcagttatctagttaaattgtcttattagatcgttggcctctttgttgcagcgatctaactctgcttggtgagatcgaagaatgtactcctggtcatccatccatatcaggaatttgcgtctctactaagcgaatacattacaattagcagtgcgtggttcttcagttaagtgagcttggcctacaacttctctaagtctggctaactcgagatcttctcccaagtctacacggggctcgccaatcgtaggcttgccactggtcctatctttatagcatagaatcgaagacgagatccggttgttgttcctgggggttgtcgcccatgtgtccttccttcaggggaaggtgccaatggaaggtcctccctcagaggcaagggcttgctattcagatccaccgggatgtttgtgtcagtttggctagctgtagtggccagacttgtggtgacaggattgtccacatctgtagttttcataggaattccaattgtggctagaacatgaacatcaagatctgtagcctatgggtcttgagggagactcaaagatgcaaatagtgcgactggggttcttctcgtgttaaccatggcatttgatcagatacgatatccttgctctcaatgaaagcaccaaactattgacctcaaaaagtggtcaaccaacagcggggtcgtatgaatctaacgtatgccatgtgttacacaattagaattagaaagtaaagaacacataattgttgtagaggtttggccccctttgacagcgggtaatgacctactccccttttagttgtattggtaccgagggttaatactattcagatcactataggtgagatttgatatagcacccttaaggatacaaagtagaaatcaaggttgacaaatctcaagtgttgagaatgcttgtatgggcgtgtgagagagagtgaggaagagagttatcagacttaggcttagagctttatcacttggaggctagtatcagacttagagacttctaaattagagttaaggcctttatataggaagcctaaaccctaatttacaacagaacccctagatatttgtatattaaattagtaaacttgaacatatatattttccagctgttttattgggttgttagggcccaattcaaaacccaacttgcagtccacgtgtagaattgtacaaaaaatcatactaggccttctctttacctgtcagacacctgcagggtgcaggctggccgaccatggtgttattcagaggctggccggtcaaggatggccgaccagcttctgtgagaaagctggtctgtcacttgatgccccattttagtgtcagggtccccgttgacttaggtactgacttggacttcttgttggtgagttgtacttccacgtgacgctaattttttccacgtaagtaatgccacgtcaggtgggaaaaaatcagaataacactgggtttggatctgtgtcatggtgttttagtattgatttgcagtgattgttattgcaaaggttgtggctgtgttagttgtgggtggtagtggtggggtggtggcaatggtgatagaggtggtggtgatggtgaaggaagaaagcgtgggaagagagagagagagagagagtcattagggaagaaggaataaaataaaagaaaagaaaaataacttatttatttattttataacttaaaattatattttagtttttttttgaatgaaagtaaactttattagatagaaacatccgctaa

SEQ ID NO: 18453 - DNA, 2640 bp, Cannabis sativa
aaccattcacaagctgccatctgtacctgtaaaaatacaccttaattttactaatttttcataaaaataaaaataaataatttaactattttgttataatttttttagattaattagaattttattgtaccaaattatgcttcacaaattctttaagccgctaaaattcttttgaattattaagattgttagatttaaatatttctgtttaattttactaacgtagcgattatccatgtactaaattgtgctctttaaactttgatatctattaaattgtgctccccgaactttgactgtgcccctaaactttcattcacgttagactcttgttagtaaaattagataaaaacttttagcttaaacaatctcaatagtatgaggagaatttttaacgacttaaaaaattttaaaaatataatatagtgcatgtcaaaattcaaaaaacaaaattcataattagccatttaaataattaagaaatagttaaagcaataatgtgcagtattatgttatacaaatattaagaaattatttccaaaaaaatcgaaattgcaaatattattaaattcgacaatttcaatagtacgtggagaatttttaacaatttaaaatttttaaaaatataatttagtatatgtcaaaattcaaaaaataaaaatcataatttgccattaaaatagttgaagcaataatgtgtaatattatgttatgcgtaaattaaaaaattattcccaaaaaaaaaattgaaattgcaaatatcattaatccatgagctatatattctacttctttttttcagttgtactttaattttttacattttcatcttctctcatttttttatattacttaaaaagtcctattttttttaatatattttattaaatatattaggattatgcacatgtataaaataataataataataattaaatactttaagctctattatattaaggtaaataaaaatgtaaaatagttaaaatttagttcatgcaagagaaacttatttctataatttaaagatagagaaattggtaagtattccattgtgttgttaattggaaagaagctgtttataaattggattaaattatcttagaatttttgtataaattataataacattaacccataatcactcctttggtttttgaaaatgatcttttagaaactagttaaatatatttggctcatgggtaataagtaataagaaaaatataattggaatggaacaaactattttggtatactcaaccttagcaaattacattctttaaaagttctgaaaggttaataaaacactgaaaaatcaaaggtaataacataaataaaaaacaacaacaacaacaaaaatgggtctcagctccaatctaagtacagagagtcatgtcatgagttttaaccgttaagcaaatcgataagctcactcttcttcattttcgaatacccttttaaaccgcgagacttggctagtgcccgtagttcgggtagtttccagccgctcaaatcctcttgctcggtctgaacctgttcatcttcatcctcttcttcctcgttaatatgagcttcttcatcctctaacaattgaacaatctctggctcatcaatgtgagcttcttcaccttctaacaactgaacaatctctggctcatcgggttcaaggtctgactcaggctcatcatcatggtcaacagacactggctcatactcgtccaggtccaactcggttttaggaactgcctcaacctgatttttctttcctctcccgcctgaattcacatatggcattgaattgaccggtttgtcatcagaataagcagacttgaatttcgtccgggggacaggagatctgcgttgaaagtttgatacaggtctagtaaaagaggcattgggcggctcctggacaacatcgtcatcctttaaaccgatgatggaatcaaacgagcctgtgctttttcctctaatgtattggccattctgtacttgctgatcaaacatgaactctttgcttgtcccgctgttgctaccacctctcctcgattgttcagttgagtgctttcttaataacttaagaagcgaatccacagtttcgttctctttaccttgcccttgcacggcttcagtcttcttttcttctttagctgcagctctctcccgaagctgagcctgaacctttctaaaaagctcaacaatctccttttctctaggtcccggagctgcagtggcctggaatttaggagaattggatagtgaaaaatacggcccgtttttagaggcaacaatgtctgaatcatcaaggttttcataactgtccctgtcttcattttgcctattcctacctcgagagaagctctgcctgttatgccttgagaaatcggggtttctcttgtaactaccggaacttgctttacaaacatgggatgaaccagcagaagcagacctgagtggtccaacattgacctgtgaatggaagctgtaatgaaatcgagatgagcaaggattcaaggtgactgttttttgtgaaactcctcctggacttaggagacctttaccttctgatactccatagcctgcaataaaccaaagagaaaatacaaaaaatcccaaatgttaaaacctctaacatcatcaaaa

SEQ ID NO: 18454 - DNA, 4606 bp, Cannabis sativa
caagacaatacaaaatatatataacagagtaagagtcaaacaagatcttctctacaaaacaaagactctcttttctaaagatatgagtgaaaatcaaagatacaaaagaggtacttaacctagctgcaataaggtatatttataatcaatatacaccttattgaaagcttacacacggtctgaacaagaccccagcccactagaagatttcctaaaaaaaatcttcaatcagcctaggaatttttatttctgtacctacagaactgtgagcaatacaaataggtattttaggcgtgtgagtatcccctacttctcgcatggcaaagaagaagagggttattcaaaagcctgcatccacaatcacggagatcattgaaactaaagaggaacttccttcaatccatgaagataggttcgaactgatcagttgtgaagtgtttcatgattctagcgaaatcttggagaattaaatagggctggaacctgttatgagcagcgcagtttgatcccccaaatcaaacagttaggccgatgaggttgagaagaacgagtttcaagctaatgcgagtgaaatatggagccaattcaaggccaatcaggttcctaatccttctactagactctcttttacttaaccgataaaagtagaagatcaattagttgctaagttagacttagatgagatagaaattgaggcttcatactggaagaatgctattgtttgtataggcataggagctaatcctccgttcaaagtctttgaaggatttgttaagagagtttggggtaatatgggtatcgagaaggtggtccgaatgcattctagattcactttggttaagttcaaagatgaggtcacatgagacttagtcctagaggtaggtgttatccatttcgacaaaaagccagttattctgcgtccttggtctgtaaaaatggattcagctccaatgatcaacttagttcctatgtggattcggctaaatggtcttggtctccaatattgggggaagaagaatctaagtgctcttgtaagcacaataggtaagcctattatgattgacaagctcacccaagaacgttcaatggtgaaattcgctcgaattcttgttgacatggtgatttcagatgaaccacctaaaatgatttcctttatcaatgaaaggaaacaacttgttgaacatctagtggaatacaaatggctcccttcaaagctcttggcttgtgggaatctaggtcatactgtggccaattgtaacaaggagaagccaaaggtttggaagaagaaacaatctggggacaataagtttaatcaggaagacaagaaggagatgcaaaaccaggaaacaaagattggttatgagaagagttcgaatagtggcactgatgctgttgccgaaactgggaaagaaaaactagatcaagaagttaaaatttatctggaggaaacaggcagtatagattcagacaaggcaaactggattaaaaaaaaaaaaaaaaagagggcagaaaataatttcgaggtctatagtggaagcacccaaaatagcaaacggttatgcagctcttcaaggttatttgaaactaaggtgaagcatgagaaaactcatgagattattgctaataattttcctaattggaatttctactcaagcaatgtgacctctggaagaattctgattatttggcaagataaatttgttcaggtggagattttagatgaggacactcagctagtgcattgtagagttaaaatttgtggtcaaaaggtttctcttctggctacggttgtctatggcagcaactcaatggacgagaggaaaactctatggcacaaacttggaggttatgggctgttacatgagccttggatcatatttggagactttaatgctatgttctcgttccaagacaaaaatggtggtagactggtgcaagcaaaggacattttggacgctcaaacttgatttgcaaatggtcaggtggaggaattcaaatgttcgggtgctttctatacttggaataataaacatgaggcaggtgaaaggatccactcaaaacttgatagagttttcatcaatgataaatggttgaatgcttttcctaatgctgaagcttgctttaaatgggagactgtttcttatcatagtttttgtataattcagaataatgagctgaacaaggttcgggttaaacccttcagattttgtaaccattggccttcctatcctaactacagaatggctgtcatctctagttggaatatgcctactgctggcagcagtcttgacaaaattgttaagaaacattataggattaaatacactctaaaaaagttcagtaaacaagaagtgggggatgttgcaaaggagtacaagctttctaaagaggactattgccggattcaagaggaacctgctgcccaactagctgacactgatctttaaagtgttgttgatctcaaacagagggattttcttacagcccagaataggttatcccttcttatttctcagcaaagtaaagtaaagtggttaaagtttaatgatgagaactctactatttttatgctgccaagaggaaaaggaagttggataataggataacaacctactctaaggatgattcgattatagatgactttgaggaagttgttaaacactttgttggtcattttgagaagtttattggaagtaaaagctttgctatttccagcattgatcaaaactgtattactcaagggaatttcctaaatgtgtaacagcaagttagactaatcagacccttcactatagaggatgttaagaaagctattttcagtatccactatgctaaatgtcctgaattggatggctttggctcttgcttttttaaagacatgtggggtgagatagctaatgaatttctagagttgttcttgatttctttgccaatggttacatgccaaaggatctgaatgaaactgtcatttccttaatgcccagagttactgatccaagcacagcgaaagactatagacctattacatgttgcagcaccatatataagtgtatctctaaaatgatctgttctaggctctcaaaagttcttcctattcttgtccaaggcaaccaaggtgctttcatcaagaatagacttcttgctcataatatcgtgatcttttaggatctcctaaagggttacacaagaaagaaaatatcagagaaatgcatcatgaagatagacctaagcaaagcatatgacactgttgactggcaattcgttgaagttctgctgagacatctttgtttctgctagattcatcagttggattgtgacttgcctgaagggaaatcattaccacattttaatgaatggaagaatacaaggcaattttaaggggaaaaaaggtctcctggaaggagaccctatgtctcctcttctctttgtcttgataatggagtacctttccaggcatctcagcttctactcagagtctaaggactttggatttcatccattatgcaaaaacttttgcttgactaatctttgttttacagatgacctcattttatttagcaaaggcaacttgaaatcggtgagaattgttcaagaagcctttactaaattttgtaatgctacagggttatctgcaaataaagctaagtctcagatattttttggtgaagtcaaagatgacgttaaattgaagattcttgacttggtccaaatggaggagggttattttcctctaaagtatctaggggtgaatcttcatcctacaaaatggaaggcttcggactatggtgtgatccttgataaaatcaacaagaatcttaattgctgggctagtaggaatctgactttcgcaagaagagctcaattgatccactcggtgctgcttggtataaggaattactggatgagtatctttataattcctcaaaagataattgctgccatagaaaagagttgccatgacttcttatgggggaagaaggggaacagaagcaaattggatctagcttattggtaaaaagtttgcgatcccaaaaagttaggtggaattggatttctagaaggataaaagtggaacaaccaagtttctttgggatatttcaagcaaacaagataacctattggtgaaatgggtgaactcaatctacctaaaaggtcaatccatctggagctatccctcaaaacttgatacaagttggtattttaagaaattactaaatctcagcgtggctacaaatgaaactcagctgaaccttgctgtcaaaggtgggaattttagtactacaagattctataatcaccacgtgatagagaatagagtcgactatgctggatggattcgggacagacttctgattccaaaacacaggtttgtctattggaaacttcttaatttgtagtttttaacccctgacaagctgaatagaatcactcctattcaagacattaaatgccctgtttgtgagctaaaggaggaatctcatgaccatgtaatttttgattgtttgttctcaaaataggtgattgataacttcaattactaatttgtgtaacaggttctacttggctcggcatgatctccaaaatagggtgatcaatgcagtggctg

SEQ ID NO: 18455 - DNA, 5428 bp, Cannabis sativa
ccagcataggggtatggaacaccttctgaagcagcatcaaagtcaggataaggcctctgtccctttctgtagttgctacttgtcccacctgtgcagggtttgcactgcttataagctccagatactttcaatgccatatcctttatctgcataaagtggttggaagaaacaaggcatgttcataagtcccaacatcacaatgtgcaaatgaacttatgcattccacagataacatgaataaataaaagtgttttacacaactcctgtcttcacggcattacatttgtcctcaggattattttaagcggcatgcatacgtgcccaagttatgtacttgaaattaaactgattacttatgatcaagactctgtcatgacttttttatataaaaattcttagcttctcataatagcaccaagtatgtgacacaaaggcatgagcaagtcagctcaggtgtttgagctccgtaagaaattgtaagttatagtcaatgcataacacagataatacattcaaagaagtattcaatacaagtacttatgtatacatatatgttggaccctgctctcaacaatactgatgtccggacaggggagggaaacatacaaaatgttctaaatgttatgtcaaaaggagagcgaaaaatcacttcatttatgaaaccaaattggtggaaagcgtgtgcatttcttcagtactgaagaatacaagtcgtcaaaagagaacaactgcagactcttccatagaaaaagttcagaacagagacttttcattttccacaacaagacaagataaaaggagacaaaagataaaatgtcattagatatattctaatgtctgctgaaatggtcagtttttgtggtccttctattcggagcatgcaaatgtcattaaaagtagatactttatccagaaaatactgttgttgagcacgctattgttgttcaggtgtaaataagactacagtattcaacttgattagaaaaaaactgaaaagggtcaggtagctcgaagagaaattacatacataattttatcatatatatatatacccacaagaagctgatttgtgtatttattaagattactttgattgctgaatgtcaccactcgttttgtcatgtcaatatagttacagaaacttaaagtcgcacgtaacatggacaaaatcacatgcatgcataaataaatggatcgtgatgttgcatcaaataatgtattgtattatcttgatggctcaaatgacctattactttcaaccataaacactcgtaaaatattctaaaccccaacaaaagctacagttcaacagtcatgtatatttaatagctggataaaaaacaaacaatggtttttttttaacttttagttactactgagagaggtaaaaaatattatgaagtgacccagccacaagaagaaaacttgtccacctcaaaggaagcaccctgaaaattctataggcaaaacaggagcaaacatgcactggagcaaagagagagagagagggtagtaaaggcccagagagaatcccaacaatacaactgtgtaatcaagtgaatgtgtgttcagattcagaagaatttgaaatagtaaaacgacaagaattcaatggtgggccgagccagcaacattcacccgcctgtctttttcaagtaagagactgtctttttttatcaaagacagacagcccacgactttgcacaattggggaatttatatatatatatatatatatatattaatatatatgtgtgttctagctgacatcatcaacaaaattacatattctaggaagttagtagtcattttgaccgatcgacaaccattatcttattattaatatttttgtccaaatatgtgactacttataattagttcatccaatatacctacaaagagacatctcaaatataatagctgttttttctattaacgatatgtcctacaatttgtaatatagtttctttttaaagaagaaaatacatttttctggaaaaatgaatacaaataaaacattatagaaaacaataataaatgaattagctgaccagaaaggcacgcatgaagagtccggtcagttaaggagttaagggttatgtacgccatttcccaagtatatatattattgttcaactttctcattgatgggtaacattcacggacagtctagtggccgaacctatacagtcaccagtaagtaggcacactaatacattcattcacacatatactcattcatagctttataggccagactgtaggaagttttttaattatgacaacccaaaggccaaacagacacttgataatttaaaattataaaatatctagttattaaattgtggtttccagtttccacagaagataatcaatgctcctagcactttgaatttcatgcaatacttaatgatcaacttgtgtgtgtatgtcataattagcaatatttcctttcaatggggcaatgtagctcgatcgatattagtaatacccataccataaatgaatgagcacaaatacatatatattatatgagcagacaaggacacttttttcatccaagtttttgagccaatggcattaatatgtaagataaatatacgtgaaggggaaaaaaataagtaaatgaatattaatagtagtgtagtgtacgagagagtacgaagaggagtggaggggtatggaagtgagtcacatgcaatagttaaatccatataaatatatatatatataaatataaaaacgtgaaagatgccaaagatggtccccaccatatcaaagacactcctatcgacttgtaattttgtttgttttcacaaagatagaaaaagaaactgaaaaaaagcaaaggttgtaggggaagcaagcgggcaaagaccagagctaatagaatttgatataaagaaaaattaaagagagagaaagggcttgtgtgtgaaggtgcaggattacgaacctgcgccgtcaggcttttgacggcttctttagtacttggggttccgctgccacgcgctccaccttcgtcttcatcgtctggcttcgtacatgctatgcatgtaaacatctttattctttatcttggttttacgattctacccctacacaagtcatttaattacgttaataccctcacgaaccacatttacaacataaataataataataaattgttttgaaaggaaaatattggattattatttaatctaataaaataatagcgaaaaaaaattaatatgatttatattttgtagatttcttagtttagcattggtccaagttttatctttccaagaaagtcatctttgtctaagatgaaatgtcgtgaaatgaggaaatgacgataataaccccactcgaaagagaacatttgtgtgtaatgagttggaccattggacgggggaaatttgcaacattctccgcacactgggttcgtagggaaattaaatgctacccactgtagaatttaattttatgattttcggaagaacttatcgtgtagaatttttcaaaaataaaactttcaacaattgacctcaaaaaagaaaacaaatctgaaaattaaatgctacccactgtgacccaaatggcgaaaatcatcaatatatttataaaataaaattttgatggagtagtaaagaataaagatgatgaatgagaaccgagaaaagtgctgtgctcaaataaatactagccgaaatataaatatatatatagtcgaaaagaatatttaaatataaaataatcttttgttttattttgtgtctttggttttttggttctccaggaaacaactgggtccggaagaaagagaagaaaagcaaaaagaaaaaaaaaaaaaaaaaagaactcgggatcagggatgactgggaaagaaagaatgccgataaaataaaataaaaataatgagtcaattattgaaagaaacaaaacccaacaaaatggtggtcatgccatttgaaagtggtcgtattagctcgacttaagaatgaataatgactcatgtaccctatatgctttgctttaatgttaaacaaaaaaattaaaagaaaaaaaagccgattcaaaagaatcaatactatcttgttaagccgaagtttctgacaaaacccatttcacaaatcaacaaaaattcccttgtcttcatctttcttttttcgttcaaaaattcagaaaaaacaattttttttaaaaaaaataacaatgagggaatgagcttttgtttaaatgggtatataccgatgacataaccaaaacaaattagaaggagaagaaagaatgaagaatcatatagcaatatactattggattattattattattaatatgaaaaggacttaccaaaatgaaaatgtcgtttataccctcctcaactatgaaccacccaagtgggcaaatacttttgagttacttactcagctttacagtttagacgacatatctgcaaatgaccaaaaatgcaaaacccagatttattttacagagcagacacaattcattgtaactttgaattttaaatttaaagttattactaaagacaatgactcttataatggtccaaaataaattgaaaaagtcaagtaaaatccgaactcaagcaacttatgaaaacgaaaacgaagactgaatggaggagcccatgggaccaaaacatttaaaaaggaaaaaaaacgagagagaagaaaaaaagaataaatgagaaaagatagagatgtacaaaataaaagtaaagcaatattctgtttggtagccaagaaaaaaaaaacaaaatcaaaatgaataatgaaatcgttgctctagaattgattacctttaatggaaaaatgggtgaggaagcagaaacaaagcaaaagatagcgaggttgatagaaagcttatcaatgcgccacaaaatgaatttcaccggagccaatcagatacccaaaatttcagccgacaacatatatgaagttaatataatatctcttcgatttcggtagagtcaatttcgctaatgctagcttcttcttcttattattgttcttgcactgatcagagattgagaaaagaataatttctaggggggaaaggaaatgctggcgatatatcgtccgagattttggtgagagtggaagctttcggattgtattacagctgcagtgtttaatgccgaagtcagaaaagaaaaaaagaaaaaaaaatatgaaaaaataaataaatttacaggcgaggggacaagcgaatcgagagagaccgtatttatagtgtgggatgagtgttaacagcgccgttagatttgacgggaaaagcgttttaaagaatttgagtgagtaggcaatttggacataagggtccacatgtctaggtgatgtaatagaacggatctcttacgtgtatgggaagtagcatacgtggtggcttttgattggttaagatgtgaaagccctacata

SEQ ID NO: 18456 - DNA, 2242 bp, Cannabis sativa
actcccccgctaacccgagcgagctgggtttctctgaatttgaaagttatcacttggtaggtttccataccgcagactcatcctttttgtctatttgtggttgcagtcatttgatttggtaatagtagaaactgaaagatttcgttgaaattgttcgtttggaaattttccgaaaagctaccgcccgtcatactatgggagctggccatgcccgaagtcgtttctttttttgtccaagtttcttctctttttgtcgaactcactttggtgcgatttgattttattttttttttattgaatttagttatttatatctttcgggatgaatagtttatcggtctgggcgtggatgttcttatttggacatcttgtttgggctacggaaagagagggattcaaaccctcggtacgaaaaattcatacaacggaatgtactcttggagaggccctcagaccttccaagaggcgtacttttacgcctttcccttgcacacattgtcctttaaatctacctccaatggaattctcttcagtgcgtattcaaatttaaccatacacccccaacacacgtatacactacgcaatgtacacaacttaacacccctaacgcaacacaacatagacacattgataggggctcacatgtgagcgcccatgcatcacgggctcgcatgcaagtccttacacacacacacgcacctgaaacacacacatgcatatgggctcgcatgcgagcccccatgcatcatgggctcgcacacgagccctttcacacacacctattacacaacatacacacactccacgacttgcattcgagcccccgcataggcttgcacacgagcccccaactaatgcacacacacatgacactcacacacactccatggctagcatggtatccccctacatgtacacacacataacatgcacacacactccacaatttgcatgctagccacgcatatgggctcgcaggcgagcaccaacctcatgcaaacacacacaagacacactctagggctcgtattcatgctccgccacttgcataaaaggctccatgactcacacaagtgctccttgacatgcacaatggcacatgggctcacacaccccattttcacaaataagtgttcttagtatttttgtcataactctcttgatatatgttagaatcggatgattcaaaatgccttggaaagatgagaaagagatctttagaatttatgattatgacaagatctaatttgttaacctggaaacttgccctggtattgtggacattagtgtttgacacatggcatgaaggatgatgtcacaaagttgagtagacctaaatcatagtagccaacttgggaggagaccctagccctactcctaggttgactccgggatctccgagatggaattttacacttcaataacttgaatccaacccaatatctttctgtacactgtaccctaaagacatggagcaacctaatacaaggtttgggagctaaaattacacaaacttatatcctaaaaggcaacatgggcacctagggtttcacccgacacccaagttgacatcctaaacctgggtttcagtttttgggacagtctttgtgcaaagaggccaaaacatgcattgtgacatcaactggacatataagggacatgtttgaggcatcagaatcaaattcagagtaagttggtttttgagcacctggggccttgggcacccaacaccaagattgataatttgtcagtctaggtaccttcccagtgtcagatcgaagatacttttttctcattgaatttgtcttcatcaaaaattgggaaacaagtacatttataggaaaaaaaaaacaagttatgggtagaaaaaacagggcctagtgcccaggttgacacctatggctggccctgcacccaggttgacaattcatcaacatgggccttgaaaaatggagttttcttagaattctttcgagcatcatgtttgtcttcagaaaatattaagaatcaacttgttttggggaccaaacaaaacttttgaaaggtcaggagaggtactcaacgcctagattgacactctgtgcccaggttcacattttgtaaacctgagatgtttccaaatcatttcaacaaaaagtgctccagacatcttctccgtcatcataaataatgaagattcaagtaaacatggggagaaaaccacaaactcaagtctcttgaaatagggcccaatgcccaggtt

SEQ ID NO: 18457 - DNA, 10026 bp, Cannabis sativa
aaaaatttaatgatttttttatcatttttttttatgtattttaaattttattccaattttatttccattcccattgttattcctatatttccattcctcccaaccaaacgccaactgttatatttcataattgatttgtttattttctgaataaagattccaagtttacaggagcctatttcaatccattaatactcataccagcttaaaataagagcatataaatatacttcaagaaagaaatatcaatccacactggatcagtacttcttttggttctttttttctttcatcagtaagcaaagcaaagatgatcaagccaaaatcaattgttaccagaaatgaaatttgcacaatttcaattatgtaaaatcagaaaaggccatcagtggcttcaaggagcttctatgaacaattgcttttgccattgtcttcaaatgaacaagaattcaaagcagaaatagctgccattcattgatactacaaatcattaaaagaaaatgttttatagtgaggggactacaagcaaggtacatcttactagatggcttttatacagcaagaatttctgattttggattagttgaaaatggtctataattataactatggttttttttagtcttttttgtctttctaaaatattgtaagagttctttgtttaatgagtaggtacttttactctgcataacaggttcccatttcttgcaatattttcatgatgccaacctacatacattacatatataaatatttatatatataaatatattgtatcataaaaaggtacaggttgagtggcttccacattttagcaaataatctactcaccactataattggttacaaatacagtccccaatggatcattatattctgtatatattgcctattattttatttcttatttaatatttaagctttttattctttctttttttaaaaaaatgcttttaatatttctactgtacaacaacatattattatactcttccactaatagattagtaaataacatattcgtaacaaaccatgtgcatggtccaaacattgaattttttgcactggtaactgtgcatgccaacttaatatatatatatatatatatatatatatgcctatgttaatatatatgagttgtattaccatctgtactagtgtttacctacttactagtaattaagatctgaaaactcagtttgaaaagccatggcagagttgattctctctccaattgctgagaaaatcattgatggtttgggatctgaagctgtgaagcagatttctatgatctggggtgtgaaggatgagcttgaacaactcaatgaaaccatttcaacaatccaagcagtgcttttggatgctgagaagaagcagagtcacaacaaccaagtcaagaattggctccaaaggctcagcactgtagttcttaaagccgacgacctgatggatgaggtcaacactcaagctttgagacgccaactcatcatgtctcaaagcctaatggccaaccaggtacatatttcatagctattgttagtgaacacatctcagattacagttaattctgttatcagttatgtgtgttaggctcaattagctagctatggcgtttagttgggagaaatgaaaatataagaatatgaatgagaatgacaataagaataggaatcgaatggaatcaaatttaaaatgcataaaaaaattattaaattttcttcatcttgcaatagaataatcattcttttcatttcaaaatagaatagttcattctattggaatgatattccaatactttaaaatgcaaccaaacaaataaatagaatgaaaattatttcctttccattccatttcaattccattgttaattgtctttaaatgtttcagattgtttgttgtcttctttctgtttttactttcttgatgtgttttcgtctctataaatagaggtcctggagctcaaccattcttatggtttttgagcatttcactttacttttctctgatctacatacagtataaatatatataccattcaatctcgagactttttaatattttagatttgtaatgattatgtaaataatattttggttattatctattgtacactataaacatgtaatttattttcaaaaaatattatgccactatacaggtgtgcactttcttttccagctccaaccaacttgcttttcggctcaagatgagtcgtagaatagaagccatcaagaaacgactgacttccatttccaatgatagaaactttcttttggacaagggacgtcaagacatttcgactgttagaagagtgagagatacttactcttttgtacgtcatgaagatgttattgggagagatgaggatagatttattcttataaataagcttttgttggagaattgtgaagagagtgtgtctgcgatcgccattgtaggtattggtggcttaggaaaaacaactcttgctaaaattctttttaatgatgagaaagtccagaaacattttgaattaaagatttgggtgtgtgtgtctgatgattttgatttgaaattaattcttaaaaatatcattgagtctacaaaaagtggtagcaaatttggagaccttggaatggagctattgctaaagaagtttcgagaagtacttggtggaaagcggtattttcttgtcctagatgatatatgggaggagaatcgtaataggttgttggagttaaaaaatttaatattaagtgaggaaaatgctgggagtagagttgtagtaactactcgtagtgaaaacatcgctaaaattatgactaccaaacaacaaccctatcgactaagggcacttgatgaagatcaatcctggtctttgtttagaagggtggcttttgaagatggatcacaagagctagaaaactctagcattgtgaaggttggaaaggagattgtgaataggtgcaaaggtatcccgctagccataaaaacaataggaaatttgttgtttggtaaaagatttgagttagagtggtcttcctttaataaggaattttcaaaaatatcatctcaacaggaagatgatatcttacctaccctcaaattgagctatgatcatcttctctcccatttgaaactttgttttgcctattgtagtttatttccaaaagatgaagaaattgaggtgagaactttaatcaacctttggatggcacaaggatttcttaagttatcagatgcaagtcaagatcaatgtttggaagatgtgggttatgaatggtttatgactttgttggaaggatcattctttcaagatgttgaagtagatgaatgtggcattattacaacatgcaaaatgcatgatctgatgcatgatcttgcagttcaagtagcaggagagaaatgtactacttttgtaatttcaaatggccgaggaaatatcaaagaaactactcttcatgtgtcttttgtaggtgatacttatttggaaagtgaactctcaggtcttttggttcatgcccaaaagtttcgaacatttctttgcaattccaaggacgaaacattttgtgatgcaataatatcaaatagtaagtttatacgctgtttagatttgtttaattcaagtatgaagcaattatcaaattctattggcaagttgaaacacctgagatatttagacctctcgtggaattctcgtctcaagtcacttcccaattcaattactaatttggtgaatttgcaaacattgaaactcaattattgcttcaatctcaaagaactgcctgcatattttgagaaactcatcaacctcagacatcttgaactttctcattgttgtagtttgaattctttgccaagtggactaggtaagttgacacaattgagatacttggatctttctgggcattcaagtctattgtcactgccagattcaataaatgatttgttgaatttgcaaacactgaaactccatctttgctcaaaactaaaagagcttcctagagatattaggaaactcatcaaccttaggcatcttgatatttctgattgttataaattagagtacatgccacgtggactaggccaactaactaatctccggaagttatcaaagtttgtgttgatgaagagcgaaaaatgtataacgaggcatggtgctgggctaaaggaattgatgagattgaacaacttgagaggtgaattgttagttacgaatttgacccatgaaaaagatgtggcagcagagtatgagggagcaaaattaaaggataaacaatatcttcgatcattgagattggagtgggattctgaagctaaaatcgatgaaactgaggctattgttggttatgagatgtcattagaaggtctccaaccacaccagaatattcagaatctaaggctaacaaattatgggggtgttaagctctccagttggctcgcatcacttacaaacctagtgaagttaactttagtaaattgtaagaaatgtcagtatttggtttcaatgagtcaattgaagcatttggcacttttgagcttggtatctttagagtacatatccaacactaatatgagtgaagacttgcttggttcaaaaacagcattactgccatctctacaaacacttcggttgaataatttgcctaatctaaagggatggtggagagaggctgaagaagagaaacaaatgtccttcccttatcttccttctctttcaaaactaattataaagaactgtcctaaggtggcttgcatgccagtttacttacatttgaaaggaaagttgcatctagaggagagtagttggaagaggttcgaagagacatttagaatgatgatgatgatgagtagtaacgttggatctatattcccagcaacgtcttctttctcacctctctccaagttggaaaggctagatctaataaggattgatgatatagaatgtcttccaaactgcttcaagagctttacttctctcaatttcttgaatattgatagttgccttaaattgaaggatttgtgtccaggtattctacatctctcatcacttcgacatctacagattacaaattgcgaggggttaggggacatgctgattagtgatgatgattatgactttatgtggcaatccctaaatggaacactccaatcattacaactacggatgttgccaaatataatgactgttcttcctaagggtatccaacatcttacaagtctacaacaacttcaagtttactcgagtgatagtctaacaacaattccagagtggatccacaaccttaaatcacttcagagtctttggttatccaaatgccccaatctgacatcattccctgaaggaattcaaagccttaccactttgaacaaactcatgattcatacgtgtcccatgttattgaagagatgcaaaagagaaactggtgaagattgggataagatttctcatattagagacttggacttaaatccggatcccaacaaagaagaaaatgaggtaggatcatcaattccaaatttttcttttgatttcctaaataagctaaaataaagtacttataattttatttgatattgcagaatccatcagaccaccaaacaaatggatgcaatctcttcaacaagtttaggctccacaatattttgtatacaagaaatcaaagatagatatgtataggtaattattctataaatcccttctctctatatacgttctgacatgatttaaattactaatctcaattgaaaattatagcatttttcagacaaacaaacagagtaaaattaatgtgctaagaaaatatgagcccttctatgatgatgagctcgttttggtttggaataattcaagcgctttgagttgttttttgaactggattttggttaaagatcatggaatgatgatttataactttaatgtggttttactaatttagtagaggaaacaagttggtttttttggtgttcaactactaactactttttcttttatttttgatcaagaaagaattttcattaatcaaaaccaaccaagatacaaaaacactaggcattactatctcttttagacaacttcttgctatttacaaggaaaactctagcttttaaattggcttttaacaacctataaacatggttaactgccaaagacaagctcaaaaatgcaaaagtttctgttcatccagatactataaaccacacctgccattgtagcatgaatcaggtctgctattaagcttccctccttccttgagttaatccaagcaatccaataattgaactcagtcgtccatatagctctactcaatcaatttgcgactctttgaatcaaacgagtacagaaagtagaaaaagtggttgtgattctccaaagttacctcgcaaaactgatcagcttaaagagctaatgttcagacgagaagatccctggtgagaaggtgagaatatggatggcttgccagagaatgaatctgtgttttgtggcggcaagtctacaccacacaactctgccatttcttccagcatataacattattctgtggatgatattttaactactaactactagatactttctttgaaggaatttgaaggtttacttttgcttggatcttttcatttcttgcatgaattacaaaataaatatgttcatgaaatctgtagtcccttctcttgtatgttctttgtttaattgattgattctaaattatgtataattgaaggagcaagagattgagagagaagaagaagaagaggaagcaaggatgaagggtagtcaagagtggcattgaaaaatatgacttttccaacaccaagagaagcacaagaacattggataggcgagagctttcgagtgaacttagtcgttcaaggtatagcatttgtaatttcgtattgatttgttgcttccaggaaacattcaccatctaaatccaagttactttatgtgtatattaggaaaagcctcaagttatcatcatcatcaattgcttgaagggatagccaaataaggactgattacaaaaatatccactggtaattctctactttcacttctacaaatactgctgaaatgacagttcaattcatccattatcttagaaatctttaaaacatctcataatgtcttacataataaaccatatgtatcaactttctaatatttacatttgcaagttaaaatctactagaggataaagtgaattttattcaatccaacacatttgtcttaactagactcaagaactatgagctatgcatttagaagcaaagcaaaaattattcattttcttttccattaatatttcggtatgcatttaataatttctttgttacttcaactcgtttttgacttaatacttttgtacttataattttcaaacataggcaatgtttatttacttgtttctagctctatttgcagtagagaaattcctagtgtcacaatcaatccattgagctgcactcatggctcagaatgttctagtttttcaggtatgcaagccaactgtgaatctgttacttgttcatgattataaatgcaatcaaatttcaactatttgattaagctttcttttgcttctaatttcaaatgttttccaacaggctgtactgagatgttgcattgattagagggtgattaggcctttttggatcagaacttggcttcttgaaactagaccgatttggtgtttcgaacccaaaaatagttagtttcttcttgtattcaagttttgtcacctaatggcatacttcttgttttgtttgccatgttttatattgtgttttgtacaaacttgtacaatacctgtgaccttgattgtaaccgcggtttttctctaccaaaaaggaggtcactcatggatatgtgacggttttctaaagttcattaatggaagtatacttagatttatttcatgtattggctgatcacaattttgaatgaatgaaacctgaggaagaaaaggaaaaatgattgaaaatgtaactagaataagagaagttttctttttgtcctcttttgaatcacttgcaattcattctttcttttttttttttttgggttaccgataaagggtaaaataacataggtaacaaaagttacagtaggttgtgggggagatttccatccaagaaagttcattgtctatcctaagggcatgcttagctaatttatgagtctcaacattaaagttgtggctgacatgagagagagattccccaagaaaaatagacaataaaactttaatatcaaaaaagataactcctgattcattcaaataaactgtctgaccttccaaagctgagaccaaagaaagtaaattagaaaagatcctcttctctggaattcccacatcttgagctcaacacaaacctaccagtaaagcaactgtttatgcctgaaaatttgaaaaagaacatgcaaacgaaatagtttaaaagcaataagtactttaattttcaaactcgaaaaatattagaatataattgtaatagagacaactaccaaagggaacccctttggtttgaccatttacctgatttcttattgataacattttaatggtaacaaaataatataaatttaataacccaaaatgctaaagcggatcatatatttattttgaaaatatcataactataaaaattctttaaaatttatccaaaaaaagatccacttgaaattatttagttaaattatttaaatttcaaccacacttgctattattacattattttatacgttcataagtaaaatttcaagcataatcttaaaactaaaagcataatttaaaatgatatttactatacatagttgggaattgtatatattatccaatcatagctataagaaaacataatacctattatactagaatgatttaccttgtaatggtttaaataaaactgccttcatttgtttgtctgaggagaaaatgatagctccaaaactaatcacattttgaggagttgatatcgccgcattcacataaagtttatagctaagaacttctgtctctgcattactttgctcactagtgcacctagctgaacttcctttcttagttttattcctttccagccatatttcatcataataggaagagatccatatcttaatttggtgtggggttcttatagttcttttatgggttttcttatttttttcaaaccatattatccatgctgaaattaacactttttcaaaagcttctttttcaagtatttctgatgcatacagtaacacttctttgaaagttaaatcctcttttcggcttgcaagaaaagggaaattcatttgcttccatataccttgtgaaaaggaacaccagaaaattacatgtgcatttgtatcgttcctgaaaccacatataggacaattactatgagatgagctatgcctttgaagtagaccgttaaaagaaggtaaaatttcatgaaaacttcttcatccaaatatcaaaatttttctttagaatttgtatttcccaatatgaactccaccaaactgccatagctgctggtgttgaaaaagtcgcttgagttgttgtcgacgctggaaaaattattgaaattggcatcgtcgtccaaaaaattatcagaaaaatcaaaactaatttcttgatgaaaaatcagtttcttggtaatttttccagcgactatactaattctaacgactttttcgaagtttgttgtcgatgccgaaaaattcgttagagtagctgccggtgtcggaaaagtcgtcggagttggcattatcgctagaaaaatcaccaagaaggttgtcaagaaactagtttcttggtgattttcccagagacaatgccaattatgacgaattttctggcgtcggcagcaactctaaggactttctcagcactggcagctactcttgtgatttttccaacgctggcagcaaacttcgacgatttttccggcattagtgagaaataaaattgcctaaacaaataaaaacattaaatatgaaatttaaaaacctaatttacatatatatgacatattaaataccataaaaatacctaa

SEQ ID NO: 18458 - DNA, 4602 bp, Cannabis sativa
  modified_base (2457)..(2482): a, c, t, g, unknown or other
  modified_base (3628)..(3638): a, c, t, g, unknown or other
tcatttataagctttattttcctacaagggtcaaagtgtgacctttgaccacccaagttatggatattacacatctgccacagcctagggctcgggtcgtgacattacttgttactcccggtcttactaatggagaacttgtggaggcaaacgagtgctcaaattcgaatccatcaccgttggatcttttcgattaccaggagcctacacaatgggatctgtagccaatggatcggttgattcaatggatcgggaccttctggtattcacgaccatcttttgacgatttagagagaatcaaaacgataaagcaattcttttgctctcaatgaaagcaccaaaatattcaccttgcttttggccaacaattttaagtctttaaagcgataagataatatataagaattaatataattaagcaataagaataccaatggttcagccccatgataatggtaatagcctactctctttttacttgtattacttcaaagaattatcgaaatcacaaggagctggccaagtgatttttcctataattcttagaaaatgtttacaattattttgacaacgtagtagctctcaagaacatatgatttcgcccacaaataataaaatgactccactatttataaaaaaaaatacattaattaagtttcccaaaaacaattaagaataaaagggggaactaagttaattttctgtaatctctctattaatgtgtgccaatcacatgagaataagaatttaattgagatataaatgcggacatatttatggaaaatgtccttgaagagttctctttctactgcgttaccatgcgcagaggattcgacatcgttgaatggtgaagacctgctcacacaacgtacaaatctctccagtcggactattgtggagaggctacctgtctgggccttaaaatgttctctacatgtcacttctattaaatgccacatcaccttgtgcaaaaataataataataatatctgttctcaaaaaaaaaaaataataataataataataaagccctcagaattgagaattacaaattaaatttgaattggaatttttttgtactgaaccctgctttcttttttatatacatatttttcattgtgtggaatcaacttaccaactccaccactgaggtgggtaataacgttacaatttaaaatggtaggtgagatttgagagtctcatttattttattttatattaaaaagaggtaaaatttgagattctcattatttgtgattacattattacccccacaggacaaaatctcaaatcagggaaattattatttgagcatcaaaagttatctatgcgtagtttgtagtaataaattaaaagaagttaattttcccagcgatttctgacacaaatagtagttagtagtagcctcggaatcaaaaaatcaaatatgcttcatactatgcggtccacagtagcatgcattatttagttaaccttaatataaggctacgtggaagcccataccaagaaaataaggccagctcaacccagccaagccaaatacgtctttcttagaaaaagaaaattatataatatttattaatttgtaggattttgatataacttctaataaattttactcatttataattgtttttctgaaagcactcagtttaatagttttgaaatctaacaaatgctcctttcaaaaaaaaaaaaaaaagaaatctaacaaatgcttattaatttgtttgaccaaagtaaaagaacatttttcaatgggactttaattgtggacttaaacactagctactaatactttttatagatagacgtgaagaaatataaacacagatccagctagattattttctcaagtacaatgcttataactctcgacctagctaaatagtcttgatataaatatatttccgtatgctaaattaatttgaagaaaagtccgaacagaaaagaacaaaggcattctaataaggttcccaaactcagcctagcttagctctaccgctgtttgtaggtttagccaagtccaaatcaaaattagcattttctggaaacagccaaagaccaaagacgatatattgttccccacgtacgtagaatgagtaataaatcaatagcacatgattctcatcatctcgtttttcgtggtttattcttgacttttcagtgattaagatcattgtttcatgtaacctagtttataattttggaattatatatgtacataatatactataccaaaattatctatcgtaattaattcggtgccgtttggtaatatttttattttttaattttttaatcactaaaaattttatttttaaaatttttgttttttttttttaaaaacaaaagtacaaatttttgtttttttttaaaaaaaacaaaaatactttctataatcacttttattttttaattttaaaaatagaaaaaaaagtgtgttctgtaaagttnnnnnnnnnnnnnnnnnnnnnnnnnnatttaagtcgggtctaggtccggagtcgaattcgagttttggtcagaagtccggttcagcgtcagggccatggggaggggatttgggtccgagtctggtcggagtctaaaatattgattgcatttaaaaaaagattgaaagtaatttttttttgtttttaaaattttgatttctaattaaaaaaaattgaaaagtgaaaacaattttatagaaaatgcttttgaaaaatatttttacttttctaattttaaaagtagaaaactaattaagaaagtgttaccaaacaccaaataaccgagtgaacgactccagagagtatactcttaaaagttgttttaacttctaaactcaagagagtatacttttaaaagttgtttaagtacaactaataaaataaaactcctctttccgtggcttgcatgaaaaaaggcctaaaaatattgtacgacaatagctatatatccataattaattccatatagattatgaatatgtaaatagaaaaaattattcgtatcgagacattcctagctagtacatctgcacgaccgaaacgtagcttccttttcttttcgtcctccttgcgctcttttataggttctttatcgcagaagcgaatataataaaagctacactggagaatggcataattatatatagtgggtttgaaaatagttctaatgaaatgacaaattagtagctggttcatgctatagaaggctaaataaaagcaaaatgttgatgtgttttaatatcgcacgccaacaaagtaccattaaaatcaagccaaaacttattgactaaaggaaagaaaaggaaaggtagccactctttcaatatttttgcaactaatattgctattgggtggtgcttaatatttcctaagaatggcctattgaaattagttagtaatttcgctaagcatatattgtaagttggattttggcgaaaacaaaaaaagtaatttgcagcataaatacttaagtttaattccttaaatacttaagtttaatttttagcggtgataatacttaaagttataattctggaagttttgtaagtatttaagtaaattgccacgtggcaattcttaattggtccaagtcattaaatttttattttgttaaaaaaaataatttaaatatnnnnnnnnnnnaatgacacgtggataatgacatagtatttaactgttagctacctaccgagttccaaaaatataacttaggtattattaccgcaaaaaattaaacttaagtatttatttacaactaggagttaaacttaggtatttataccgcaaattactcaaacaaaaatatagaaaaaaaaaaaagcaaaattataaattttcatatttagtataaaaagaaaaatcgtataaaaacacatttaattcaacaaaattgtccatatcaatcttaaaaatttaatttttttttttctccacacttttttcttatattttttttgctatttttttttatataaaaattcaactttcaaatatagcctaagagttattatattaagactaattagaatttttgcctcttaaattttgacatgtaccaaatcatgtcctttgaacttttaaggtcattaaaaaagcctcctaaactattgagattgttggatttaaagactttttctaattttagtaaaaaaatttaacatgaatgaaagttcaggggacataatttagtaaatgtcaaagttcgagagcatgatttggtagatattaaagtttggggagtttgctttaatacataaataattactgaaatagtaaaattaaatgaaattagacaaaattccttaaatctaacaatctcaaggatatttttaacaactttaaaagttcaaaaaacatgatttggtacatattaaaattcatggaataaaaatactattatataagatttgatggcaatatgacactaacaaggtgcgggacctttttgacattttttctaactccattaatacgttattacttttgggtatacctcatcaagtatcattattgctcatttttctttcgttttcctgcaacaaaacattagatgtttttatcattttggtcaaagtcagagaagcacagctctctctctctctctctc

SEQ ID NO: 18459 - DNA, 5561 bp, Cannabis sativa
tttttttaatgtgtaattaataagtaaatatgattttagtacaaaaaaataattattatagtcttttaatcaaaacaactttttctaaaaattaggttggaacactttagcttttagcttctccaaaaattcttcaaaaagttattttttaactgtttgcaaaacatatttttttcacagttttttcaaaaaatagcttttagctgtgccaaacggaccctgaaagtagtagcgacgtaaatcttacttattctatactcaaatttaaacacaaaatatatatttccattcatgaaattcaactaatttattatgcattagaatttggaaggccttttattttaattatttcaggtgaaaaattacgcttgaaatgtcactccaatactaatttattttctaaccaaacataagaaaagagggaaaatgtattccttacaaatctcataaccatagaagttcaaatattcttgagaatttttactttatttttttcaacagcctgtgaaatctgagtaaacactagtacgatggctttcattaaacacattttacaaataaacattctaagcattacgcagtacaacagagagcttcccacagctcttagaatcctcacaataggtggacattttcaattgaagagagaaaaaaaaaaggaaaaattggagcatacaacattttatgaattatcatcaattatgatcacttaacaatacagaaatactgaaatattgaggctgttctgagttaccacctccggtgagttgccagcccgaaattgaagaatattctggcggcgactaccaggtgcacaagagatattaacttaactgaaatggcaagaaacggttgaaatcgaaatgcacaaagtggtagaaggcatcaagcaaggtgagcttagctttatgatcccaaacaagggaaacaacaattttggttagatatggcagcgttaatcaaggactgagaaatggcagaacatggctcaaactacatctagatgcgaagttgacctgtcacagaatcacggcctgaatttgaatccttgtgtttcatagaaagatttgcgaattgagactcgaggtctctgctgttagtgcgtctgtggctagaagatggtggtggctgttgtggaggtggctgctgttgctgcttatacaaggttttcagccttccaatctccctctccaatacttcatgctccactaaacaagggaaaagatggcaccatatatcttattcgcttttcaacattttatttgtgtacccatatgtattgtgtgcaaactacagaatcaagaaatgcccagaagaggcagcattgacattgacattcttattcttatgattttccacttgcactaacaatttatgatttactcaaagtcaaaactgaaatacatagcataaaggaaccaaagcaccacaagtggaaagagtatatagacacccaaaaaaggtacataaaacatagagaaatctaatgaaattataataaatatataaataaacaaagcaaaactgaaaataaaaataaaaatagttaaacaagaaatttccccaccgtatttctgcaatcatgatctcctttatctatttagtttagctgatgagaagagaaattaaaaaagatgcatagcaaggttttgcatgagcatttcaattttgcattaacacttgaccaaaggcacctcagaaaagctaaattaacaagataggccagagaaacatccataaacccacaatgttttttgagttttcagaaagatagttacaaatttctaatgattaatttaataagcatgagctccaacatacacactatagacagttcttcactcctaacagtagttttcagttgcattcagagaattcccaagaaaatctagagcatttttcaaattttcaagtataaccagattaaatcaataaaataggacattgcataagttttcaaacaataaaatcagctaaagaaacttacagtatttaataagttgctcctgcgccaagctttctagccgttgcttaagggccttattctccatgctcagaataagattctgctgattgagaaattcaagttctgctgtaacttcagaaccttctgcctgtagaatcacacaaacaaaaacattaaaacaattttctattaaaaacttaaaagaagcattatgtgttggaaagtgtctctagaatctagatacaaaaggagtcctccagaaaaataataacaattaaacaaattttaaatctacatcaaataaatccagtctttaactccagattgatctgtgtcatatttcttccaactactgattctttttttcctcaagcaaggctccccacctaatcctacaatagttggagaccaggaaactacagaaaattactacgtaggtacccaggaggtgctcaaacctcaaactttgtgggagcaaaccacatgcctaaccatttgagctacccctcttaggattccaactaataatacttgcctgtaaagcttgtacatttctctccagttcagctatgtactgaagcttccggacacgtgagcgctgggcaaattgcctgtacaaatagagtttcattttatcaatgtactcataatcttgtttcaaactcacaaacatggtttgaatattcatttttaatctagatgcatgtaataccatcatacagccacaaagcaagaaagtaataaaagcagtacaaagataaattgaagatgagaattaacttataaaagataggaccaaaatctcagaaattgtccagacaatgaccctatagctattagtcaataaaaactttaattcattagtacaaatttccaaagcttttatgccagtttacccatctttttccttgttcgtttgcatgtgattaagtcatagagaaaaagaatcatcattttgaatgtgttaagcaactatgaacaaaaaagtgttaacgtttcgaatatatcgtactacattcctttccgtaagggttgctattattataatcctataggaatcaaagtagattagctaaagcctttgattaaaaatagatatgtttaagattatatgcataaaattatgtaaagcagcactaaatcaacaaacagaaaaataaaatcataaaaataatgcaatcgtgctaagtttatcatccaggtaagtggtagatatgaaaaaataaacaagcaatttaggtacatactgtttagcacgtttggtatcagtgtctgaagatgaaggcctaataccaggactatcctttttgtcggaagtctttgaatcatgtgaactagtttcaactaagtcatgcttttcacttgctgtagatggatggccatctgcttcaagtggcatgcaaaaagatcctgaaccctgacgagatataatatccttgccagaaggaagaccacctgggatatttacattcaaagaagagtcccatgctttattcttctgttttgccatgttcatttctgcatagaatgaagcatgtcgcaaatccttatgatgatcgaaatcttgagatccccaagaaggagttgataccaaattcctatatttgaaatcatcctgagcagaataatcaatgtttgagtgattaattgcatctacatatgcaaaagaatcacttgatgatcgtcggtggccgcctctgcgtacaggtgtctcaggttcattaagaaggtcatcaagccaagaaggttgttcctctgcaagaaaactctctgaggaagttcgttggtgatgcgaatttccttctctaggtttctgaacagcttttgatccaaccgcaggactaacaacataatcggcatatgatggtgaaacactaggaaatggactttttggaggaagtaaggcatgttttccagagtacatcaagcttctaaagttagtcgaaccctttgaatttgccatagctgaggagcaaaaagtataaccaacattataaaatgaatccataatcagcattctggcagactaacagtaaactcgacaatacttacacagggaataaaagcaaaaagaatgaaaccatgaaaaatgaacaattttgaagaagaaaaaaattgacacaaacatcaacaagaacagaaaaaaaaagaagaagaattctacaacagaagtaaatgaaacagctaactatagaaaaaaaaaaggccaaactacgtgccataacaatgcaacccccaaaaacattttctacaaaaagtttaatacaagaccatacaatttagtaaaatgtttcaactgagccatccttggctcatataacacgggtcaatcccacaatgggcatggttgccacagtaaattttcaaatacattagccccttcaatctcaattcaaccttatattttatgaagaaaactaaagaaacagaaacatattttaaggtatcaatccccagagagcaatataaggtgatttttactgttaatgtttttctttttgccacaaaaacaaaaattggacctgaacatatcagaaattaaatattcaagccattctttgttttcccatctcacattttctcaagaaccaaacagagaataaacaaacaaagaaatgtagaatgaaaaaaatatatatctttgaaacataatctatgggattccagaaaacaaaaatgatgcatctataagattagaagctgacttatacagaaacagaagaaagatagattcgtcttccaaaccaaaatcaaaaaacttttttttaaaataaaaaaaaaaaaaaaaatcatttccttattgaaaaaacaaaaaaaatgaaaagaagcaagcgtaccttgttggaattaagaatcaagatctcaatatgcaatgagaaaagtaagcgagaatattgaaatttaaaagaaaaaaaaaatggaaacaaaaatcgcttctagggttcgttttccctgtttttccttctacttctaactctctctctctctctctcttcctcgttgaggcctgggttggaatgtaactaaaaaagtataaaccaatttttgtttgtgtgttttaaagttttgtataattcatattttcaccccaaactatctaccaaatattattcaagccctttctttaccttttatttttcatttttaccttttctataaagaatattttgttttattccagctaccaaaccaataaaaattggggtaagtaataattagacttatgaaatgatgttacatttctgaagatattttctaaaataaattagaattaattttacaaatagtatttttcttcttcccatgattcctaagatttaatattatgtaaaatattacaaatttcacattaattaaaattgaccctattctcattttaaagcaattcagttaaatttacaaaattaaaaacaatttttattaatcatattaatctacttttgtttgggaatgaatctaatatttaatttgagattcataaacggtggtgactacatgaagactcttccaataaaaaagataagtcttttgtttttatttttggcttgaaaagattgtttctggtatttgataggagggttttatcaattattat

SEQ ID NO: 18460 - DNA, 4913 bp, Cannabis sativa
aaaaaattctcagcaattttgttcaacatcatgttatgcataacttggagatcattcttttcttttcctttctagtggaatgactaagaaaagaaaactccatccaagtgatgctacttagaactcaagaatggtcaaattgaaaatcctctcaaaaaagtttctactattctcaaccatttaaatacatacaaaaacaaaattctcaaacctaagtagacatggcaaagaggaggaaaaaagtgagctttaccttcgctcaactactcgtcggtcacgcaaccccttgaagctttctccacattcttgatgtactatggaaataaagaagaaaagaacatgaacattaggagatttttgatatcaaagacgacgacgatgtttttcgaaaatgggaaacaaagggttttttcttcggttattaccttgaagagaactccggaggtagccttgtatggtggttgaatccaattctttcttcgcctttccaattctttatctgttagctcaacatctattctcctattttggacatcaacgttgatgatgtcaccgtcttcgagcaatccaataggaccgccttcctggtaaagattttgcaaaaacatgtagtaagaagggcagtatttaccaactatgatcatggatttcgacatgagaataaactataaagaacctgtgcttcggggcatatgtggccaacaacaaatccatgtgagcctcctgaaaatctaccgtctgtcaataacgcgacctcctgcaacgccaaagaaaagtgtacccaattcacatctattcgagaaacaatgaaccaatacaaaatctactagaagacttgtaattgacaatcgaaaatagcttgtgtgaattcggaaaaagcaaggacaaacaacaaatcataacaaccaaattttaccttccctagacctgctcccatgatggcactagtaggcgtcaacatttcgggcatgcctggtcctcccttaggcccctctcctctaataactacgacttttccctaaacaagaaaatttcgacaaaagttaacactgcattcaaacttggttataggatcaaagaaaaacgagtgttttgtaaaaatagcctttatgaaattttttattagcaaaataactttacaaaaaaatttattagcaaaataacctcatatggtcgtagaaacgaacataaattgcagtgtgcgactatcatggtcgcatagaataaattaagtgagattattttgcaaattttagtatttcacattgttagtttggcaaatttcacctgaaataattaattagtcaatcctacaaatagaaaatgtaccttaaaccttgctggatcctcagagatagctgcaagcattgattcctcgccttcgaagacaagtgcgggacctggaaaacattctttcaatcaataaatcctttgaggaaagtaaattgaacttcaataaagaatctcaaggacaatttaatcgacaaagacatctaaaacatgaaagagacctgagaaataaatcccctcttttccagtgattttggctacagaaccctctggtgcaagatttccatataatatttggagatgtcctgttttcttgatgggatttgccactggtcttataatatcctgaaaaagtagaaaaaaaagagagaatttcatcacatgatttccttcacaagacataacatatgaccactgagttaacataaacacacaatattagagtgaattgatttcgaaagataaaaaagatgttatacctgtccttcggataaaggaaggaaactttttgcattttcagccagcgacttccccgtaactggagaaaagaagtttattatgttaaccaatgcagcagtatagcttattagcaacaaatgcaagcaatccgaatctaacttaccagtcatacaatccccgtctaaaaatccaagctccaaaaggtaccgaataactgctggtgttcctccaatctatcatagtagtaatcattgtccacaagtttagaaaaaaacgaaaaaatagggtacaatcgatgtttaattataccacattcacaaaaacatccaaagggaagttaagaagaccttgtggatatcctccatgacatactttccactaggcttaagatctgcgaggaatggaaccttatcgctaaccttctgaaaatcatcgagagataattccagtccaacagacctgccaaaattcttgttatcagctatttcatcacaacgcaattatcagtactacacatggaatatctggttgctcaccttgcaattgcaattaagtgtaacacagcatttgtagagccacctagtgccatgacaattaccatggcatttcgtaatgatttttccgtgatgatgtctcgaggttttaagtccattttcaataattctagaagatattttccagctaaacggcattcatccaacttcaatgagtcttcagcaggagtagacgagctttcgggaaacaacaaagttgaaaaagattagaaaacgtaactagcaaccatcatcacactaagtttgctaagatatcccgagaacgaatattctctacctgtaaggaagggacattcccatagcttcaatagcagaagccattgtattagctgtatacatgccaccgcaagcccctgccccaggacatgaattcatgattatgctcttcctctgctcatcacttatggatccacctacatattctccataacactacacaaaaattgaaagataaagatgattgagagccaattccaagatgctcggcgtatgtaacaagacccatcacgaaaaaaacaaaggcaactgaaaaatagaggctacactttatctaagcctgcccaatctgcagttcatatctccaattgttttaatatattttctccctacaatcctgtacaaccaaggtttagcaactttccaaaatgctttagacattgcgaaaatcagaacagcaaacacttccactcctagaagtgttctcttaactttcaaaaatacaaaatcagacattatggaaatatcaacatcaataagtaaaaaactactattccatgtgttgtcactatgaatgacaacagcacaggtaataacaaattgcatgatctatgaaaatcggctatcttagaaaatgttttgaaccatccaattccaaagcacagcatcaagtgcttacctgaaaggcggatactatatcgtaagtatgaccctgaaagtgaccaggctgcaaaacaatgaagcgagatatacaaatagttagttgctttactaaatgctaacctctgttaagctagaatatacatcaataaaaagcatagtcaactttaatatattacaatattggaatgccttttcaaccaaataaataggaattacaaaccttgatagtcccaccataaaccatgatactcggtcggttaaggcggcccatggccataattgtacctggcatctgtaagaaaagcactagcataagattcacaaaatctacaagtaaaactaaaacaccaagcatcaagcatctgatacaccattgatccaattcagttcttgaaagaattagagaataggcattttattgatatcaaagaaagaattacaattttccaaactttcaaggcagtttggtatcttcctatagcaatattttactctaaataattcacacaaaattccatatcttataagactccatcttagaatttataggcctagactaacaaaagactcctaactagccaaccaatagaaatctagtattaacacacaacatcatctcagccactaaaggacttgacaattcagcctctaaaatattaaccaattatatcattgatactaatatcactcagagtaactctagcatagtctattagaaaagttattaggcctaactcaccctaacaaaacccggcttgttaggggatgattgctctcaccttattaagtgaatcaagtctatatgaagccaatgtgggactttgataccatgccaaactactttgaacaaatcaatattagaggcacccaacattgcaaaattagggatatatcaccaatgtaggactttaatatagtgtaagtattaaagtatgaaatgcaatccataaaaataaagccttaaaccccaaaagaaatcctaaacacttaacacccattactttgaaacaaccaaaatcattgacacaaaacataaaggaaggaactttactcacatttttatcacaaccaggaattgatatattaccatcataccactgagcactcataacagtctcaacactatcagcaatcaagtccctagactgtaaactataacacattcctctagtccccatagaaatagcatcactaactccaatagtgttaaacctaaaccccaccattccagcttcttgaaccccttctttgacagcctcagaaaggttcaacaagtgcatattacaagtattgccttcataccaaactgaagatatcccaatctggggtttactcatatcatcctcagaaagccccactccatgaagaatggcctgagacccaccttgggatttgggctccgttatttgagagctgtatttgttgagcttctgggtcttcgtcggtggggattccacggcgatcgagggcggagattgaacagcccggacagtgaaagggagtcgtgggtttagggtgatacgtggggagggagctagaaatgcggcttgcatggtggcggctagagatgaaaaaggagaggtttttggaaagggataagcgaaacccaagtggaaaatgattgtgtgtgaagtgttgggtgtgattttagggggacttttggtgatggggaagaggtagagagagaggagaagagactgtagtagaagtaggagtgtgtgtggtactgtt

SEQ ID NO: 18461 - DNA, 5924 bp, Cannabis sativa
  modified_base (28)..(34): a, c, t, g, unknown or other
tctaattataaaattgaaaagtaaaaannnnnnnatagaacatgtttttgaaaaatatatttacttttttacttttaaaaaagaaaactgattaaaaaagtgttaccaaacgccacatatgtatataagtatctagtaacttacctactctccccctagtatctaagtcattgatggtatattatttgtgtaaagcttttattattatttttatatatatatagatatatatatatataattgctatctagcattatctaaaagtgacatatggtaaataattactaatattataataattatttaattaaattatgtgttacttaatctttaattacaataatattaatatgagtgctagacactattgataatgggcggattcacgtattggcggaagcgaagtcgctccttgaaaaaagtaaacatatatttttgttagttacaatatatatttataattaaatttaatatatattgatatattattagctttgatgtaatgtttaagctatcatacatttacctttaaggtcaagggtttgaattctcaataatagtatttttatttgttaatatttaaagtttaccttcttgaactctattaatcttttctaagccaacatttttattgttattatttttttaaaaaatatagtatcaatttttaacatgttatatcatgtagaaaataaagtacgccccctcatttagtaaaaaatacgccattctcaactaaaattatgggtccgccactgtagggttggacatccgattctatccaatatttttcttctaatctgatccaatcctattactaattagatttacataatcatcattcgatccaatccaactatacctcaaaattttatccgattataccaatgattttcaattggattggatcaatattttaattagatatccaattacaccattgatttttcaattggattggatcgatttttcaattcgatatccaattacaccattgatttttaatattaacttaaaaccatgaagaaaaatgcatataaatttaaattgcacctttcattttagtttaatactccataaagttatcatccttacaaatttgatgcaactataagtttgaataaggatcaagtaataaaataaaatccatccatacggaaattatgagtcccccccaaaaaaaatacatttgaatatgctctgtacaacttttgaatatgctctccgtacaatttagagaatgaggatagtgaaacaactttttgccaggacgggtggtggtgtgcccaccacggtacagtggctggcagggctgttgtgcagctcatgggacacttttctagtgtctcagggttttgaaaaccctatttcctacaaaagagtgttgtttttggtattagggcctacatcttttcacgacagggctttattccccaatattccttactatttgcttgatttggcggctgagaatcttggtctgagtttttttccaagtggggataaggttttattgtttcaacaatggcgattcgtctatttgacaaggagatcgttaactcagtgagtttagaggagacggtgaaggaggtggagaatttttccctggatgatttctctctggatttagcggctaattgtgacgcagcccaggcgacgattgcaagctcagtggtgggtcggttcttctcaaaagaaatggtatcaaatgggttgctccgtaaggttttgactaggatgtggaagttgaagggtggttggaggttccaattggtggaaagaaaaacgaggacctttgttttccgtttccacttcgaaaaggaagcaaagtttgttctagattcccaaccttggaatccctgtaaaggattcatgttagtaactccgatatcgatgattgggaagtgggcttatgcggatttaaccagtttttcgatttgggtgcgagtgatggatgtgcctaccaagtttttgaacaatgacgtagtagtgagcgtggcgaatagggtgggaactttcattcaggcaaacaaagtaaggtgaaggggtattcttctaaaccacttcttacgtttccaggttcgtgtctctctgcaaaaaccgatcttggcagggttcactcttccgggggagggggaaaagaaggtttgagctacttgaagtacgataaacttccttctctgtgttacaaatgtgatgttattggccatgaagattcaggatgctcaaggaggaaagggatggtgatcctggatgatgggaggagtatttctttatacggtcctcaactgaaagaaggatctcgcatagagaatatctttggcctgcttgataaagaagatattcaagagaggaaaagacttgaggaggaagaagcagagtacgtggctaaaacttagatgggaaatgtgagcccccggagaagaaagggagcaatgaagctgtggaagaagaggcggaggtgacacagacttactgccccatcggagttggagtggtgattcagaatagttacaataatttctcagtgaggatgaatgactatgctaaggctccaaaggaaagagcacacacagaaaatgttgcacagatggccaaaattttcaagaacgcttttggagacactatttttgggagcacagaagggtctattctgaagggatccaaagggaaagcaaaaattggaagaacaaatttgaagtaggttggacctaaagggattcctaaaaccctaattttcggggggaaggatgagggagactcccaaagggtgcgggcaaaaaggaagaaaaccagtcatgaaagtagtggtccggagagtgacatgacacatggaggagagtctagagacctgggaaataattttgaagtacaagaagaaggaggtgctcaagagtgcgggaagaggccatgtgttggggatacaggaatgaggaatgatatagagttacagactgtcaagatgtctttgaggagtgaggaaggaagctcaaagacccccaacaaagatcaatattttatcgtgactgaggaggcgggcctaatcatgccccctaagtccccatgaggatcctatcttggaactgtagaggcttggggaagcttgctgcagtcaaggcgctccatacggtgatctgaagtgaaaacccagatgtagttttccatatggaaactaaacaatcagagaactttatggcgaatctgtgggaaaaccttggttttttttatggtaaggtcgtgtcttcggcgggagcctcgggaggaattgagttattttggaaacaaggttggcaggtggagattttaagagcggagcgtaatcagatcaaagttttgtttggtgctaacggcccctatcctccctggattggagccttcatttatgcgcctccgcatcgtgaagatcgtaaggagttctagactgaatatactgaagaggtttttcactgggattccacatggattttaacggaagacctcaacaatatagtcaacctagaagaaaagacgggggcagacagtttactttgtctgaagggtggggtctcagggattttattttcaacacagagtgcattgatttggaagctactggagccttatacacttggactaatggccatgatttggttggtctcgtgaaggagaaacttgatagagtcctcgggtcggtggattggtatactttgttcaccaaggcaggagtgaaaaatctacctatatggagtttgaatcactctccggccatcgtggatactcagatggactccgaagctattaaggccccttttaggtttattgatgtgtggacgatggacccttcgtgcaagaagactatagaggatgcgtggaccattaatgttaggggagtgagaagcttcgtgcttaactgtaaacttcagaatactaggaaagccttgtagacttggaacaaggaagtttttgggttttgtaagcacaagaagttgctacttgagaaattattagttgaggtgcaaaacatgcctatctctttggaaaacataaaaattgagaaagctattttgatggaaatggaggaagtggaagctagacaatagagtattttcaagcaaaagtcctgtgaattgtggctaaagcagggcgacaggaactctaaattcttccacaagttgttaatagtgagaagaaagcagaaccatatttgggctatctcagaggatgaagctaactagatcgagggtagaaataatattggtgagtattttacatcaaagtttgaagagctttatgcctcctcgaatccagcaagtttggatgggttactgagttaatcggtagctctgtcactgaggaagagaataggatgttagtggcaattccttctgccgaagaagttagaaaagtggtgtggagtatgcctcaattgaagtgacctgggcctaatggcttccttgggcggttttatagaagatactgggatattgtgattggtgatacgacaaagtttgtccaagattttttttccacggccaaattcgtgagggtgaccaatcggctgtttattgttttgattcctaagaagataggagctcgaagatttgatgagttttgaccgatcagtctatgcaatgtggcctataaaattatctcaaaaattatagctacaagattgagtaatattcttacaagattaatttccccctaccagtcagcttttgttcctaggaggtggattgcagagaattcaatcttagcccaagagattatgtttgatttcaggaagaagcgaggtaaacaggggtacgttggtataaaatgtgatatggcaaaggcttatgaccgattagaatggagttttcgtgatcaggtgtgatggctcacagattcaatgagaaattcagagagttaatcaggtggtatgtggcaactgtccgatattccattcttcttaatggtggacctctgaaggacttctctccgagcataggattaagacagggagatcccctcttgccttacctctttattctttgctcagatattttgtctcgcttgatattgtgctcggaatgggagggctctattcagctttatgttgcttcgcataatggccttgaaatctcacatcttttgtatgctgatgatactatgatttttgtgaaggcagaggtgaattgtgtttagaaagtgccagagtgtttggagaaatattgtgcctggtctggtcaaaaactgaatgaaagaaaatcaaagtttattttctcgaataacttccaacatgaagaggttatgaacattcaaaggattctcaagtaccctttagccagaggagatgaacttttcttggggaaccctttgatgttaaggggtaccaaaaaaaaaagatttccagtttgtggtagataaagtggtgaagagactagaggggtggaagacaaagatgctatcccaggcagggagaactgtcctcataaagaatgttgtccagtcaattcctttatatataatggccaccttcaagcttccagtggggatttgtgatgagttggaaaaagtcaccagacgcttttcgtggacgcggggggaatggaggataagaaattcctggctttgaagtcgtgggacgctatttgcaagccaacatgttgtggggggctggggaatagaaggtttcaggatatcaatttatgtctccttgctaaactggcttgggccttggcttcgaataagagctccttgtagatcaaaatttttgaggtgaaataatgtaaccttaaatcgtactggtcatcttctatcccttcaaatggatccaaaatggccaaggatttatggagctaccgcgatttctttaggggaaattacaaatggtttgagttaaatttatcacacttaaagataaaaataacacaagatgaataatacataattttatttaatca

SEQ ID NO: 18462 - DNA, 4774 bp, Cannabis sativa
tactagtgttttataaaaatacagtatttttgaaaaaatttccgtgtgacagtatttttgtaaaagttaactcaaattctaatatttttgtaaatttccttttttataagtggcattatataatttaattaataatatttttttaaaaaaattattttcttaatttatatagacagatatttaataaatacttgatactaataatttttcttttttttagcaattctccgaacaaaattacttattatcctattatattaccctttcccgagaatataattatattatattatatatattatacatatataaaatttgggatcgccggcgatattgccgtggactttccaaatccgtaagcagcttcctacatcttcctaattaatctaatcattaacctgtacacagtaataacatttttctcagaacaatcaaattttcttttcaagttttcagagattatatatatataaatatattgtggtatagaggtgaattgtgaatctgggattttgttattatttatgacaattattcagataagagaagatatgtgtcgccagagctgttgtgtgcatttgtctgtagaggacgcagtggctgtggaagagactctgcttgtgtattgtaaaccagttgagctttacaacattcttcgatgccgtgcccttgataatgtaacgttttacgacattattttcatattgtgtggaatcgtatctagtgtaattgggattcttttgatttgtataattgtgtgatttttactgttattttctttttttattattataatgcaacctggactatgtctaagtgtacagaatttgtgcttgaatgtaaaacttttagctttgaatttgatctcacaaaaacaagaaagcatgagtttttaaactatttgatattataaactggagtcattttgatatttgggcttggctttatttaattcatcttcatattgatgctataaacgttatattttttgtttgattgaattcccattgtctggttagaatttttgtttgtgatattacccttagcttaatttctattttctaattgagaacatttctctttgtagccttcattccttcggagatgtttgaattacaaaattcaagcaaggcgtaaaaggaggtattattttagttacagttatcttttaatgctctctcttatattcttatcataatattataattttcaattctactgaagtctttgagtagaggtttctgtattgtctgttgagttttagcaaaagcttgatgtactctgatctccattgtagtctttgctgctcatttggtatttttagcatataataaatggagacataccaagtcccatgattcaatggtctttagcattttcatggcctattttatggtcatttctttattcatactctatcacagctgcgtgtgcacgcagtactacccaaatgcatctgattacttaacatattgcatatgtaaaattgagaagggtcattggtaggcaagttagatgctgaatgctgccaaattatgtttcagaatgttgttgaagcaagtttttttttgttttttatttttcattgactgctcgccttgtgttagaattttcaagactactattttaggttccatatagtttttcagtaattaagtagttggtgtaatgaagaattcagatggtttaattgctatacttttcactttgccagagtaatactcaaggattggttcaaaactgtagtttgataaatataatttactatgcaactcaattgaattaaagcttaaagcaagttcttatgtaatttttcttacttgtttcactcttgtaatgattgttttgtgcataaattggctgctcaattagtttgttttttaaataattgtgtaggttgagggctggaactgtaatattcaattatagggactgtaacaacatgcttcgaaagactgaaggtatgaaagaagtaattttcaacttcaatgggggatagtgagaactgaggatggtgtgttagaggattctgatttcaagaattacgttgctaagaagaatggttatatagttgcatttttgggagttatgtatgtagttggaagtatagagcatgtagtatgtatcgggaattacagagcttgttattggttaattcctttcctaaaatattggtttcatgtttgacagtgttcagagatatttatacttttctaaaatattgtctcatatgttattatattgccgacaaagttaaaactttagattcaatcttgatttaatactaactgttttgtgtacgtgtctaacacagtgactgaagactttgcttgtccattttgcttgatgcaatgtgccagctttaaggtattttgaatatgatatttttccttcaagcgaatctaaagtccttgaggcttcatgaacaaagcatagggcattttatgtagataatatctgataagattaccatctttgtaggtgttttttcttgtcttaggacatgaattgtagttctgttatggaagccttttagattgattctcatgatgaacagatatttgacttttatatgaattattgtcaattcttcttgataataggcattatatagacatcagtcttgatatatatctcattgtactattattgcacacagagttttctcacttttcagagttttaattttacttcttgtttcattgtcttttatattcaataaggattttcattatcataatttcatctaattaaacaatagaagctgactcttttgtcattatatgttgctgtaactcctgaattcagcctttttctcaacctttttgtcttagaaagctgctatgaggtcattttttcataatatttttagtattagaagcttatgtttttccgtcctttataacgtattatattctttagtacattttgtttcatcatgtagagaaagatactaatcttagctttcaaaattgcattacatgtttggtatgatattaaaggagcttaattttttgcttgcagggtttgcgttatcacttgtcttcttcacacgaccttttcaactttgaatattgggtttgtaatttataatatcaagttgttgctttctcataactttatagaggctaaatgtagacacatttatttgtaggtgactgaagagtatcaggcagtgaacgtttcagtgaatatagatgtattatctgaggtcaggacatttattctcttaagaattattattgaagatttttatgtttcagattgatattgattggatttctcatgtcaaaccttcaaaaaaggttgtcttgttcataacacatacattaaatatggaccctgtgcttgttttttaggcatggtaaaaaaaaggtgaatgaattgcgtgttttatttaatagaatagtatgtatttatatacaaaattagagagagtaaataggaaactaactaaataaagtaaataagaaactaactaaatagagtaaataggaaactacccaaatacaaataacatagctaatatattctaacactccccctcaagctggagcataaataataatcatgctcagcttgttacaaagatcctcaacctgcaccccattcaaagcctttgtaaaaatatctcctaattgttctctaattttcacatatcctatggagatcaggccttataaaattttctcacgaacaaaatcacaatcaatcttaatgtgcttagttcgctcgtggaacataggatttgaggtaatatgaagagcaacttgattatcacaccacaattttgctggaactgaagttttaaacccaaatttagtcaaaagttgataaatccataccatctcacacacaaactgtgctatagccttataatctcattctgcactggatccggacacaacattttggttcttacttttccaagagaccaaattacctcctataaagacaaaataacctgaagtggatcttttatgtaccttggaactagcctaatttgcatctgaaaaattcttgtaaacaatacctcgtctgggtgttcctttcaagtaacacaaaattttctctgaggctttccaatgatcaattgttggagatgacataaattgactgacaacactaactgagaatgcaatatctggatgaatcacagtaagatactttagctttccaactaatctgcaatacttcgcagggtctttaaatggttctccatcgctcattaaatgaatagcaggattcattggagtactacaaggttttgatccaaatcttcacgtctcaattaacaaatcaagtacatacttcctttgagatagaaaaattccttgtctactccgagtgacttcaacttccaagaaatacttgagcaccctcaaatctttcgtgtggaactaggtatgaagaaatgatttaagggatgagatacctctaatattatctccagtaataacaatatcatccacatacacaaccaacaaaataatactagcacttgatcttttatagaatatagaatgatttgacatacttttcaacaaacacttttcaacaaaccaaatcaacaaaccaaatttctcaacaacctggctaaatttaccaaaccaagcacgaggactttgtttcaaaccatataaagacttgcgaagatgactaactccccctaaccctccctgagcaacaaacccaggaggttgctccatatacacttcttcctcaagatatccatgaagaaaaacatttgtaatatcaagctgatgcaaaggcc

SEQ ID NO: 18463 - DNA, 3921 bp, Cannabis sativa
attatattgtatttattattactattataaattttattataatgtgtattgtgttattctccaatacatataaaatgatccgtattaacttatattataatatttataaacttggatcagaccttgaagtccgaccacgattgcatactagacctcggatccccctggaccttagaccccaaacctcgaccccgaagctgaaccctgcattttggcctcagactcgaacctagacccaaagtctgatctcgaaccccaaagttggaccttggaccccggcctagcttcaaacaccggaccttggacctcagaccctggacccaaaactcgaagctcaaatcgaaccccagaccctgacccgaactttggacttgaactttgaacccgaccccgaactcgaacccagacccaaacttgggccctaaactccaaaatcagaccccaaaccctagactcgggctccaaacccaaatcctgggacatagataaaggtcggagttaggtcgagtttatggtaaagaaaatataattttacacaaactattaaaatacaaattaataccaaacatagtattgaattaaataatattaatccaacataatactatacaacacaatataatacaataccgcataccaaacaagcctttaaggattcgtttagtacggtacattacatcgtattgtattattatataatattatatataaattatactttattcaatatttttatgtaaaactatatgtagtattgacttttatgaacatgtaaatatataatattttaagataaattaaattttaacataattttacataaaaatatgatatataactaaatttaatataatacaatatggcaatttaatataataatatttcactgtgtgttgactgatgtactcatctgtctcttgtcaaaaaaaaaaaaacagttccacttctatccatccatccatgaaacaagatcatcctctattaattactctaaaatttctcttacatctttgtaaataacaaaatcaaatgcataaaaattattattacaactataatttcagaaatgtttacttcttgcaatgctaactagtgcagtatctgatctttgttttacaaattctatcagaccaaagggtacattcaatacaatttgctcacacaaagcataagagcatagtatttacataagattgcttaaacaaagcaaagaacaaggcaaaggaaagcaaaaagagagcttatcttaatcatgacatgctgcaatttagcagcaagcatttatctgccttttcgacgctttttcaatgtagcgcagtccggacaaaaccattttcctttcggttgttctttcaaaccaacacagccgaaatggaaccattctatactgcactgtcaaattggaaaaatgttttgtcagatagtgaattgcacatataaaaatataaaagagattccatggcaatagggaaggcattacatacacttgggttatcacatgcaaccattgccccatggctaacttgtttacaggaacaatatgtcggttcgtttggatccaccggtacctctagatccatcatagtaagatttgacggtgctgtagctggctcggttgatgctgatactgctgctgttgctgccaggcgtgttctgcagagaagaaattctaatcaaactctaaaattttaaacatgaaaaataatagcagcttaaaatctgtgatcaagaattgaaaataaaaattgaaaagagatccgtgatcaagaaaagatcttatacttcttacggcctcctctaccgccttcaccaccctttccagattttccaccactatccaaactcgcagcaggggagccactagcaatggcactttctttttctgacataatcaatttcaataaataagtatacacaaataaatacgagaacttagcataaattaattctatcaattggatgtattgccaagcttaaagaatttcaagaaataatgtaaaataccacgtcggatttcttcaccgagttttttgaaaatttgatccagttgtcgtatgtgagtatcgacctgaagcacaattattcataggcaatcaaaaaaggttacttcaaattcaaattcaaaatcattaaacatgtggatcaactaaaagacttgattgattatctattttgggaaatgttaaaaactcattttagaaaacactcactccatgcttcataagagttgagtacaatattttgttgttttctctaatttctctgttttgtatacaaaacaactaaccagttgaattttgaaaaacaaatatttttggtttgcaaacaatatttccgaatcataaacttttaaactaatatttaaaacttattgtttttgaaatggaaccatatcagcatatagaaaccatccttaacatctttaagaatatatgtttttacacctgttttgtaatatagtttaaaagggtatttctttctgtatctattttgagacgaaagaggcttaaaagtaaatgaatcagtacatggaaattgcgtaccaattcataagcctgctcagccaaggctaccttctcatctgcaatcctgatgctgtgcttttgctcatcaagtgcctcctccgagaatttagcaagtgaagcatcaggtttaatatttcccgacctaacctctcgtttaaattcctctatctcttgttcacaacgttgctcattctgtttctgaagatctgctcaaaaacataagttttcttggccgaatcagaagagaaaaatctcaaaatagtaaaaatatctttattaccatattacattaaaaccaaatgtgattttgatcataaatatatttggtgatacaatacatacactctcgatcaaatcaaagttcactatctcttcatggtatactagttctattcaaagttcaaatcaatcactccttaatgtcaatgaactcagacaaaagtgtaaggcactttttgtttattactaagttaatctctctacaacacttaatggtgatattcaaatcataccttgtaaacttttatctagatcctttaacaaagcatacttcttctgtaaaatattaggaagtgcgtccaagcctgcataaaagcacatttcataaacaagaagaataagaatgtttaatatcaacatataaggttcaaaagtgcagtgcaaccacattaaataacaagaaaaatcaaacaaaaaattactactaattactctaaaccctgtccttattttctcccagttagctcataattaggattgagaataaaagatgcaaatttgatacttgatagcaaacaatttgacttacataaatacaatagttcaaagagttaaacaaaaactcctaaattaccagaataagaccaaaagaacagtaaaaaaaatgctctctttatacaaaacaaagtgaatatgaatgaaattccccgttaaatgaagccaaatggaaaataaattcatatttttactcccatataaagtgaaaacatgtagataaatggtaaaataaattagccccaatttgaaaaagacaattactttattgaaaatgggaattagggttcgtagaaaattaaaaggaagaggagcatactggtttgaaagtcctcgacgaaagacatttgggtccgacgtagaagccagaaaaattgaaaaggtgtgttagggattgaagggaggggaatttggattgggggctagggtttggtttggattgccggcgagaaaggagattgtattctccggtcagttacttttgcaggggacaaacagtcacgtgcagatcacgtgcttttccgagactttaaataagaatatatatcttagtatctcattctctatttttatcctcactttacttatttggaatctatcttttttatttttcatatttttg

SEQ ID NO: 18464 - DNA, 2649 bp, Cannabis sativa
gaaaatggggctcgaaaaggccaagttaaggccttgtatggtgaatctttgtggattcacctgagatagcgccgctagccttgggataatccagctcgcattaactttaggcgaggcacctttaactgctactcttatgcaagattttttagttgtcgacctgccctcggcttacaacatattgttgggtcgtccagcactgatcggactaggggcagtcagttcgatcaagcacctatctttaaaattccaaacaccagatgtcaggtcacttaggacacagtcttgtaatagatgaaatggacttgacataggatgtcttaggatatgatgggggtataaaaggagaatggctcactataaataggacccttaagttcattgtaagggagggattttttaaattttctaaaagcaatgaaacattatgaccttgagataaaagagatttatgagatccttattgtaaaaattctttgaattaagttttcatttaagtgttagtttaaaaatctgattatattgttaacaagttctaaccgtcaacagttaggtttttttgtatttatttagttatcgttaagtttgtatttattttattttcgttgatcaattatgataaataattttaatttaaaattctatttttttttttaattttaaaaatattgatttaattgccatataatgttataggatggaatttttcgtagagtttgataaaccacataggtaaataacggagtataaggaaccgaacaataaatttgaaacaaaaagggacctaaggtagtttaccgatcaaaaataaagaaaaagggaaaaagtgtatacagaagtaaatgtaacgaatttgacaccaaattacctgaaaacaaataataaaaaattaaaatggtatgctatgctgaaaagtaatttagagagcaataagttttttttttctttttccttctttcttttcttaaaactcacacaaaacataaatgaactagaaacaaagtcttctcttacatgcctcaaagggcagtggagaatacaagttattgtagaagtttattgaacccatatctgtgataatttcttcaattaagtctttgcaaattcggtcttgcaatgctaagcctattcttccaatttcacgcctctctccccaagcaatgtctttggatacttcttctacattctctctcatggcttcactagtccataatgacgatgatgacggtggtggaagggatgctgctgcaggttccactcgatgtaaataatcaggactactaacgattgtcttcctatgaagagattcacatgtgattctatcaaagatgcttggattgatgaagtcttcttctccttttcttttttgttgtcttgcttgatgttgaactcttcctgtaccatgttattacgtttaatcatacaaaaaattaaatatgatataattggcatggaaaataaaagtttgtgtaattaccattatcttaattttgaccgatataaatagagtactcaagtagctatcatgtattagtggacatctaatcctatctaattttttttgtatcaagttaaaatgtggttgttatcaatatcatgaaacccaaattaatctttaaaaagtcaatccaattaagtcattctcgttagatttccttcaaatttaagtataattttcttaaatacattaaatatcatataaaaacacttaatctcatcactaatttaataaataaaatttgactgcataaagttgtagaattacttatttctaaccgtaaaactaaaaatttaaagtaactaatacacctacacaattatcaaaactaattattgtagttaatacaattactctctttcaagttttctacactataggagtactgtggaatggtgaacgatatatacgtttaatatatacattgccaatacaaattatctatatagtgtacttaattatatggtataatcattatatcaaatccataaaaatttgtaacaaattcagaaaaaaaaagtgtaacgaatgtataaaaacatccgtcacatagatataactatggaatcacctttttttttttttcttttctttgaaatccataaatatgtccatctcatacatattttagtgcatttattgtacattttgtatgcattggatatggctacattctggggtgggcatcatcgaatccaatctaattgaaccgaaccgatttaatttaatccaattacaaaaagttagatatcaaattacaaaaagttcgatatccaattacaattgaattggatgctaaaagttaaattctaattgaatgggatcgttattggatgtcaatttcaaaatccaattaaaaatcgatccaatatccaattatatttatatatattaaaaaattatttatacaataaaaaatattgaaaaatataatatatatttatcatatttttataaaaaaatttatatgttgaatttgtaacacttgactattttgcgtatttatttttatgatattttgttctattttattacttagaaatatttttttaattattcaaaacttttagctacattacacttgtaagaatagtatgtttatgaagtattaaacctaaataaaatatgatacttaatttttatgtattttt

SEQ ID NO: 18465 - DNA, 4920 bp, Cannabis sativa
  modified_base (4877)..(4889): a, c, t, g, unknown or other
tgtatagtattacatatttatactaactagccaatactaacaattgctaattagttcctataactttttatgtaacagtctactagaaaatttattttattttaatgtactatgtagttagtttgatgtgaagcaaatgaatgaaattctttaaaaaaaaaagaggaaatcagaaataaaaatatacaaatatctcttttagtttaataaatatgcaacatttaactgtgtattttttgacttttttcttatgggatttttttcacatttttttattatttagaaattgatagtggtaacttataagtactcatatattcattttaaaaataatcggtcgaattagttgtattgaaaatttattggtataataaccgattactactatcaattttctactttagtaagctatatgatggtaattgtgttaccagtaccactacatcaatttttgaaataatacgtctatatcaataatccattatcagaaaaaatattttggtagcaaaattatttaatccataattgtaaaaattaaattaaattttccaaaaaaaataatagcatatatattattggattgactgccttcgatcggtctcatccatgtgctagtgccacaaaaagatgatatataatatccaaccccacctaatctcaccctcgttcacatgtgcatgcatggcttggattagaaggcacaatatgattctaaagagagtttagtagtgttcatccaaaattaccattcaaaccaaaaccaaacaaattatacaattatttttattttacaataacaagatgaagatattattgtggccaccccttttaaggtgggtgaaacctacaaataataagtacatgaatagatgaagtagctggctccaatgatgattatttacatccacaaaaatcaatatactcgtgcatagaaaataaaataaaaaagctgaaaagcacttaggaccatcatcggagtacccaacatgaaaaaaactcttccatggaaaagcatttcagcctttttatggttggaacactcaagaatgaccatttgttgcatttgggagtaccagagaaaggtctcagcaccaatagaagtgttttgcccaacttcatttcaacatgctatgattcactttagtattttggtggcgtttggttggagataatgaaatagaataaaattgaagataaataattttcattccatttctttgtacgtttacatttcaaagtattagaatgtcgttctaatgaaacaccaattttactattttagtataattactattcaattttaaaataaaaaaaatgaccattccaatgaaacatatgaaaaaaaatttaataatttttttatcaattttttttatgtattttaaaccactcttgtaatattatattattggttattctattcagagacagacgcagtaaataaagtgtaggggctatagcccccaataaaaaaaaaatagtattaaaaaaaaattaaatattttctatttaattaaataattatacagcaaaataaaaagccccgacaaaataattataattttaaagtaaagtaaataataaataattttataataattaaatccccactgatcaaaaattttagatctgtcactgattctacttgctaattaattttaattttaaggggaaacatcatacttcttacctgcatatcaccatattctagtttctcgcaaaagaaaattctaatgagtatataatttaaatcaaaaagacatttgagatgaaagtctataatttttaccatacactttattctagtttcacaatcatgtttgcacattctaacatatagctttgatatatatcctgtattttctttatattaattatcaattgagtttgaaaatgaacaaatatatttaacaatttctcaatcaattcccaaatttaagttggtatgccattatttacaagagcttgataatattgaaccaatatctaacttaaaagctcaatgatcatcgattcaagtcaagataccaatttgcattactctctcatggcattgtaaaaactgacacagcaactaataaagaaacacaaaaaagtgtgtgtagagttctgctgaagaagtaaatgaagagacagacaacttttgagccacaattaaaacctaaacggcaaacacttcaatatataatagaagtattatatattaataacaaccataacattatgatacataaacattaattcctgcccccaaaatataaaaaataagcccctgcattcatagctattaattcactatttttctcaagtatccacaaaatcttattctcttcatcaacattagttttgtacccacaaatttagacaaaaatgttcaataaataaataataaaatgaatattataaaagaatccccagaagacagaaggagtccatattagtttaataataataatgccatcaaaaaaacccgttttaactttgaattcccattatacccttagagattaatacgagtttacagatttaccctttccactcgttgcactgagatgtaggccttgtaatctgttttccggacctgaaggggcaaggagtgtgtacgggaggtaccatacaattatactgtagacacaatgaactgctcaaaggaatatcagccgttggattaatctgaatcccagttaaaaaattatgctgtaaatacagtatctgtatactagcggctagtaaccggtccacgaaactagccggaacttcacccgtgaaccggttattgttgaggtagagattctgtacggtcgagaacaaaggtgagattcgacctgagaaactgttgaagctcagatcaacggtcgggatcgtaacttggtcgaccggttcgactgaccctgtgaattggttcctttgtaattggagatttgttattgggaatgtgaatatccgacccggtattgaacccgtgaactggttcaagctcaagtctaggtagttcagctgatcgagccggttcagtgcccggtctacagaaccggagagcttgttccacgccagagagaggtactgtagagaaggtgggagagagctcggagtcagcgaaccggtgagactgttgtgcttcaggtcgagtcgggtcagtgattgagacagaaattgagggaccgaaccggagatgtggttgtggcagagaatgaggtttgtgagctctggtaaggttccaatgctgcgtgggatttctccggcgagctggttgtagctcaggtcaagagttctgagattgcggaggtgacccagtgtcgctggtatgccgccggagatgaagttccggctgatggcgaggaacctgagatttttcaattgagagattgattgcggtagcgggccgtagacccgacccggaacgatcgagaactcggctaatgcggagagctttcctattgctgcgtcgacccgacctgtgagacccggagaaccggctctagggtcgccgagattgagggaaataaccttgtcggaatcacagtaaaccccggcaaagttacatgggtcggaagtgaaatcccaggaggcgaagaaatttgagccaggcaagtcatggagagctttccgtatcgattgcagagccaagaaatcaagtgggtcgagaatggcaaatgtgatcatgttacattgaaacaaacagagggagaataccaaaaacccaactcccaaacacctctgtttcgccattagagagtgaataaaaaagaaaaccaaaagaaataataaaaaaaaagcttgagattcaaagtgagttgaaagaagaagaagatctctggtttttatatagagggagacagagagtgagctttttggagaaaagggtcaaagagaggggttgagaaaagaaatgcttttccgtgagaagaacctcccgatttctcgtggggtacaacaagaacgtgaaagctttaatggctagactggtaagtagtaacagtatcaaaatctctgctaacgagtttatagattagtgtctatatatttacaaatatgtataaaaacgaaaaaaaaaaaaagaaaaagaaatagaaagagctatgaatatattagagtaatggattttggcttggaaaggaagaaacttcgtgtgaatctttgttgctgttcgcttacttctgatgaaactctcaatgtctctgctttttcattattttggcttctcaaacaagacgcttgtaatttacagagtctggaagaagacacactcatatattttttcttatttttatttatttatttattaatgtattttaataatgtttgtttattggggtttgggaaatggggcaaacggttgtccgagcctacgtggaaggaggagtgtcaggttcggaagacagctcagcaggtgttgggacggtggcttggagttgggtcacgtgagtatcgtggaagagaagcaactactactaacactaaaccaaagccaacgaagcaaaagtggtgtgttggttaactttagagtgacagacaggtggtagaagaacagaaatagtaaatggcattaaccaatgaagttgccacgttagcagtgaagtggtgttaaaaagtaaaaacatcagaaggaaagaggcggagttgtactgtgatattcgggtgggtgacagctaactgcgggacccttcctccattgtccacctcggattattttacaaccattttttgttaaaaaaaatttattgggtgattctacaatgcacattcttaaaagagatgtactgatgcacccttgacttgtttcgacattcagaataattttttagtctaattttttttcatattcatgttcgctatacctatttaagataacctacaaaattttgagaaattcagannnnnnnnnnnnntagaaaataatgttcaaatagtctattttac

SEQ ID NO: 18466 - DNA, 3376 bp, Cannabis sativa
  modified_base (2461)..(2461): a, c, t, g, unknown or other
gtaagaagataaagctacatacttttagtaattagaaaaggatgagtaccaatttcaacacagtctaaattttatagcaatgcagatgctatgcacacctctctccctattcaatattaagctaacaaagatttctgaccttttgattctttgaacgttcgtgacatctgttgattaaccgtagagcttgtaagtgtaggatttctaaatggccccgtcaatttgtgaggtttacatggggatgattttactctgtcagagaaggcctttggattcatagttctaaacttatgtgtaggcctttggaatgttgatttcctacggcttgaattacattttgtttctgcagtccctgaagatagcttaatggcttcttcatgagaaataaacttaactttaccagtttgcacaggcttttgcctcttggaatgaagttgtgaagctgaaaattgctcattccccattgcccttgtgacagcttcattttcgtgaagtgaagatgtcacatgagcatctttcataccagattccttcaaaatcaagtcaattccagttaggcatgatccacagacccaatcctcagggacctctctctttacttctcgcatgcaataactgaaaaaacaaggaaaatcatttatgattaggatcaaagaagtttttatgatacagtattgcaatagaaacagttatgttaatatgtatcatggtcacatccaatcaagagtaatacttcaacagcataaatgcaacaagttaaaaacaaaaattcaacaataatatctcagagaaaaataaattccctaaaatcataagctttatttcagatgataaacaatcatctttcaacaatatatgtttctttcataaagataattcaataatcaattagagaaaatcttacacatgttcacaagttgagttgcatttagagcaagttgcaagtaaagattcatcaagacgatgatcaccaccacatatttcacaaacttttgcctgaaaaacagagggaataaatcatatcattacttttgataaacattaaaggaataattacaatcaaactagaacagctgcagcaaagcaccaacagttaaactcacaaactgaaataaataaataaaccgaaataacggtttttttttttttaataaaaaaaaaaagaagaaagaagaagaagaagaaaacataaaacagataaaattatcaataaatcccagtttcttaacaagtcagaaggaaaacagagcaaaaactttgacactccaagtccaactcagtctcctcttggaaaatcctgccacatattaattaggaaactgagctccttgccaaacatatttgagatgcataaaattgtaaccattgttatgtaggtactcagaaaaaactcgaacctcaagccttgtgagagcaaacaatatgcctaaacgaatgaattacccacttgagtagaaatcatatttatttgttagaaccatttcataaatttttggagcttcaaattaatacttatagcataagtttttatcaaacatatttttataaaaacaagagtattcatgatcatgttatgtactcataaagcaaattaagtaataaaacaggaaataaataagattggagccaagcacattctcttgcttattcagtctctaagtataaccagtatatcccattgtatccaaccagtactagtgtgttgagtaagtaccaagcttatctttaccgaatctcccggtggtatgtcctaaattacagttttctcaaatagctcacactcctttcacaacctccattcagccaatcttagcttcatcataactcaaatattattacttgaatcaacttgtttcagagcatacagtaagcacttgcactcttaattactacaacatataaataatattaccttacaaacaaaaatgaaaagagaaaaagaaattatattacaaccctgattaaagtcaaacacaaaagtgagccccacatgatttttttttttctctttcttgatcacttgcccaaactgatccaaggatcaaatgacaattgatcacattacatgatcaatgtgtagaaaatttccttgagtttaataaaaaaccaagtagaagtagaaaataaacactactgttaccctaaaacacaggtggtaagagtaacattttctttttccaggggaaaagacatagcacacataagaacccaacatgttaatgatcggtcttggagagagaaatgggtattcaatactcagtgcccctttccatctaagaaaacaaatgaaactccttcacatagagtttacatctggatggcgcggagtccactcaatgatcactgttgtaaatttttctctttttttttcaaataaaaagaaattatagaaaacattcaatctaaagaaacaccattaaaaaaaaccaaagaaacacacaaaaaaaaaaagaagaagaanaagaagaagaagaagaaaaaggaccctgttacataatctttcttacatattagagtagtaactacttaggtaagtaacaaaacaaatcatgcgattacccatatctacattacaaaaatgataaatgaaaaaataaactaagttgaaaagccatgagaaaaaatcaataccatttttgaaatcgtacccttgcatgaagatggacaaagtagggtctaccgtttatcaagaaaagaaagtagggtctacccaaaataaaagaaaaaaataaataaatgtgggaaatgttgaaagaatttgtcaccttggtatggcaatgggtagccatttgatgggttttcttcaattctttattttttgtatcgttatctgggaaaatgtggtaggaaactgacaagaagaaagaaagtactgaaggagactaaggagagttttgcatatattaggaatacatccattcacgtacatatttatacaaggcagaactgctagaaggcactactgtgtccagtatttttattttggtgttatgaagcataattaaatatctaatttcatataatttttaaaaaaaaagttatagaaaaaatggtgttgaaaactaaccaataacaatgctgttatataaggcaaggggtaggcttttctttagactgctactactactgagctgagtgtaaaaacaaggaatatttgcatagacaggggagagggtggtactattactcctacggttacttatggacccaccaccgcgacagtagtgcaatatgagagtggtactacgtacggtaatactgctctgtgccactccttacactaattttctgtgagccagcggaccagtctttttctcaaatcatgccttttgatttggaaaatgtttctcaaccatcatgtttttttttttttttt

SEQ ID NO: 18467 - DNA, 7631 bp, Cannabis sativa
gactgaaattaattggattagataggattgtaaaatctaacatccaatatataattggatcggatctagataggcctaaaaacattggatgtggtccaatgaacacccctatttttcttattatatctatttactttacagctttgaaaaaataattttttctgtctttgcattactctgatatttcaatatttactccctcttgatggttgactaggctatgattgtggcttttggtaccagcactcgtggctcataatttttgtggagtggttttgtgggttgtgatgccaaagagcgtaggtgctcacaatgctaattttgcttcgactattcacgtttccttgctttagcttataggtttggtatcgttttctatttttagttttcaaaaaattatttttaaaaataagaacaaaaatagcttttgaagtttttaaaacacaagtcgcgtttggttaatcttttttaaaaataatattgaccaaaagtgaattgttattttaaaaaaataaggacaaacaagtctaattgttttcaaaaaaaataattttcttgtttttaaaaacaaaaaataatttttcagttataatgccaaacataaattagttttttggtgctttgttatttttacattttttttaatcttattctactttaccaaataaaaagaagtctgctctggaactttctagggttttttccttcttctctggtctatccagtcttcgccttacccctgtggtgcccaacagttttcttcttcctctttcctcctctcacttctcaattaatgctctcccatttaatgtttccccataatcattacaaatatttaatgcagcttattcattatcaaaaccgagaaccccatttattactcttacaaaaatcctttggctatcctcttctccctgatcttttcaagcatttaattcgagacgtcatactcaggtggagatgaatcattgctatgattctgggcagaaggagatctagacctccgatagctaggatggaattagcaccctctcaacttctactcattgttcactccaagtattattttccttttttcacctatttaaggttatattgtctggattttatttgctccatccctgctttattctctttgtctcctctgcatttttttccttatttgcttatcaccatgaataccttgcccgataaccaatacatccaactcacggaagaagaagctcttatccatgactttgatcatgtgtccatccatcccgaaccacaagctcactctttctgcttggttgtcaagatactctcccctaaaaccctcaaagctgactggatccacaaagccatgaaagatgcatggattgtctgatgccctttctctatatctgagtaccactccggtatgttcctggtttgatttggttgtgagggtgaccgcagaagggtgatggagggccaaccttggcattttgatcgctcactcatgatttttgccatcccagatggttttgataccatacttcccaaccaacttcgtttcattcctctattggtccaagtccatcttgttccttttggctctcgctcttatagccttgcccaatttgttgtcgatactattggtgatcttattgaggtgcacattgcctctctctatgatgctattaccccatttatgtgtgttcgtgttttgcttgacacaaccaaacctcttcatcgtggcatgaatgtccacttccgaaagctatttatcaccaaatggcttaaacttctctatgaaggtatccaaaactattgttatcactacagtaagcttgatcacactttcaacaagtgtgagaaatttcttcaccactgtgataatcatccttttccccccagccttagctacaaagatgctcttcgagccccagccaagtccgtgtacaaaaaaaagcatttttgagttgtccacttccatccctttttaggaacaaccaactctatcaaatgctatgaactctaatattcaggaggttgttgatcacttccttgtccccagtattgccaatactaccctcacttccatattcccaactattcaggccactacagttgccccccccaaacttctcttacacctaatactgttagcgttacccaacataaccccatcccttcaaccatcaattgcccactcccctctcgtcctctcattacccccactgtcataacctcatcatccaaaggaaaagctccaatgtaccgtgaaccccccaggaacctttcacttaaccctcaacaacctcaacctcgtagtcatatagctacttctaccaccaagaaacggtcctatacccgccacaactgtcaagtgggctcttctattcgtagtatgctaaaacgtgcgcgtgcctctaactctaactttcctattgttccttccatgtctaacaatgatgaaccggcggggttgctgaaatgagtcttctcagttggaatgctcgtggattagggagttcccgagcattccataacttctccctcctttgcaagcaacaccaacctcagatattttttgttatggaaactaaacttgctgctcactctacttttgtttctaaagctaagatgtattttgctaatgttcttgaggttcctaggaatggtttagggggaggtctgtttcttttttggaaggatgatgttcatgttaatattttgtcttactcccttcatcacatagactgtaatgttactataaataataatatttttttatttgtcttgctattatggttctccttacattgttgataaacataattcttggactcatttatctcgtctctttgatgttgcccctttggcaccgtggattattgttggtgactttaatgattatcttgactttaatgaccgtaacagccattgtttgcctccccctcatgccatgcatcatttcgagaactttctctacaaatactctctttctcctttacctttctctggcagtcgtttcacttggaaacatggcacatccttagaacgtttggattgggccattgttaatcacaagtggaacactcttttccccactgcttcccttcaccacctttctttttttggctcggatcatagggctattaaagttgtctttgatggcaatccaatgatattcaggcatgaccccacttttcatattgaaaaccattggtttcttgaacctgatttgtttgatctttttaagaatggttggacccttaaagactctctggataccactaattcccctcttcaatcttttctttcaaaataagataattgcattgcttctatggtttcttgggaagggataaaaataaattcaaaggagaaatcaaaagaattcaatctgaaattgataacattcttactggcccttttatttccccctctgatgttcaaacggctaacacacttcaacattctcttgacaatctcttgcttaaagaagaagttttttggaagcaaaggtcgagggccaattggcttaaagcgagtgataaaaatacaaaatattttcacagcagggcttctactagaaaacgcaataacttcatcaagtcccttactttaaatgacaattccagtgtctccagccttcatgatattaccaactcttttgttcagttttactctaatctttttactatccgaggtacggatgctgatgccattgccctgatccttcaagggattaacaaaactatcacccctaatcatcatgatttcctggacagccaatttgattttgctgaagtcaaacgagctctcttccagcttcctggggacaaagctcctggaccggatggtttgaaccctagtttctatcagaaaaattggaacatcgtttgcattgatctctgtaatgatgcccttcatgttcttaacaccaatgctgacattgcccaggtcaatgagactattctcgtccttatccccaaggttaagaatgcttgtcgtatcaaggatttctggcctattagtctttgctccactatttataaggtcgtctctaaggctattgctaatcgtctcaaatctatcctctgtgatcttatatcccataatcaaggtgctttccttagcgatcggataatttttgataacatcattatcgctaatgaagtcatccatgctatcactaatcgtaaaactgggaaagtgggttgggcttctcttaaacttgataaggaaaaggcttttgacaaagtggaatgggatttcatccgttacatccttcatcactttggttttccttcccatttcattctttcattcttcggtgtctttcttcagtttcttttcgtctccgtatcaataataatctatcttcccaaattttcccttctcgtggaattagacagggtgaccctctctccccctatcttttccttctggttgctgaaggcctttctgggatcattaattataagactttttcaaatctttttcattgtattaccatttgtaggtctcctcctcccatatcccatcttctgtttgatgatgacagtcttcttttcactagagtctctgattcttcttgcactgaaatcaaagacattctgctcatttatcagaaggcggtcaatcggtcaatctccaaaagtcttccatccttctctctctcaatactaattctgactctcgatctttttttcttaatttcctgaatatggataataagcctttcatcgataaatacttaggtgtcccttaatgtttttcacgctccaaaaaatcatccttcctttttctccttcaaaaagccagttccaaattatctgtgtggaaccaaaaccttttctctaaagctggtaaggagattcttctcaaatctgtaatgcaggccattccttcttatgccatgtcctgttttcggattcttgtctctgtttgtaaacatttctatagacttatgtctaacttctagtggggatcaattggtaataagcaaaggattcactggataagctgggaccacttgtttaagtctaaattctttgggggtttgggtttctgtaaccttgttcatcacaatcaggccgtgttagctaagcaagcctggagaatttttacttctcccaattccttggttgcatggctcttaaaagctaaatactttaacaaaattattttctcaatgatgcaattggccactctccttccttctgttggcatagtattctttggggtagggagcttctcattaagggcctcatctggaagatcggggatggaacttctgttagaatcattgaccccaaatggcttcctgactgggatagcattcctttcaaagctggtttatctccccctctatccattgtctcttttttcattactgaagatagacattgggacacaagcaaacttaattaatactttgatgataatatcatcaattccattctcagcattccaatcaatccttctaacagcgattgccttatttggaaacatcacccttcaggttgcttcactgtcaattctgcctaccatttggcaaactctcattcctctgctcctagttcctctaatcctgttgcccttaaatcttggtggacatctgtttggtcttccaatataccccctaaaattaagcattttgtttggaaagcttttaaccatctccttccttccaatcttaacctttttcatcataaatccatgttttctccttcttgctcaatttgctcaactcatttagactctaacactcattccctaattacttgttccagagcaggtaagttttggaagaactattctttctctaacttttattttacaaataataaatgtgatattaaagaatttttgcttcgtggctttgaacattttgacaaggataatttcaccctctttctgggttctgtttgggcaatttggaatagaaggaataaagctatttttactaatcacaactacactgacttggatgtggaagcatcagttttaaactacttgcaggagtacagggatgctcaattgaagatcaacactccatcctccctcactcaatctagcagcaccaatttgcagcctcctagcggtatgtttcaacttaatgtggatgtggctcttttctccagctccaacaatcatggttatggtgccatagttactgattccacagggcaagtcattgctggttttttggcatcttcttcctcaggcctctccccaatttcgccgaagcagaagctctacaacgtgctttgttttggtgtcaggcagttcgttttcctctcagcactattgtctccgactgccagaatttggttctcaggattcagaaaaattcctttgaccgttcggctctttcaggatatattgcaagtattgtttcctctttgtcattttttccaggtgcctcagtccactatcttcccagaacggataacactctcggtcacaatttggctcgggctgctcttggaacagatgaagagattgtttggaacaacctgtgttcctcatcttgaagatcttttgtaaccggtttcttttgtcttcgttagttttggttacagatctttgtatttaaaaaaaaaataatgttggcatacatttggttcaataatgatatctgaattgcactggcatcagttaattattacaaattttgtaaagaaataaaatacttaatggagaagatatcatgtagttggcataatgaatattccaattaatagaatggatataatttggattgtagatcttctaaaaaatttggactgttttggctttgagatactagtggacaacttttaaaaaaaaaattatgtaggagcacgcgcaacgcatgtgcctcaccactagtattatataaaaaaaattacatttcacaactaaaatttgtaattaattgccacgatattgtgggtcaattaattagcacatataccgtttattcctttaattctattgtaacacgtataccgataacaaatacaatatgttttcttcaatattacactcatgcacactctttaattcgtttttctcttttttcctaacactatatttctccttcttgatgtatgtgtactgatgactttttttttctctctcaatatatgacatatcatcatatgtataattatatacttttattttgttatgacattaaattatttcttttttttccacacatatataatagaacaaataatattatttaaaaacaattaatttttaaaaggtttctctttttattttattttttaatttgaaaatagttttttggctacacatctaatttttaggtctcaaaaattatatcactgcaatctactctttaatgttatcattttaatatgcgggaaacatatatttttttaccatcatcgaagaagatgaccaaaatcaaaggtatcatgttagtttcttaatatttagttaatcaataagtaaacaatgtttgaatcgatatatatcaaacaacttcataagttactaaaaagtattatttttatatttttttgataaataaataaacaataattaaatttaaataaaaattaatgtatcaaacaacttaataaattactaaaaaatatattttttatttttatatttagacattaaataatacttatttaata

SEQ ID NO: 18468 - DNA, 2833 bp, Cannabis sativa
ataaactaacattatttaagaaagaaatcaattcttggcgtcatgatcaaaccgaaagtaaaaaacattggcagtcatgaatgatcatgttaaataagaacataatacaactaaaaggaaattaatggtccttacaaaaaaaaaaaaaaaaaaattaaagaagaagaagaaattagtggtcatgaatcaacgatactcatttatggcatttttctatcaagcttcacaaaaaagctactttacatatacatgaatacaatccaagagataatatgaagcattagacaaaaactccctaatttgtaatcgaaagaaggaaaaaaacatagcaatgcatttaattagggagagtatatattaatcacttcatcttaaaatttgaaaagtttacaaatgaatttgctaacccttgttgataatattaaccagggtatgattcctacctgcaaaaggcattggaagattagttgttgttaagtacattcaagaaatgataaagaaaaaaaacatgtaggcattggaagatcgagcaccgatactacctaaaattgttgtaccgatacatatttgaatttaataactaatatacaaaactactaacaattcttaaggcgccaagcaattgtggtgttgggcaccactgatgctcaatagtcaatccatagtattaaagatcattttatatttaaaaatatggtctttttcagcttagataggttaaaattgaatatcataaaagttttaacttattaccatgacattgtcattcaaaattccaccacccttccatgataaaaccttgcctgcaaaaagacatgaaataaaacacatggcatcaatattacttcttcaaagatttgttatttccttttacagattgatctgttgattctgttctattctgtctgctaaacttttctatttttggttgtacaaaatttctatgatcttgcttagctacctaaccatattccacaaaattgaagacataaaagctggcgttatgaaacaaaaatagatattgaagacataaaatgctttaccgaagggttggacaagctgctcggatatggtggcgacagggaccctccaaaaccagcataccagcacaagataagttaacatctacaatgggggaaaataaaatgaattattaggaacattagtgtagacaaaagaagcaagtgaacttcaaaaagagtcttaatttgtcaaaattacctttacgaagaagaagactttcgaatacaattcacaagatactttctgctcatttttatgtgattcttgatctaaataatagataaggcgttaagaagtataaccaaagactgagattatagttttacaaaaaaggaagaaaaaagaaacatatacatagtacacacatattatttatgaatatctactttttcaatcaaagccgttaaaaactaaattgaagcaaatgggaagatggggagtcaagaaaaatcagaattgttttgaattattgtcattagaattgaaatatcctaaaaagagacatacacgatacacctatagtctcattttcttgtcaagcttaattacatagcaacaaggataaaaattctcaagcatactggttagctcgctttttgatattcgaaagcttaattatggtgtttcaattcttttataggctactttgatagctgattctatctaatgaagtatgcttattttgttttttttttaaaaaatatatattactcccagcaacaaggataaaatttctaagcgatttctaaaacactaagtggtgtttgattggaagtaatgaaataaaatagaaacaattttcattctattcctttatttagttgcattttaaagtatcggaatgtcattttaataaaatgattttttcatcattttggtggaataactattccattttgaaatggattgaataatcattccaatatccaagatgagaaattttttgataatttcttttattaattttaaatttgatttcattcctttcctattcccattcccactccaccctattcttattcctattcctatattttcattcttgccaactaaataccacctaaatctcacaaacagaatttcaaccttctaaatttgaaaaatggcaacatgaaaaaggataaattgcaatgtattcaaattttcaacaaaagaaatctctaaattaatggttgcattgaaggacctcaaaactcacatttcataagctctttctcctttgcaacagccattcttctaagcttggcagcctgtgcaaacgtagctggcctataatccacaatcaacaacacaagagagcaaaaatctcaaatccactaattcaataatcaaattcacaaacaccaaaaaaattaaataaataaaagaaaaactcaactgtgacaaaatactggcttccttcataagcttctttatctcctcacgcaactggatctccgtcgcactcttcgatcctttctgagagaaatcaattccattttcataatccaaatttgatattggaatgagaagaagaagaagaagagagtgaattgagatattgttattgttaccttcttcaagtgttcgagccaccttgaaaggaattggaaagcgatgacgatggcgaagattagggttggagcgagggagccccggcgattaacctggagagcttcttcggcttctgctatgtctcccatggcttctttagttttcctctgtttgggattcgaatgagaatgtaacgaacgatggtcttgctgaatcggtccaattcggttagatccaacgtgggcttcattttgggccttaaatatgggctttatta

SEQ ID NO: 18469 - DNA, 2771 bp, Cannabis sativa
ttttttttttctccactttttcatgatacttcattttgtggggcccaatacacctcgtgccatccatgtgtccatcctaatccgacggtgacccattctctcctctcttttttccttcctaataaattctaacttcatctaccttctctatccaccgtcaactcataaaaatatgaaagtgaataaaaacggtgcggcccagcccattcatttcagcccaattaaaagcccaaaaagaccaagtcaagcattttcctcattggaatcccaactcctgtccagtaaacactccccacgtgtcatcctcctattcgtttaaactctggaatccaatgaccctttttctgtataaagatcgtcccaaaccacggctactttcttagccccaaaccccaacaacacactctttctctccacaaccaacggcaaaaatggcgcgaaacattctctattcccggggaaatattccagtgtttcgcgtcattcttcttctcctgcttcttcttcttccccattcttcaaccagttcccgccacgactaccacgacgctctccgaaaatgcattctcttcttcgaaggccaacgctccggtaaactcccaccagaccaacgcgtcagatggcgccgcgattccggtttacacgacggcgccaccgctggagtacttactactaagcttatttaatcaaaccacattttctcgctttccaaacacgagaaagaaaatctaataatctgttttccattttttttctttaacagttggatttaacgggaggttactacgacgccggagataacgtgaagtttggttttccgatggcgtttacgacgacgttactttcatggagtataatagattttgggaagacaatgggacctgagctgagaaacgccgttaaggccgttaaatggggtagtgattatctgttaaaagtaacggcgattcctgacgtcgtttatgtccaggtaggcgacgctttttcggaccacaactgttgggagagacccgaggacatggatactctaagaacggcctataaaatcgatagggcccacccaggatctgacgtggcaggtgaaactgcagctgcattggccgctgcttctattgtcttcagatcacgtgaccctgcttactctagattgcttctcaatagggccgttagggtacgtacactactttttatctgtcacagtactgtaattctatcattctcatttttatttttagaaattttattaaattataaatgcgcaccggaatattaaacagaaattaaaataattttacaaaaatcatttttaaacattctttttcacatttttatgttaattgcattatctaatttatttatattttcagattttttttttaaagtgatctatactattttttagtttcttaatagaatattaaataatttttttgttttaattgttttttgtcataaatatattttaatctaataggtacattttttaaaaatataaaaattaagaaaaaaaattaataggaaattacttatatatataatttttttaaatttatggtttgagtagttttcgtagtttatatgtaaatttttagttgcgattgtaaattttcataaaaatgtaaaattagaaaaattccttaaaaattactatagattatttatatattatataaaagaattaatctgttatactaaatagggaaatgttgtattgtacaattgaactcgataaagaaagaaacaaatttgttatctcgagtaaagatgtaaaatatcgcgagaaattgaccgttgtagtgtgaaaacggttttctatgatgacaagtaggtgttcgagttcgctgacagacatcgtggtgcctacagtgctagtctacactctgctgtgtgccctttttattgtgacgtgaatggttaccaggtacattattagccgttggattaaacaatatatttgtagttgaactttaacatatttgatcaagacccttgattgtgatgactttgatgattaaaggatgagttgttatggggagctgcatggctacacaaggcctcaaggaggcgccaatatagagaatatatagtgaagaacgaggtggttttgaaagctggagatacaataaacgagtttggttgggacaacaagcatgctgggattaacgtcctcatttccaaggtaattaattattgtttttggataccttaatccctggataataatgattaatattattgatattgtgttttgtgtgtgtacaatatttaagcatatggggtctctctataatattaaaacagtgtcatatgtgtttggttttgtcttgtctagattttctttggctatttcttgtttgtttagaatgtgggaaactcttattttattctcattttttatataataatgtatttttttggatttatgtcgtttcttatttagtgatactagaaagtgacttatctggccaatcacgtggtccttggctaaatcaatggcttgtggtgattggttggtattgttgcttttatatatatagtggggtcttgtctgtatggtatgggaccccaattcatacaaatataattaagtttattttgtagtgaaagggtattaaaaagggtcttaaatgaaaattaaataatgttagaatatttccgtacattatagtatgggatttaaaaaaatgttttcaggaggaaggtgaaaggaatagtaataatgtttttaaagaataatcttatcataattgtgtataaaatagtcaaaaaag

SEQ ID NO: 18470 - DNA, 9417 bp, Cannabis sativa
ttttcattcgctgctcaaaggaagtacatggcattatgcttactattcaaaggccaattcacttttggtagaagcagaagttcttctgttgattgatatgttttctcaccgttaactgttaagggaattatactttggttttagcttgatggttattatcattgtactaaaaatgcatcaggagttaaatttatgaacattttcacagagggaagatatccgaacaaaaggaagagaccttgttgacccaagtcttgagattcttaagcagcaactacttcccttaaaagattgggtatgttaaaacctataaactcttgattgcttttctttaaggacccttgaagctttttttcttgcaaatcaatccaagcttctaatttcaggctgctaacatgtcgaagaaatggcatttggaaaggacagaagatgtaaaggagaagcctcttataaagcaacttactaaaattttgggtgctaatccaacagattgatttcagtgtacactagtagtaactattttcagtgtttgaattaaaggtgtaaatagctatgagtgcttatattgatggctatgggtccaagaaaagtaaagcattattctatgtctgttgcctgcacatgttttgatgtactataataagaagtaatacttgcttgttgatttgctactttaactaatctaagtttattgattgtgttgtgaaattaatcatctcatgatcacaaaaatcttgttatgatgatgaaaccttgaaacgttgacttgatccctaattcattaaactttaaggccacacattgtctctcactttaatgattagcaatgcaattttatggaggtcgactccacaccaaaatagaaagtggattggtgtcaataaataccacaacatgtaaatggttgaatttatatatatatatatatataacttttttctatagccatgtcagtccttagttataagaagctataaatggaagcccaacattcaattggatgtcatccttaaatatccttcatagctcgtagtctaaaccagccccatatttccaagcctcaagacgtcgtatccactgatatctcaactggggtgaaaatgcacttaaaaatggccttgtaaaatatgcaacgagtgaggatacatttataatgaattgcaaagtaatacacttagagcttagaaggatcatttaggtaattttaataacatgtaaattcaaaacatgagggcggacaaagaaattacctaattacaggctcagcaaaggttgatagaaaagtataaaaacctagcatagcaaaatgaccagaccaatcaagaagtacaggaaagccaacctggaacacaaaagtgaaaatttattaaataacatgattattaatccacttatagaaataataattagaccaattatttcttttttggttgaagcaatagagtacatgagaacgtgcatcttattaaatgcggacagttttagctgctgcatctattcaaagggggttttttttacccatgacatacactcatgtcataaggcatatatatatatatttatcagttgtaaacaggcaaggaagattgtggtaaactttattgttagcttgtgcttccatagatcattccaatgaaaaaaatgcttttaatatttataatttttgtctatgtaaacatattaaaccaagtaaagttacctttatcttagatttaggacaattcaacataatgctactgtcatttcatttattcatgaatcatgcataacaaagtaaaataatcagacttgtattacctgtgcgaatatggagggtagaatttgaggtttggatatcataactaggcctagtgttttggcaagaggcccgaattgtacaacatcctgcaaacattacaaatttttattgaaacttaatttttaacaaaaataactgttcaacttactacttataattcaaccaattgattgattgggattgttggatctatcatggttaaattaacctgaagaaatggtcgtaacaccggatcgcccagcctctgaagaataaaaatagtcaggcaacagcaatggatacactagcatgccattggtaaagaactctagcaaattctgagctaacctgcatactctgaaaattggcatgtaagagctcatttataaaatctggtggaacattagacagttgctttgctgacatcgctttttgaaacaaccacgaagtacttaaattaggctgcaagtttcacattgtcattcaagttgttatacaccccttctggagtaaaaacacaaagaaataaaagaaaaagtatttgtactaggacagaaaacagcacatcaccatgtatggattcagtagggacaagttgtacgaatcaagaaaatttccgctgactgcttcatgtataccttttgttaagtaaaacagaatttcctattagtgttcttctggtaactgtaacatttgtatcaataatcaatacatgctgaagcttgcacaataaaaaagcttgtttttttttgttaaaaaaaaaaaagcttgttttctaattttctcattaaattaatgtaaaggtgcatttcctatgcccagaatttagcattactagttaaaagaagaagaggaaaacaaaatgaagataataataatattcttctatttcgagattacaactaatggaaaactttcccaccccaatcataaatgagttcacaaacataaaatataaataccacttgagagtctgccaagatgccttgtcaagctcccaaagccaccgaatgaaacaggtgactgtataccactggcgtcaccaaactgcagagaatggtattgtaacacttgcattccttttggcatgtaagcataatctattggaggtttttgaagtatagttacaccacctgtaatacacgattaaaagcagctggcagtgggctgcagaattgatgatccctcgttaggaattgagatgaatatggctggaagagaataaactgctataaacaatatatgcattttcatagagacaaaatgaatgaccattcaaaattagcaagaataataaatcgaatttttctacttagtaatgaaaatgaacacattttcattacctaattactttcaacagttaagctgtgtattatggaacaaagccctggataagcaaatgaccaatttccttcttattagtggaaagcttttagttatctttagcatatttttctaaggtcttgcttagttgtatttttcacttctatttcctattcataaaagtgaaaatttcaataagcatgctgtgtgtttgaatttttgactcaatatttatacatatatataaaaccaatgagagcctaaatattgaaatactatagaacatgattgtagtttttgcttaaaaataatttattcaattcaccaagattttgttatgagttatcacaaaatgcatcataagcttattgcagttaagtgagttcttgcagggtcacctgtcacggtatgttgggaaaatgccatatataaccctctgaatctccagattgtcgagagagactccctatagaataaaaatatacgcatgatctttaaaaagttgcgtggacatcagaaagaaagtagaaggattctactagcttttataatctgtagaaactagttaagggttattgcttaacattgcgatacaagtcactctttgaacttgaaggaccattgattcctttggtgtagatgaggacacagaatttggaaaaatttaaagaagcacaatatgtaacaccatcaatataaatgactaagtagaactgcgagaagcaaataaaaaaacaaaccagttagaactgacctgataatcctgcattagctcccagtattcttctaacagttcttccagtttaggtgatccaggttggggatcaatgtaggtgaacatataagtagtacgatcagtagggcctgaaccagcaggaaaggcctgaaacgtttactgttcagaaaaaactaacaaaaaagtgttgggtcaaggtgagggacagttttttgtgtcttttttatatcatagctacctcccaaaagcattggactactgagttcccaaccttccttattgttgaactactatatataacatcacttgtagaattactaccaaaaccgcgagcacaggatccgacaacaaggcaaacaccatctggcttccttccacgtcttatctgcgtgatagaacagaaaaaggaatgaatttcaatattccaaggaaaggagaaatagcattgacataaatatgtgcttgaaccatttaaacttaatataaatactaaatatctgcttgaaccatttcaacttaatataaataatcatttttccaatgtgatttctagggtgtgttacagtagaggaattgtaaacttaggtagacacatccatcatcaattatgcatagttacctacctgttttacaataggtgaaaagttccccgttgcatcaattatgagtttagaagataaaatgttcccatcagctaataatgtaacctgttgtgaaatgtgtgcaacaaatatctaagtcagttctctatcaatgtacagatattaaaacaaaagaaaaataaataaatgggtttaatcacataaaaaattcattttttattttgaatacaaggatggtaggaattagtgaattttggagcctaattacttgtatgctaaaaacaaaactgatcccctcaaaaatttacccaaacaatagacagaagaacactcataataaccacagttatctagatcacattttggcacatatttcaaaatctccatcaaagctaattgattgagctaaaggttttcatttgctttcagtcaaataaccaaaatataaagggcagtaaacttccaggttgtactacaccagcaatgacacttctaaacattgtttctactgctttcttgtcctatccctcttacattcttttaacatttggagataaaaaaaaaaagattctttcaaggtgatatagtgtcaataggactcgttaattgtcaaacttatcaaatacaataaaggaaactgttaaactactttaactctttggaagtgctagaaactcacaactgcatcatcatatacagatatgctggacaaagtgcaaccttcaaagatgacaccccctagggaaacaaaccgagtcttcattatctctatcagttttgcaggcctgtaaacagagaaggatctaaattaaagcaacaagttcaacaattgacacaatgcttcttgccacttttataactcatataacatacattacttattgcttggaaagaagaagaaagataacttacaatatgccaagattaagaatatcttcaacccagatttcgcccttcccttcaaatccacatctgttctgtgcagttaatggaaggccaaacaagtgacaaaagtaagtggaacaccaaactctgtgcagaattcataggctagtctattcaattatgcaacttcccatcagatgaagctctagtcaagtgcatttgagacaccacataccatgtactaagagtcaacaactacacatgacgtttttctttagtgtatttccacacttcacagaaattccccaagactaaatatggctcatagcaaactttgctgaacttgcattcaattatcaatttaagaaccaaaggaacttacaggattaaattttgcagcagtaatttcttcaatgtcatcttcagctaaaattccaactttgacaagttctaagagctcttttcttgagatgttccattcctggtccctctgatcaatgattaccaaaacatcatagacatcacttacaaaacacttgactacaaataaatttttatttgccaaaagtttatacacaacaagcttcatatcttattgcattaccccttttagaacgtttttctccacaatggccactcggagacctttggaacacaatgctgtggcaatgaaaactcccaatgtccctccacaaactatcacgtcaaacttatctagagctttgttagctagctcagaattggaaaataaaccgggattcgtagaaacaactttctggggttcttgtacaactggaaaatatttataaaaaacaattagaaacacaaaactttcaaaatgccaggacccaatttcaaagaagggaaattaagcaaacaaatatgtttctgacctgtttgagcagaacaaataccagtccagagttggtccagcctttttaaggcactatacgagtaagctcctccagctccaccaacttccccaccaactgaaatactctccattattctctacaaaaacaatattgggagattcatatgttaaaccccttcataatactaactcaccagtcaccaccactaactagaaatacaaatacaatacaataagaataattaaacgaaactaaaggtggaatttgaagaaggaatgaaaaggtacctgggttctagaggcttgcattttaaagcccaagcttttgcttttggtagctctatgtcttatgccatgagcatggagcaggagatttggtcttgggtaagataataacccattaaatgattggaggtgaagtaataacatggcttctgctcaggagtttttctgctcagtcttcacctggccatagctacttaattttatggtagagaagaattgaagtttgaacattttgcgtaccacaacgggacacgttagctataactaccatacagtgaagtgtctctcggtatcaacaatcaaaagttctaatagtatttcaaaaaaaaaaaaaatcaaatagtagaaagggtaatttgcggctagaactttgaagtttacaagcatgacaatgaggttttttaccaccgagcttataaatagtttaatgatgatgtatagaagatgagatttggttttttggactctccacaaaaaaatacttattaataaaaatgaatcgtgtattaagactcattaatgtctcaatcatgtaaaaaattctcttttttaactccattaattgctacatacatctttaattattagttgccgaaaacttcggtcgacattttggtgtttttattgagagttgtaggaagctttctgaaagatgaaatcataagaagtcttgtgatataatggtatttaacaagaaacaattcacgtccaccaccccaacataacgacccaaagggactagaagaagaagatgtgacttctcaagtggatgttgaaggaacaggagataccaacgaccatgagtgtacaaaagatgattttgaaacgtatgacaaagataattgtacaaaactagtggcattgaggcaataagctgttaaccatgagactaagttagaagaaaagaaagagcaaaacaaaagaatgcaagaaatattgatcgtcctgaaaaagacgatggaaaatgtagtcattcatgtgtacccaaccgttgtgccatctgtgcatgaaaggatgggggaatgaccttctcagcccgagggaagccaaaggcataaggatagggaacctagctcaatcaggtactcttctgaaagaccaacccctaaggtgaatcctagggttgtacctaaaagaaacaaaacagtctgggacccacaaaaaattcattctgaaagaaaactactccaacctcagatagtatcctaaatgaaggattttggctgaactcgctatcctccagaaagacatagaaagagtctcccggaggcagaagggagatgactcagaatttggctgtgaggataaggagccttgtgccagaaacatactcgaatcagagctcccaaaaaactttaaaatgcctgaaacgactttgtacacagatgacacaaatccaagtgatcacctgtcctgattcaacagagtcatgacagtcttaagggttagctgatgccaaatgcttatgcttcccactaactttgggaggattcgaagaatggtttaaaaaagttagaacctgggtttgtgaattgttggaataagttgcaaattaatttcaaaagacagttcgttgcagtcagaaaaataaacctcgaagttagtgccctgactaacatcaagtagctaaccttggagaccttgaaaaatttcatcaagaggttcaaggaggaggcttccgaaatgaagaaagttgataaagaacaatagttagccctgttgcaagctggtatccagacggggactcccttctagaatgaactccaacaggaaggtgcgaccaacctttaagattttgaaaaaaaaaagctcagaaatacattaatttggaagaggcccaaataatagcttttggagggtattaccctactggaggccctgggtatgcttctgcgatgctagttcccaggggggtgcttcatgccacccctcaaacctatgggatgcccagtgtacaattacaaatgccattagggtattctcaaaatgtggcaccaactcactctaattatgggttgcacaataatggccctactccaggagcatgtttacggtaccccgctcagtcagcatcacttgcggcaagtgcagctacagctccccaaacctcccagagcaaaaggtcatccaaaggaagaactcgaagtgagaacaagaagacaaagaggccatccggatacaacccttagtatacctagtatactaagttggtggatactcaagaacatgtgtacgtggctacaagataaaaacattcactaccgaaggccacctctttttttcgagatagtttatgaagagatcccaataaaagatacgagtctcataatgatatcggacgtacaaccaatgaatgaaaaaatttgaaagatgaaattgagagcctaatacagctaggccacgtgtatgagtggataagaaagtgtttgcccctcgtttgccacatatgagagaggggaaatctagagctcgagcacctcatagagctcaagctctagatgtgttggctcctctgggagcactcccaccaaatcaaggggtaccacccaaacagccacctaggccaaatgggagagtactacgatctgcggaagaccccatatacggggctcaacccgcaataagttgaaacgctatgccagggcccttgatcatgatgaagaagtttgggaagtgaactagctactgacacaaaggcctcgtctcatggatcagcctataacattcacagaaaaagatgctcagacaatgctcttcccacatcattatttgttagtgattgtgactcatattaccaacaaggtagtagctcaaatcttggtagacaatggaagtttggtgaacattctgttcaaagaggccttcctcgccattgccctcatggaccaagatttgtcttcgagttgttcctaactaactggattcaacagaaatt

SEQ ID NO: 18471 - DNA, 3047 bp, Cannabis sativa
ctgtttggaaatagttgttatcagtttgtggaaaccacttcttatttatttgtagttttatgtacgacaactttgagctgctaagaacatgatctttgttgactatttagaaattttatggtattaaataaaaaagatataaattaactaaacaaagtattactatgtgaattttattaaaaacttattccaatgtagatgatttacggatggctgtaaaagaggttatatgtaacaatggcaaagaacgccatcaatacgaagaagcactagtagccattactgttgacgagtctttgaaacggtaagaacagataacttttattttgctggaagagaaaggtttattgtaaatttggtgcttcgaagctcatgaaaatttatatgctttaattgttccttcatagttactgtcaacgcattggaagacctgatttttggggtggagagtcagaattactggtgagtactctttggtgcataattgtttgataacctgtcttaaattcatcttgttttccttttcagaaaaaaatattactatatgtttattggccttttgcaccatttcatttgcccatataactaatctagctggcacaaattcttgcaggtggatttctaggctaattgtttataattttagccttgaaccatcgcttctaggtagaaatattttgatgttatctgtatgttcatgttctggtggaatttggttcttactcttctatgcacttaggaagttgaaatttataattttctttctctacctcttcggtttttggtacacggggaatctcattttgactattccaactctagttgttaaattatctgtatatgcgttgactgttgaacatttgtaatttcccaggtgctatcaaagctgattaggcagccaatcaccgtgtacttgccagagcatgaggtaggctcacgtgttggtgctttatatgtttaatttgtaggcagtaaatagctgtttaaaaagcatggatgtgaaatatataatgcagtatgtcaattagtttttagttaactgaaatatatatgccttaatattagaaactgagatagaaaaatagctaaccataatggtctgatcacaaaagaactcattatctgttataatttctaacttgggatgcaatgcaaatctttgtttctgaagtgtggttgtggaagatagcttaatttcagcttgaacttttgaatgggtaatatcgaatatggttttcttttccatttatggaatgtacattgggagtgagttttctgtgagtaagaaatgatatgaaaaggcgcagtaaggaaggacaaacggatgactggagaagccagaaaaggctttttatttgactattcaaagttttagttttagatggcttggacttgctgattgtggttacttttaattatgctgctactagaatcaaagtcagctcaaatcaccaatcttgtgttccttttctttgaagttattatgaatgaaggtgaaaacactgtcgtttttcgtcaattgcagcatactaggggtggacggggtactggttttataccgatagcagaatatggagctgagtttagcaaaggttcagttacaagaaagccaaaaaaggtggtaagacttttatacaccggtagaaaccactatgatctactcatctgagattagccgaacaaaaaacagacagaatagatatgatgtcattcttattcaaagatgatgaacaagccttaaggaatgccttgtaattttgaattcaattaaattttctgtctttgtatttgtttactaaattttgaattacataatagttaacattttctttcttttatcattagctgttttggttttttattactaataccagagtggtacttggacaaatacttcaacgctaatggtatcattgaaaaataaaagtgcccttcgactcgtcaatggttgtttccagatggcagatgtaatctttctcttttaagtactatttatctttactattgtaatagtagcctgttgggctgatagttattgacccttttgacattttgtcctcataaattaccaaaccccaaagtcagatcaccgaaattcttgtgcgtggggctcacgcgccacctgaaggttctgcgcactttcccacgcatcagagcgtggaggcgcatgtgacgatgtttttgacggtgttcttttgctagttgtttactcagttcttctaagcccacttgcatctatctaaggttgtaatttggtattttttgccttcttcgtatttgggtgttcattctttagtgttctttttcttcattttctttatcaattgtttttgcttttgagattatggcagatataacattagattcgaaatcaattgttgtttttaatgtggttcccgtgatgtttaaaattacggaccataaattgattggttcgaattatttggaatggagtaagacgatttgactgtatttgaggagtattgacaaagatgatcacttgactggcgatcctcctaaagaaaaagacgattaaaaaaaaaaatatagctccgtgaggatgctcgcttgttccttcaaattcgaaattttatcgatgatgaagtaattagtttgattaatcattgggaattagttaaagaactaatgaattacttagagtttttgtattccggcaaagacaacatatctcgcatatatgatgtttgcaaagccttttatcatgcggagaaacaagatgttgtgaaaattatgtagacaaatatacgcagtcacacaagtaataagtaagatcgtcttcacagggattgcaaacaaaatatgttgtaaaaccaactatagttacaacttaaagtagaaggaaaaatatgagaatgcttgagcactgattcaaaattaaaataattgtaattaatttgcgtaaaataatgctattattactagaaaaattgcttgcaagaaatgtaatatggtaaaaagtggcttgaataactaattcccctagtcaggtttttctcagttgttatagcattacttcagcattttca
